(19) United States
(12) Patent Application Publication
(10) Pub. No.: US 2012/0094332 A1
(43) Pub. Date: Apr. 19, 2012

(54) DNA POLYMERASES AND MUTANTS THEREOF

(75) Inventors: Jun Lee, San Diego, CA (US); Gary Gerard, Frederick, MD (US); Harini Shandilya, New Market, MD (US); Katherine R. Griffiths, Hornsby (AU); Moreland D. Gibbs, Sydney (AU); Peter L. Bergquist, Sydney (AU); Robert Jason Potter, San Marcos, CA (US)

(73) Assignee: LIFE TECHNOLOGIES CORPORATION, Carlsbad, CA (US)

(21) Appl. No.: 12/982,804

(22) Filed: Dec. 30, 2010

Related U.S. Application Data
(63) Continuation of application No. 12/764,049, filed on Apr. 20, 2010, now abandoned.
Application No. 12/764,049 is a continuation of application No. 12/127,790, filed on May 27, 2008, now abandoned.
Application No. 12/127,790 is a continuation of application No. 10/244,081, filed on Sep. 16, 2002, now abandoned.
(60) Provisional application No. 60/318,903, filed on Sep. 14, 2001.

(51) Int. Cl. C12P 19/34; C12N 9/12; C12N 15/54

(52) U.S. Cl. 435/91.2; 536/23.2; 435/194; 435/91.5

(57) ABSTRACT

The present invention provides polypeptides having a nucleotide polymerase activity and method of enhancing polymerase activity. The polypeptides of the present invention may possess both a DNA-dependent DNA polymerase activity and an RNA-dependent DNA polymerase activity, i.e., a reverse transcriptase activity. The polypeptides of the present invention may be used in any application including, but not limited to, DNA sequencing reactions, amplification reactions, cDNA synthesis reactions, and combined cDNA synthesis and amplification reactions, e.g., RT-PCR.

### CROSS REFERENCE TO RELATED APPLICATIONS

[0001] This application is a continuation of U.S. application Ser. No. 12/764,049 (pending), filed Apr. 20, 2010; which is a continuation of U.S. application Ser. No. 12/127,790 (abandoned), filed May 27, 2008; which is a continuation of U.S. application Ser. No. 10/244,081 (abandoned), filed Sep. 16, 2002; which claims priority to U.S. provisional patent application Ser. No. 60/318,903, filed Sep. 14, 2001, the disclosure of each of which is incorporated herein by reference in its entirety.

### BACKGROUND OF THE INVENTION

[0002] 1. Field of the Invention

[0003] The present invention relates to the field of molecular biology. In particular, the present invention provides polypeptides having a nucleotide polymerase activity and method of enhancing polymerase activity. The polypeptides or polymerases of the present invention may posses both a DNA-dependent DNA polymerase activity and an RNA-dependent DNA polymerase activity, i.e., a reverse transcriptase (RT) activity. The polypeptides or polymerases of the present invention may be used in any application including, but not limited to, nucleic acid synthesis reactions, DNA sequencing reactions, amplification reactions, cDNA synthesis reactions, and combined cDNA synthesis and amplification reactions, e.g., RT-PCR.

[0004] 2. Related Art

[0005] DNA polymerases synthesize formation of DNA molecules that are complementary to all or portion of nucleic acid templates. Upon hybridization of a primer to the single-stranded template, polymerases synthesize DNA in the 5′ to 3′ direction, i.e., successively adding nucleotides to the 3′-hydroxyl group of the growing strand. Thus, for example, in the presence of deoxyribonucleoside triphosphates (dNTPs) and a primer, a new DNA molecule, complementary to the single stranded nucleic acid template, can be synthesized. Typically an RNA or DNA template is used for synthesizing a complementary DNA molecule. However, other templates, such as chimeric templates or modified nucleic acid templates are also usable for synthesizing complementary molecules of polymerized nucleic acids. A DNA-dependent DNA polymerase utilizes a DNA template and produces a DNA molecule complementary to at least a portion of the template. An RNA-dependent DNA polymerase, i.e., a reverse transcriptase, utilizes an RNA template to produce a DNA strand complementary to at least a portion of the template, i.e., a cDNA. A common application of reverse transcriptases has been to transcribe mRNA into cDNA.

[0006] In addition to a polymerase activity, DNA polymerases may possess one or more additional catalytic activities. Typically, DNA polymerases may possess a 3′-5′ exonuclease activity and 5′-3′ exonuclease activity. Each of these activities has been localized to a particular region or domain of the protein. In E. coli Pol I, the N-terminal domain (amino acids 1-324) encodes the 5′-3′ exonuclease activity, the central domain (amino acids 324-517) encodes the 3′-5′ exonuclease activity and the C-terminal domain (amino acids 521-928) encodes the DNA polymerase activity. When E. coli Pol I is cleaved into two fragments by subtilisin digestion, the larger fragment (Klenow fragment) has 3′-5′ exonuclease and DNA polymerase activities and the smaller fragment has 5′-3′ exonuclease activity.

[0007] In addition to the E. coli polymerase discussed above, DNA polymerases have been isolated from a variety of mesophilic microorganisms. A number of these mesophilic DNA polymerases have also been cloned. Lin, et al. cloned and expressed T4 DNA polymerase in E. coli (Proc. Natl. Acad. Sci. USA 84:7000-7004 (1987)). Tabor, et al. (U.S. Pat. No. 4,795,699) describes a cloned T7 DNA polymerase, while Minkley, et al. (J. Biol. Chem. 259:10386-10392 (1984)) and Chatteree (U.S. Pat. No. 5,047,342) describe E. coli DNA polymerase I and the cloning of T5 DNA polymerase, respectively.

[0008] DNA polymerases have also been isolated and cloned from a variety of thermophilic organisms. These enzymes typically have a higher optimum temperature for polymerization activity than enzymes isolated from mesophilic organisms. Thermostable DNA polymerases have been discovered in a number of thermophilic organisms including, but not limited to Thermus aquaticus, Thermus thermophilus, and species of the Bacillus, Thermococcus, Sulfobus, and Pyrococcus genera. The thermostability of these enzymes has been exploited in numerous applications including the polymerase chain reaction (PCR).

[0009] The polymerase chain reaction (PCR) is used to amplify a target nucleic acid sequence from a sample. PCR utilizes denaturation of the target DNA, hybridization of oligonucleotide primers to specific sequences on opposite strands of the target DNA molecule, and subsequent extension of these primers with a DNA polymerase, usually a thermostable DNA polymerase, to generate two new strands of DNA which themselves can serve as templates for a further round of hybridization and extension. In PCR reactions, the product of one cycle serves as a template for the next cycle such that, at each repeat of the cycle, the amount of the specific sequence present in the reaction doubles. This leads to an exponential amplification process. If the polymerase employed is a thermostable enzyme, then fresh polymerase need not be added after every denaturation step because heat will not have destroyed the polymerase activity.

[0010] If the nucleotide sequence to be amplified by PCR is RNA, conventionally the nucleic acid molecule is first treated with reverse transcriptase in the presence of a primer to provide a cDNA template for amplification. In reverse transcription/polymerase chain reaction (RT-PCR), a DNA primer is hybridized to a strand of the target RNA molecule, and subsequent extension of this primer with a reverse transcriptase generates a new strand of DNA which can serve as a template for PCR. The preparation of the DNA molecule complementary to the template RNA molecule is referred to as the first strand reaction. Preparation of the DNA template is preferably carried out at an elevated temperature to avoid early termination of the reverse transcriptase reaction caused by RNA secondary structure. Unfortunately, the reverse transcriptase enzymes typically used have not been efficient at the desired elevated temperatures, e.g. above about 50° C. In addition, reverse transcriptase enzymes typically require reaction conditions that are not compatible with DNA-dependent DNA polymerases. This requires that the reaction conditions be manipulated after the first strand reaction in order to perform the subsequent amplification reaction, thereby adding substantially to the time and expense of the reaction and introducing a risk of contamination of the reaction mixture.

[0011] One approach that has been used to circumvent the necessity of manipulating the first strand reaction in an RT-PCR reaction has been to use a DNA polymerase alone and to modify the reaction conditions of the first strand reaction such that the DNA polymerase exhibits reverse transcriptase activity. This approach is demonstrated in U.S. Pat. Nos. 5,310,652, 5,322,770, 5,407,800, 5,561,058, 5,641,864, and 5,693,517. These patents disclose the use of Mn⁺² as a divalent cation to stimulate the reverse transcriptase activity of Taq polymerase. Although the presence of Mn⁺² stimulates RT activity, it also causes misincorporation of nucleotides by the DNA polymerase activity resulting in the introduction of errors into the amplified cDNA.

[0012] Thermostable DNA polymerase from Thermus aquaticus (Taq) made the polymerase chain reaction (PCR) feasible, and introduced a powerful technology that complemented recombinant DNA studies and aided in the diagnosis of inherited and infectious diseases (Innis, et al., (eds.) (1990) In PCR Protocols: A Guide to Methods and Applications. Academic Press, San Diego). Taq DNA polymerase also has reverse transcriptase activity (Jones and Foulkes, (1989) Nucleic Acids Res. 17, 8387-8388.). The reverse transcriptase activity of a recombinant DNA polymerase from Thermus thermophilus (rTth) (Myers and Gelfand, (1991) Biochem. 30, 7661-7666.) has been reported to be one hundred-fold greater than that of Taq DNA polymerase. The two enzymes have significant amino acid sequence similarity, and it is not clear why their abilities to utilize RNA templates are so different. Reverse transcription by thermophilic DNA polymerases has advantages over mesophilic retroviral reverse transcriptases (RTs) such as Moloney murine leukemia virus (M-MLV) and avian myeloblastosis virus (AMV) RT which are commonly used for cDNA synthesis, because the higher reaction temperatures with thermophilic polymerases help destabilize RNA secondary structures which typically pose problems for mesophilic RTs (DeStefano, et al., (1991). J. Biol. Chem. 266, 7423-7431.; Harrison, et al., (1998) Nucleic Acids Res. 26, 3433-3442.; Wu, et al., (1996) J. Virol. 70, 7132-7142.). The uses and advantages of using thermophilic DNA polymerases for reverse transcription and reverse transcription coupled PCR amplifications (RT-PCR) have been described (Myers and Gelfand, (1991)). However one of the disadvantages of using rTth DNA polymerase for copying RNA is the requirement for the use of Mn²⁺, rather than Mg²⁺, as divalent metal. The presence of Mn²⁺ results in a higher error rates during cDNA synthesis (Cadwell and Joyce, (1992) PCR Methods and Applications 2, 28-33.) and in reduced yields of DNA product during PCR amplification (Leung, et al., (1989) Technique 1, 11-15.). Special measures must be taken during the PCR step of RT-PCR to remove the influence of Mn²⁺ introduced during the reverse transcription step (Myer and Gelfand, (1991)).

[0013] Thus, there remains a need in the art for improved materials and methods for performing polymerization and/or reverse transcription reactions, e.g., RT-PCR reactions. This need and others are met by the present invention. The present invention provides a survey of a number of organisms including thermophilic bacteria to identify DNA polymerases that can be used to copy RNA efficiently at elevated temperatures and preferably in the presence of Mg²⁺ and/or salts thereof, as well as mutant DNA polymerases from other organisms that have gained advantageous properties such as having increased reverse transcriptase activity and/or having reverse transcriptase activity in the presence of Mg²⁺. The present invention provides DNA polymerase genes from such organisms. The DNA polymerases of the present invention preferably copy RNA efficiently in the presence of Mg²⁺. Their cloning, purification, and preliminary characterization are described.

### BRIEF SUMMARY OF THE INVENTION

[0014] In one aspect, the present invention provides polypeptides or polymerases that may have a DNA-dependent DNA polymerase activity and/or an RNA-dependent DNA polymerase activity, compositions and reaction mixtures comprising such polypeptides, nucleic acid molecules encoding such polypeptides (e.g., vectors), as well as host cells transformed with nucleic acid molecules encoding such polypeptides. In some embodiments, one or more of the activities of the polypeptides of the invention is thermostable. In some embodiments, both RNA-dependent and DNA-dependent DNA polymerase activities are thermostable. In some aspects, the polypeptides of the invention may be Pol I type DNA polymerases, which may be thermostable or mesophilic. In some embodiments, the polypeptide may be a DNA polymerase from a thermophilic eubacterium. The polypeptides of the invention may posses one or more additional activities, e.g., 5′-3′ exonuclease activity and/or 3′-5′ exonuclease activity. In some embodiments, the polypeptides may have reduced or substantially reduced 5′-3′ exonuclease activity and/or may have reduced or substantially reduced 3′-5′ exonuclease activity. In another aspect, polypeptides of the invention may lack or have an undetectable level of 5′-3′ exonuclease activity and/or 3′-5′ exonuclease activity.

[0015] In one aspect, polypeptides of the invention may be those having one or more nucleic acid polymerase activities (e.g., DNA-dependent DNA polymerase activity and/or RNA-dependent DNA polymerase activity) that may occur in the presence of Mg²⁺ or salts thereof (e.g., MgCl₂, MgSO₄, MgHPO₄, etc.). In a preferred aspect, both DNA-dependent DNA polymerase activity and RNA-dependent DNA polymerase activity may occur in the presence of Mg²⁺. In one aspect, nucleic acid polymerase activity may occur in the absence of Mn²⁺ or salts thereof. Thus, in one aspect, the present invention provides polypeptides having an RNA-dependent DNA polymerase activity (i.e., reverse transcriptase activity) that occurs in the presence of Mg²⁺ and does not require the presence of Mn²⁺. Polypeptides of the invention may have a specific activity level for RNA-dependent DNA polymerase activity in the presence of Mg²⁺ that is at least about 150, 250, 500, 750, 1,000, 2,000, 3,000, 4,000, 5,000, 7,500, 10,000, 25,000, 50,000, 75,000, 100,000, 150,000, 200,000, 250,000, 300,000, 400,000, or 500,000 units/mg protein. Thus, polypeptides of the invention may have a specific activity for RNA-dependent DNA polymerase activity of from about 150 to about 500,000, from about 150 to about 400,000, from about 150 to about 300,000, from about 150 to about 200,000, from about 150 to about 150,000, from about 150 to about 100,000, from about 150 to about 75,000, from about 150 to about 50,000, from about 150 to about 25,000, from about 150 to about 10,000, from about 150 to about 5,000, from about 150 to about 2,500, from about 150 to about 1,000, from about 150 to about 500, from about 150 to about 250, from about 500 to about 500,000, from about 500 to about 250,000, from about 500 to about 150,000, from about 500 to about 100,000, from about 500 to about 50,000, from about 500 to about 40,000, from about 500 to about 30,000, from about 500 to about 25,000, from about 500 to about 20,000, from about 500 to about 15,000, from about 500 to about 10,000, from about 500 to about 5,000, from about 500 to about 4,000, from about 500 to about 3,000, from about 500 to about 2,500, from about 500 to about 2,000, from about 500 to about 1,500, from about 500 to about 1,000, from about 750 to about 500,000, from about 750 to about 250,000, from about 750 to about 150,000, from about 750 to about 100,000, from about 750 to about 50,000, from about 750 to about 40,000, from about 750 to about 30,000, from about 750 to about 25,000, from about 750 to about 20,000, from about 750 to about 15,000, from about 750 to about 10,000, from about 750 to about 5,000, from about 750 to about 2,500, from about 750 to about 1,000, from about 1,000 to about 25,000, from about 1,000 to about 10,000, from about 1,000 to about 5,000, from about 1,000 to about 4,000, from about 1,000 to about 2,500, from about 25,000 to about 500,000, from about 25,000 to about 250,000, from about 25,000 to about 100,000, from about 25,000 to about 50,000, from about 50,000 to about 500,000, from about 50,000 to about 250,000, from about 50,000 to about 100,000, from about 100,000 to about 500,000, from about 100,000 to about 400,000, from about 100,000 to about 300,000, from about 100,000 to about 250,000, from about 100,000 to about 200,000, or from about 100,000 to about 150,000 units/mg protein. Specific activity is preferably determined as described herein. In one aspect, one unit of RNA-dependent DNA polymerase activity is the amount of enzyme required to incorporate 10 nmoles of dNTPs into acid insoluble product in 30 min under assay conditions specified herein. Such assay conditions may include elevated temperatures, for example temperatures of about 45° C., 50° C., 55° C., 60° C., 62° C., 65° C., 68° C., 70° C., 72° C. or 75° C. or higher, even up to 80° C., 85° C., 95° C. or 100° C. Suitable assay conditions are described herein (e.g. in Example 1).

[0016] Polypeptides of the invention may have a specific activity level for DNA-dependent DNA polymerase activity in the presence of Mg²⁺ or salts thereof that is at least about 1,000, 5,000, 10,000, 25,000, 50,000, 75,000, 100,000, 125,000, 150,000, 175,000, 200,000, 300,000, or 500,000 units/mg protein. Thus, polypeptides of the invention may have a specific activity for DNA-dependent DNA polymerase activity of from about 1,000 to about 500,000, from about 1,000 to about 300,000, from about 1,000 to about 200,000, from about 1,000 to about 100,000, from about 5,000 to about 500,000, from about 5,000 to about 250,000, from about 5,000 to about 150,000, from about 5,000 to about 100,000, from about 5,000 to about 75,000, from about 5,000 to about 50,000, from about 5,000 to about 25,000, from about 5,000 to about 15,000, from about 10,000 to about 500,000, from about 10,000 to about 250,000, from about 10,000 to about 150,000, from about 10,000 to about 100,000, from about 10,000 to about 75,000, from about 10,000 to about 50,000, from about 10,000 to about 40,000, from about 10,000 to about 25,000, from about 50,000 to about 500,000, from about 100,000 to about 500,000, from about 150,000 to about 500,000, from about 250,000 to about 500,000, from about 50,000 to about 300,000 from about 100,000 to about 300,000, from about 150,000 to about 300,000, from about 250,000 to about 300,000, from about 300,000 to about 500,000, from about 350,000 to about 500,000 from about 400,000 to about 500,000, from about 450,000 to about 500,000, or from about 150,000 to about 250,000, units/mg protein. One unit of DNA-directed DNA polymerase activity is the amount of enzyme required to incorporate 10 nmoles of dNTPs into acid insoluble product in 30 min under assay conditions described herein. Such assay conditions may include elevated temperatures, for example, temperatures of about 45° C., 50° C., 55° C., 60° C., 62° C., 65° C., 68° C., 70° C., 72° C. or 75° C. or higher, even up to 80° C., 85° C., 95° C. or 100° C.

[0017] In some embodiments, the ratio of RNA-dependent DNA polymerase specific activity to the DNA-dependent specific activity of the polypeptides of the invention (RNA:DNA) may be from about 0.025 to about 1, from about 0.025 to about 0.75, from about 0.025 to about 0.5, from about 0.025 to about 0.4, from about 0.025 to about 0.3, from about 0.025 to about 0.25, from about 0.025 to about 0.2, from about 0.025 to about 0.15, from about 0.025 to about 0.1, from about 0.025 to about 0.05, from about 0.05 to about 1, from about 0.05 to about 0.75, from about 0.05 to about 0.5, from about 0.05 to about 0.4, from about 0.05 to about 0.3, from about 0.05 to about 0.25, from about 0.05 to about 0.2, from about 0.05 to about 0.15, from about 0.05 to about 0.1, from about 0.1 to about 1, from about 0.1 to about 0.75, from about 0.1 to about 0.5, from about 0.1 to about 0.4, from about 0.1 to about 0.3, from about 0.1 to about 0.25, from about 0.1 to about 0.2, or from about 0.1 to about 0.15 when both activities are determined as described herein. These ratios may be determined using assays performed at elevated temperatures, for example, temperatures of about 45° C., 50° C., 55° C., 60° C., 62° C., 65° C., 68° C., 70° C., 72° C. or 75° C. or higher, even up to 80° C., 85° C., 95° C. or 100° C. In some embodiments, the temperature used to determine the RNA-dependent DNA polymerase specific activity may be the same as the temperature used to determine the DNA-dependent DNA polymerase specific activity. In other embodiments, these temperatures may be different.

[0018] Polypeptides of the invention may have increased RNA-dependent DNA polymerase activity compared to other known DNA polymerases such as Tth DNA polymerase, Taq DNA polymerase or Tne DNA polymerase. In some aspects, the increase in RNA-dependent DNA polymerase activity for a polypeptide of the invention may be at least about 5%, 10%, 25%, 30%, 50%, 100%, 150%, 200%, 300%, 500%, 1,000%, 2,500%, or 5,000% compared to Tth DNA polymerase, Taq DNA polymerase and/or Tne DNA polymerase. The increase in RNA-dependent DNA polymerase activity may range from about 5% to about 5,000%, from about 5% to about 2,500%, from about 5% to about 1,000%, from about 5% to about 500%, from about 5% to about 250%, from about 5% to about 100%, from about 5% to about 50%, from about 5% to about 25%, from about 25% to about 5,000%, from about 25% to about 2,500%, from about 25% to about 1,000%, from about 25% to about 500%, from about 25% to about 250%, from about 25% to about 100%, from about 25% to about 50%, from about 100% to about 5,000%, from about 100% to about 2,500%, from about 100% to about 1,000%, from about 100% to about 500%, or from about 100% to about 250%. An increase in RNA-dependent DNA polymerase activity may also be measured by relative activity compared to Tth DNA polymerase, Taq DNA polymerase and/or Tne DNA polymerase. Preferably, the RNA-dependent DNA polymerase activity of the polyps of the invention is at least about 1.1, 1.2, 1.5, 2, 5, 10, 25, 50, 75, 100, 150, 200, 300, 500, 1,000, 2,500, 5,000, 10,000, or 25,000 fold higher than the RNA-dependent DNA polymerase activity of the Tth DNA polymerase, Taq DNA polymerase and/or Tne DNA polymerase. The increase in RNA-dependent DNA polymerase activity may range from about 1.1 fold to about 25,000 fold, from about 1.1 fold to about 10,000 fold, from about 1.1 fold to about 5,000 fold, from about 1.1 fold to about 2,500 fold, from about 1.1 fold to about 1,000 fold, from about 1.1 fold to about 500 fold, from about 1.1 fold to about 250 fold, from about 1.1 fold to about 100 fold, from about 1.1 fold to about 50 fold, from about 1.1 fold to about 25 fold, from about 1.1 fold to about 10 fold, from about 1.1 fold to about 5 fold, from about 5 fold to about 25,000 fold, from about 5 fold to about 5,000 fold, from about 5 fold to about 1,000 fold, from about 5 fold to about 500 fold, from about 5 fold to about 100 fold, from about 5 fold to about 50 fold, from about 5 fold to about 25 fold, from about 50 fold to about 25,000 fold, from about 50 fold to about 10,000 fold, from about 50 fold to about 5,000 fold, from about 50 fold to about 2,500 fold, from about 50 fold to about 1,000 fold, from about 50 fold to about 500 fold, from about 50 fold to about 250 fold, or from about 50 fold to about 100 fold. Preferably, such activities are determined under conditions described herein and then compared to calculate the fold increase in activity of the polypeptide of the invention relative to the Tth, Tne and/or Taq DNA polymerase. In one aspect, the activities are determined in the presence of Mg²⁺ and are preferably done under conditions (e.g., temperature, pH, ionic strength, etc.) which are optimum for the enzymes tested. Such conditions may include elevated temperatures, for example, temperatures from about 45° C. 50° C., 55° C., 60° C., 62° C., 65° C., 68° C., 70° C., 72° C., or 75° C. or higher, even up to 80° C., 85° C., 95° C., or 100° C.

[0019] Polypeptides of the invention may be isolated from organisms that naturally express them. Alternatively, nucleic acids encoding the polypeptides may be cloned and introduced into appropriate host cells. Polypeptides of the invention may also be prepared by mutating or modifying a nucleic acid molecule to encode a polymerase of the invention. Polypeptides according to this aspect of the invention may contain one or more motifs associated with Mg²⁺ dependent reverse transcriptase activity. Such motifs include, but are not limited to the Q-helix sequences associated with Mg²⁺ dependent activity and the presence of specified amino acid residues at positions identified herein.

[0020] A representative Q-helix may have the sequence RY-X₈-Y-X₃-SFAER, (SEQ ID NO:1) wherein X is any imino or amino acid. Other representative Q-helices (see Tables 35 and 37) include amino acid numbers 823 to 842 of the sequence of E. coli DNA polymerase I (SEQ ID NO:34), amino acid numbers 728 to 747 of Thermus aquaticus (Taq) DNA polymerase (SEQ ID NO:27), and amino acid numbers 820-838 of the Caldibacillus cellulovorans CompA.2 DNA polymerase amino acid sequence (SEQ ID NO:16). Each X may independently represent an Ala, Cys, Asp, Glu, Phe, Gly, His, Ile, Lys, Leu, Met, Asn, Pro, Gln, Arg, Ser, Thr, Val, Trp, or Tyr or may represent an amino or imino acid that is not naturally produced in most host cells. Q-helix motifs associated with Mg²⁺ dependent activity include, but are not limited to, Q-helices wherein position 11 of the Q-helix (SEQ ID NO:1) may be a phenylalanine or a tyrosine (F or Y) independently of the amino acid residue at positions 15 and/or 16. In some embodiments, position 15 of the Q-helix (SEQ ID NO:1) may be a serine or asparagine (S or N) independently of the amino acid residue at positions 11 and/or 16. In some embodiments, position 16 of the Q-helix (SEQ ID NO:1) may be a tyrosine or phenylalanine (Y or F) independently of the amino acid residue at positions 11 and/or 15. In one embodiment, position 11 may be a phenylalanine residue while position 15 is a serine residue and position 16 is a phenylalanine. In another embodiment, position 11 may be tyrosine, while position 15 may be serine, and position 16 may be phenylalanine.

[0021] In another aspect, polypeptides of the invention include those with one or more specified amino acid residues at positions that correspond to Q628, I659, Q668, F669 and/or Q753 of the Caldibacillus cellulovorans CompA.2 (CompA.2) DNA polymerase amino acid sequence of SEQ ID NO:16. In some embodiments, polypeptides of the invention may include a residue at a position that corresponds to position Q628 that is not a lysine or glutamate residue. Suitable amino acid residues include Ala, Cys, Asp, Phe, Gly, His, Ile, Leu, Met, Asn, Pro, Gln, Arg, Ser, Thr, Val, Trp, or Tyr. In some embodiments, polypeptides of the invention may have a glutamine residue at a position corresponding to position Q628 of the CompA.2 polymerase. In some embodiments, polypeptides of the invention may include a residue at a position corresponding to I659 of the CompA.2 DNA polymerase that is not a glycine. Suitable residues include Ala, Cys, Asp, Glu, Phe, His, Ile, Lys, Leu, Met, Asn, Pro, Gln, Arg, Ser, Thr, Val, Trp, or Tyr or may be an amino or imino acid that is not naturally produced in most host cells. In some embodiments, polypeptides of the invention may have a hydrophobic residue at this position, for example, Ile, Val, and/or Leu. In some embodiments, polypeptides of the invention may include a residue at a position corresponding to Q668 of the CompA.2 DNA polymerase that is not a serine. Suitable residues include Ala, Cys, Asp, Glu, Phe, Gly, His, Ile, Lys, Leu, Met, Asn, Pro, Gln, Arg, Thr, Val, Trp, or Tyr or may be an amino or imino acid that is not naturally produced in most host cells. In some embodiments, polypeptides of the invention may have a glutamine and/or a threonine at this position. In some embodiments, polypeptides of the invention may include a residue at a position corresponding to F669 of the CompA.2 DNA polymerase that is not an aspartate or glutamate. Suitable residues include Ala, Cys, Phe, Gly, His, Ile, Lys, Leu, Met, Asn, Pro, Gln, Arg, Ser, Thr, Val, Trp, or Tyr or may be an amino or imino acid that is not naturally produced in most host cells. In some embodiments, polypeptides of the invention may have an aromatic amino acid at this position, for example, a phenylalanine. In some embodiments, polypeptides of the invention may include a residue at a position corresponding to Q753 of the CompA.2 DNA polymerase that is not an alanine or valine. Suitable residues include Cys, Asp, Glu, Phe, Gly, His, Ile, Lys, Leu, Met, Asn, Pro, Gln, Arg, Ser, Thr, Trp, or Tyr or may be an amino or imino acid that is not naturally produced in most host cells. In some embodiments, polypeptides of the invention may have a glutamine at this position.

[0022] In one aspect, the present invention provides polypeptides having nucleic acid polymerase activity that may be isolated and/or cloned from a organism of interest (e.g., a eukaryotic cell, a prokaryotic cell, a virus, etc.). Suitable organisms include, but are not limited to, archaeabacteria and eubacteria.

[0023] In some embodiments, a polypeptide of the invention may be isolated, or a nucleic acid encoding such a polypeptide may be cloned from one or more eubacteria including, but not limited to, Clostridium spp. (e.g., Clostridium stercorarium, Clostridium thermosulfurogenes, etc.), Caldibacillus spp. (e.g., Caldibacillus cellulovorans CompA.2), Caldicellulosiruptor spp. (e.g., Caldicellulosiruptor Tok13B, Caldicellulosiruptor Tok7B, Caldicellulosiruptor RT69B), Bacillus spp. (e.g., Bacillus caldolyticus EA1), Thermus spp. (e.g., Thermus RT41A), Dictyoglomus spp. (e.g., Dictyoglomus thermophilum), Spirochaete spp., and Tepidomonas spp.

[0024] In some aspects, the polypeptides of the invention include PolI type DNA polymerases, which may be thermophilic or mesophilic. In other aspects, the polypeptides of the invention include Pol III type DNA polymerases, which may be thermophilic or mesophilic.

[0025] The present invention also relates to fragments and mutants of the polypeptides of the invention that may possess one or more desirable characteristics (e.g., enzymatic activity, antigenicity, etc.). In some embodiments, the mutants and fragments of the polypeptides of the invention may possess a polymerase activity including a RNA-dependent DNA polymerase activity and/or a DNA-dependent DNA polymerase activity. The present invention also includes fragments of mutants of the polypeptides of the invention. Mutants, fragments and/or fragments of mutants may comprise one or more activities associated with the corresponding un-mutated or wild type polypeptide (such as 5′-3′ exonuclease activity, 3′-5′ exonuclease activity, etc.) or may have decreased activity (e.g., decreased 5′-3′ exonuclease activity and/or decreased 3′-5′ exonuclease activity, etc.) and/or increased activity (e.g., increase RNA-dependent DNA polymerase activity, increase DNA-dependent DNA polymerase activity, and/or increase thermostability, etc.) compared to the un-mutated or wildtype polypeptide. In some embodiments, polypeptides of the invention include mutants and/or fragments of DNA polymerases from one or more the organisms listed above. In some embodiments, mutants, fragments, and/or fragments of mutants may be isolated from, or nucleic acid encoding them may be cloned from, thermophilic eubacteria including, but not limited to Clostridium spp. (e.g., Clostridium stercorarium, Clostridium thermosulfurogenes, etc.), Caldibacillus spp. (e.g., Caldibacillus cellulovorans CompA.2), Caldicellulosiruptor spp. (e.g., Caldicellulosiruptor Tok13B, Caldicellulosiruptor Tok7B, Caldicellulosiruptor RT69B), Bacillus spp. (e.g., Bacillus caldolyticus EA1), Thermus spp. (e.g., Thermus RT41A), Dictyoglomus spp. (e.g., Dictyoglomus thermophilum) Spirochaete spp., and Tepidomonas spp.

[0026] In another aspect, polypeptides of the invention include polypeptides having one or more mutations and/or deletions that increase/decrease one or more desirable/undesirable characteristic of the polypeptide. For example, the present invention provides polypeptides with mutations that result in enhanced RNA-dependent DNA polymerase activity, enhanced thermostability of the RNA-dependent and/or DNA-dependent polymerase activity of the polypeptide; mutations that result in the ability or improved ability of the mutant polypeptide to, under selected conditions, incorporate dideoxynucleotides into a DNA molecule; mutations that decrease exonuclease activity and the like as compared to the non-mutated wildtype polypeptide. In some embodiments, polypeptides of the invention may comprise one or more mutations that enhance the RNA-dependent DNA polymerase activity of the polypeptide as compared to the non-mutated, wild type polypeptide. In particular, mutations may confer upon polypeptides of the invention the ability perform RNA-dependent DNA polymerase activity in the presence of Mg²⁺ and, optionally, in the absence of Mn²⁺ and/or may increase ability of polypeptides of the invention to perform RNA-dependent DNA polymerase activity in the presence of Mg²⁺ and, optionally, in the absence of Mn²⁺.

[0027] In some embodiments, the present invention provides mutant or modified DNA polymerases. Such mutants or modified polymerases may be prepared from any DNA polymerase (e.g., bacterial, viral, and/or eukaryotic polymerases). Such DNA polymerases may include Pol I type or Pol III type DNA polymerases, which may be thermophilic or mesophilic. Preferably, such mutants may have an increased RNA-dependent DNA polymerase activity as compared to the corresponding wildtype or unmutated or unmodified polymerase (e.g., in the presence of Mg²⁺ and/or in the absence of Mn²⁺). In some embodiments, mutant polypeptides of the invention may have one or more mutations or modifications that result in one or more amino acid changes (which may include addition of amino acids, substitutions of amino acids and/or deletions of amino acids or combinations thereof) in the Q-helix which increases the RNA-dependent DNA polymerase activity of the mutant or modified enzyme compared to the wild type or unmutated or unmodified enzyme. One skilled in the art can readily determine the corresponding Q-helix for any DNA polymerase by using standard sequence alignment techniques comparing the sequences of the polymerase of interest to the Q-helix sequences identified herein. A representative Q-helix is defined as RY-X₈-Y-X₃-SFAER (SEQ ID NO:1), wherein X is any imino or amino acid. Representative Q-helices (see Tables 35 and 37) include amino acid numbers 823 to 842 (SEQ ID NO:65) of the sequence of E. coli DNA polymerase I, amino acid numbers 728 to 747 (SEQ ID NO:46) of the sequence of Thermus aquaticus (Taq) DNA polymerase, and amino acid numbers 820-838 of the Caldibacillus cellulovorans CompA.2 DNA polymerase amino acid sequence of SEQ ID NO:16. Each X may independently represent an Ala, Cys, Asp, Glu, Phe, Gly, His, Ile, Lys, Leu, Met, Asn, Pro, Gln, Arg, Ser, Thr, Val, Trp, or Tyr or may represent an amino or imino acid that is not naturally produced in most host cells. Each X can be determined by selecting a corresponding nucleic acid codon. Modified or natural tRNAs can be used to introduce specific amino acids into the sequence at any position. Once the Q-helix is identified for a polymerase of interest, any number of modifications or mutations can be made (e.g., deletions, point mutations, insertions etc.) which preferably change the amino acid sequence and then the resulting mutant or modified polymerase can be assayed to determine the effect of the mutation or modification. Preferably, such mutations or modifications are designed based on the sequences found in one or more of the polypeptides of the invention. In some preferred embodiments, a polypeptide of the invention may have a mutation at position 11 of the Q-helix (SEQ ID NO:1). Such a mutation may preferably change an amino acid to a phenylalanine or a tyrosine (F or Y) independently of the amino acid residue at positions 15 and/or 16 of the Q-helix. In some embodiments, mutants of the invention may have a mutation at position 15 of the Q-helix. Such a mutation may change an amino acid at this position to a serine or asparagine (S or N) independently of the amino acid residue at positions 11 and/or 16. In some embodiments, polypeptides of the invention may possess a mutation at position 16 of the Q-helix. Such a mutation may change an amino acid to be a tyrosine or phenylalanine (Y or F) independently of the amino acid residue at positions 11 and/or 15. In some embodiments, polypeptides of the invention may possess multiple mutations, for example, at positions 11, 15, and 16, or at two of these three positions. In one embodiment, position 11 may be a phenylalanine residue while position 15 is a serine residue and position 16 is a phenylalanine. In another embodiment, position 11 may be tyrosine, while position 15 may be serine, and position 16 may be phenylalanine.

[0028] In another aspect, mutant or modified polypeptides of the invention include those with one or more mutations or modifications in amino acid residues at positions that correspond to Q628, I659, Q668, F669 and/or Q753 of Caldibacillus cellulovorans CompA.2 (CompA.2) DNA polymerase amino acid sequence SEQ ID NO:16. Such mutations preferably result in an increase in the RNA-dependent DNA polymerase activity of the mutant as compared to the wildtype or unmutated or unmodified enzyme. In some embodiments, mutant polypeptides of the invention may include a mutation of a residue at a position that corresponds to position Q628 of the CompA.2 DNA polymerase. Such a mutation preferably changes the amino acid at this position to a residue that is not a lysine or glutamate residue. Suitable amino acid residues include Ala, Cys, Asp, Phe, Gly, His, Ile, Leu, Met, Asn, Pro, Gln, Arg, Ser, Thr, Val, Trp, or Tyr. In some embodiments, mutant polypeptides of the invention may be mutated to have a glutamine residue at a position corresponding to position Q628 of the CompA.2 polymerase. In some embodiments, mutant polypeptides of the invention may mutated to include a residue at a position corresponding to I659 of the CompA.2 DNA polymerase that is not a glycine. Suitable residues include Ala, Cys, Asp, Glu, Phe, His, Ile, Lys, Leu, Met, Asn, Pro, Gln, Arg, Ser, Thr, Val, Trp, or Tyr or may be an amino or imino acid that is not naturally produced in most host cells. In some embodiments, polypeptides of the invention may be mutated to have a hydrophobic residue at this position, for example, Ile, Val, and/or Leu. In some embodiments, mutant polypeptides of the invention may be mutated to include a residue at a position corresponding to Q668 of the CompA.2 DNA polymerase that is not a serine. Suitable residues include Ala, Cys, Asp, Glu, Phe, Gly, His, Ile, Lys, Leu, Met, Asn, Pro, Gln, Arg, Thr, Val, Trp, or Tyr or may be an amino or imino acid that is not naturally produced in most host cells. In some embodiments, mutant polypeptides of the invention may be mutated to have a glutamine and/or a threonine at this position. In some embodiments, mutant polypeptides of the invention may be mutated to include a residue at a position corresponding to F669 of the CompA.2 DNA polymerase that is not an aspartate or glutamate. Suitable residues include Ala, Cys, Phe, Gly, His, Ile, Lys, Leu, Met, Asn, Pro, Gln, Arg, Ser, Thr, Val, Trp, or Tyr or may be an amino or imino acid that is not naturally produced in most host cells. In some embodiments, mutant polypeptides of the invention may be mutated to have an aromatic amino acid at this position, for example, a phenylalanine. In some embodiments, mutant polypeptides of the invention may be mutated to include a residue at a position corresponding to Q753 of the CompA.2 DNA polymerase that is not an alanine or valine. Suitable residues include Cys, Asp, Glu, Phe, Gly, His, Ile, Lys, Leu, Met, Asn, Pro, Gin, Arg, Ser, Thr, Trp, or Tyr or may be an amino or imino acid that is not naturally produced in most host cells. In some embodiments, polypeptides of the invention may be mutated to have a glutamine at this position.

[0029] In some embodiments, polymerases of the invention may comprise one or more mutations or modifications that enhance RNA-dependent DNA polymerase activity that are not located in the Q-helix (e.g., at positions Q628, I659, Q668, F669 and/or Q753) and such mutations may be made alone or be made in conjunction with mutations in the Q-helix. One skilled in the art can identify corresponding amino acid residues in other DNA polymerases by similarly aligning one or more of the polypeptides of the invention (e.g., the Caldibacillus cellulovorans CompA.2 DNA polymerase) with one or more polymerases of interest. In some embodiments, one or more amino acid residues in a eubacterial DNA polymerase corresponding to one or more of the Caldibacillus cellulovorans CompA.2 DNA polymerase amino acid residues identified above, can be mutated to have all or a portion of the amino acid sequence present in the Caldibacillus cellulovorans CompA.2 DNA polymerase.

[0030] In one aspect, mutant or modified polypeptides of the invention may possess an increased RNA-dependent DNA polymerase activity compared to the corresponding unmutated or unmodified or wildtype polymerase or as compared to one or more prior art polymerases (e.g., Thermus thermophilus polymerase). In some embodiments, a polymerase having an increase in RNA-dependent DNA polymerase activity may be a mutated DNA polymerase that has at least about a 5% increase, 10% increase, 25% increase, 30% increase, 50% increase, 100% increase, 150% increase, 200% increase, 300%, 500% increase, 1,000% increase, 2,500% increase or 5,000% increase in the RNA-dependent DNA polymerase activity as compared to (1) the corresponding unmutated or wild-type enzyme; or (2) a particular polymerase (e.g., Thermus thermophilus (Tth) polymerase) or group of polymerases. Thus mutant polymerases of the invention may have an increase in RNA-dependent DNA polymerase activity of from about 5% to about 5,000%, from about 5% to about 2,500%, from about 5% to about 1000%, from about 5% to about 500%, from about 5% to about 250%, from about 5% to about 100%, from about 5% to about 50%, from about 5% to about 25%, from about 25% to about 5,000%, from about 25% to about 2,500%, from about 25% to about 1,000%, from about 25% to about 500%, from about 25% to about 250%, from about 25% to about 100%, from about 100% to about 5,000%, from about 100% to about 2,500%, from about 100% to about 1000%, from about 100% to about 500%, or from about 100% to about 250%. An increase in RNA-dependent DNA polymerase activity for a polymerase of the invention may also be measured according to relative activity compared to (1) the corresponding unmutated or wild-type enzyme; or (2) a particular polymerase (e.g., Tth polymerase) or group of polymerases. Preferably, the increase in such relative activity is at least about 1.1, 1.2, 1.5, 2, 5, 10, 25, 50, 75, 100, 150, 200, 300, 500, 1,000, 2,500, 5,000, 10,000, or 25,000 fold when the activity of a polymerase of the invention is compared to (1) the corresponding unmutated or wild-type enzyme; or (2) a particular polymerase (e.g., Thermus thermophilus (Tth) polymerase) or group of polymerases. Thus a mutant polymerase of the invention may have an increased RNA-dependent DNA polymerase activity of from about 1.1 fold to about 25,000 fold, from about 1.1 fold to about 10,000 fold, from about 1.1 fold to about 5,000 fold, from about 1.1 fold to about 2,500 fold, from about 1.1 fold to about 1,000 fold, from about 1.1 fold to about 500 fold, from about 1.1 fold to about 250 fold, from about 1.1 fold to about 50 fold, from about 1.1 fold to about 25 fold, from about 1.1 fold to about 10 fold, from about 1.1 fold to about 5 fold, from about 5 fold to about 25,000 fold, from about 5 fold to about 5,000 fold, from about 5 fold to about 1,000 fold, from about 5 fold to about 500 fold, from about 5 fold to about 100 fold, from about 5 fold to about 50 fold, from about 5 fold to about 25 fold, from about 50 fold to about 25,000 fold, from about 50 fold to about 5,000 fold, from about 50 fold to about 1,000 fold, from about 50 fold to about 500 fold, from about 50 fold to about 100 fold, from about 100 fold to about 25,000 fold, from about 1,000 fold to about 25,000 fold, from about 4,000 fold to about 25,000 fold, from about 10,000 fold to about 25,000 fold, from about 15,000 fold to about 25,000 fold, from about 1,000 fold to about 10,000 fold, from about 2,500 fold, to about 10,000 fold, from about 5,000 fold to about 10,000 fold, from about 7,500 fold to about 10,000 fold, from about 1,000 fold to about 15,000 fold, from about 2,500 fold, to about 15,000 fold, from about 5,000 fold to about 15,000 fold, from about 7,500 fold to about 15,000 fold, from about 10,000 fold to about 15,000 fold, or from about 12,500 fold to about 15,000 fold.

[0031] Alternatively, the increase in the RNA-dependent DNA polymerase activity of the mutant polypeptides of the invention over that of the un-mutated wildtype polymerase may be measured directly as an increase in specific activity. After mutation, the specific activity of the polypeptides of the invention may be at least about 150, 250, 500, 750, 1,000, 2,000, 3,000, 4,000, 5,000, 7,500, 10,000, 15,000, 25,000, 50,000, 75,000, 100,000, 250,000, or 500,00 units of RNA-dependent DNA polymerase activity/mg protein. Thus, the specific activity of polypeptides of the invention may range from about 150 to about 10,000, from about 150 to about 7,500, from about 150 to about 5,000, from about 150 to about 4,000, from about 150 to about 3,000, from about 150 to about 2,000, from about 150 to about 1,000, from about 150 to about 500, from about 150 to about 250, from about 250 to about 10,000, from about 250 to about 7,500, from about 250 to about 5,000, from about 250 to about 4,000, from about 250 to about 3,000, from about 250 to about 2,000, from about 250 to about 1,000, from about 250 to about 500, from about 500 to about 10,000, from about 500 to about 7,500, from about 500 to about 5,000, from about 500 to about 4,000, from about 500 to about 3,000, from about 500 to about 2,000, or from about 500 to about 1,000 units/mg protein. One unit of RNA-dependent DNA polymerase activity is the amount of enzyme required to incorporate 10 nmoles of dNTPs into acid insoluble product in 30 min using assay conditions described herein (e.g., those in the Examples).

[0032] In some embodiments, the polypeptides of the invention incorporate dideoxynucleotides into a DNA molecule about as efficiently as deoxynucleotides. In some embodiments, the polypeptides of the invention may have one or more mutations that substantially change (e.g., reduce or increase) an exonuclease activity, for example, a 5′-3′ exonuclease activity and/or a 3′-5′ exonuclease activity. A polypeptide of the invention, for example, a mutant DNA polymerase of this invention, can exhibit one or more of these properties. Mutant polypeptides of the present invention may also be used in reverse transcription/amplification reactions, DNA sequencing, amplification reactions, and cDNA synthesis.

[0033] In some embodiments, the present invention provides polypeptides having an RNA-dependent DNA polymerase activity, i.e., a reverse transcriptase activity. Preferably, the RNA-dependent polymerase activity occurs in the presence of magnesium and/or manganese and/or mixtures of magnesium and manganese. The RNA-dependent polymerase activity may occur in the presence of a mixture of Mn²⁺ and Mg²⁺ preferably at a Mn²⁺:Mg²⁺ ratio of from about 50:1 to 1:50, or from about 10:1 to 1:50, or from about 5:1 to 1:50, or from about 1:1 to 1:50, or from about 50:1 to 1:10, or from about 50:1 to 1:5, or from about 50:1 to 1:1, or from about 10:1 to 1:10, or from about 5:1 to 1:10 or from about 1:1 to 1:10, or from about 10:1 to 1:5, or from 10:1 to 1:1, or from 5:1 to 1:5, or from 5:1 to 1:1, or from 1:1 to 1:5. Concentrations of either divalent cation may range from about 0.1 mM to about 100 mM, from about 0.1 mM to about 50 mM, from about 0.1 mM to about 25 mM, from about 0.1 mM to about 20 mM, from about 0.1 mM to about 15 mM, from about 0.1 mM to about 10 mM, from about 0.1 mM to about 5 mM, from about 0.1 mM to about 1 mM, or from about 0.1 mM to about 0.5 mM. Concentrations of either divalent cation may range from about 0.5 mM to about 100 mM, from about 0.5 mM to about 50 mM, from about 0.5 mM to about 25 mM, from about 0.5 mM to about 20 mM, from about 0.5 mM to about 15 mM, from about 0.5 mM to about 10 mM, from about 0.5 mM to about 5 mM, or from about 0.5 mM to about 1 mM. Concentrations of either divalent cation may range from about 1 mM to about 100 mM, from about 1 mM to about 50 mM, from about 1 mM to about 25 mM, from about 1 mM to about 20 mM, from about 1 mM to about 15 mM, from about 1 mM to about 10 mM, from about 1 mM to about 5 mM, or from about 1 mM to about 2.5 mM.

[0034] Polypeptides of the invention may display both an RNA-dependent DNA polymerase activity and a DNA-dependent DNA polymerase activity. When polypeptides of the invention display both activities, the DNA-dependent activity may occur under the same ratio of Mn²⁺:Mg²⁺ as the RNA-dependent polymerase activity. In some embodiments, the DNA-dependent DNA polymerase activity and the RNA-dependent DNA polymerase activity may both occur at ratios of Mn²⁺:Mg²⁺ that overlap. Different portions of the overlap may control the relative amounts of DNA-dependent and RNA-dependent DNA polymerase activity.

[0035] In some embodiments, polypeptides of the invention may display an RNA-dependent DNA polymerase activity in the presence of Mg²⁺ and the activity may not require the presence of Mn²⁺.

[0036] In some embodiments, the polypeptides of the present invention have reverse transcriptase activity at temperatures above about 50° C. The polypeptides preferably retain activity during or after exposure to elevated temperatures, for example temperatures of about 45° C., 50° C., 55° C., 60° C., 62° C., 65° C., 68° C., 70° C., 72° C. or 75° C. or higher, even up to 80° C., 85° C., 95° C. or 100° C. at ambient or elevated pressure. In additional aspects, the invention also includes polypeptides that retain at least about 50%, at least about 60%, at least about 70%, at least about 85%, at least about 95%, at least about 97%, at least about 98%, at least about 99%, at least about 100%, at least about 150%, at least about 200%, at least about 250%, or at least about 300% of reverse transcriptase activity after heating to about 50° C., about 55° C., about 60° C., about 65° C., about 70° C., about 75° C., about 80° C., about 85° C., about 90° C., or about 95° C. for from about 1 to about 30 minutes, from about 1 to about 25 minutes, from about 1 to about 20 minutes, from about 1 to about 15 minutes, from about 1 to about 10 minutes, from about 1 to about 5 minutes, from about 1 to about 2.5 minutes, from about 2.5 to about 30 minutes, from about 2.5 to about 25 minutes, from about 2.5 to about 20 minutes, from about 2.5 to about 15 minutes, from about 2.5 to about 10 minutes, from about 2.5 to about 5 minutes, from about 5 to about 30 minutes, from about 5 to about 25 minutes, from about 5 to about 20 minutes, from about 5 to about 15 minutes, or from about 5 to about 10 minutes. Preferably, this activity is evident in the presence of magnesium and can be optimized in the presence of other additives. Polypeptides of the invention are useful for procedures requiring reverse transcription. Included within the scope of the present invention are various mutants including deletion, substitution, and insertion mutants that retain or improve thermostability and the ability to replicate DNA preferably with substantially the same efficiency or improved efficiency as that of native thermophilic eubacterial DNA polymerase.

[0037] Exemplary purified enzymes of the present invention have a molecular weight of about 100 kilodaltons when measured on SDS-PAGE. They may possess 5′-3′ exonuclease activity and/or 3′-5′ exonuclease activity. In some embodiments, polypeptides of the invention may comprise one or more mutations that reduces, substantially reduces or substantially eliminates one or more exonuclease activity. The present invention also generally includes DNA polymerases that have mutations that reduce, substantially reduce, or eliminate 5′-3′ exonuclease activity. The present invention also generally includes DNA polymerases that have mutations that reduce, substantially reduce, or eliminate 3′-5′ exonuclease activity.

[0038] In some embodiments, a polypeptide of the invention may have a temperature optimum that is greater than about 37° C. for one or more enzymatic activities. In some embodiments, polypeptides of the invention may have a temperature optimum for DNA polymerase activity, DNA- and/or RNA-dependent DNA polymerase activity, of at least 50° C., at least 55° C., at least 60° C., at least 65° C., at least 75° C., at least 80° C., or at least 90° C. In some embodiments, polypeptides of the invention may have a temperature optimum for DNA polymerase activity of from about 50° C. to about 90° C., from about 55° C. to about 90° C., from about 60° C. to about 90° C., from about 65° C. to about 90° C., from about 70° C. to about 90° C., from about 75° C. to about 90° C., from about 80° C. to about 90° C., or from about 85° C. to about 90° C. In some aspects, polypeptides of the invention may have a temperature optimum for DNA polymerase activity of from about 50° C. to about 85° C., from about 50° C. to about 80° C., from about 50° C. to about 75° C., from about 50° C. to about 70° C., from about 50° C. to about 65° C., from about 50° C. to about 60° C., or from about 50° C. to about 55° C. Temperature optima may be determined using assay conditions described herein.

[0039] Preferably polypeptides of the invention are active in the presence of manganese and/or magnesium. In one embodiment the enzyme is active in the presence of manganese in excess or even great excess over magnesium. Magnesium is not necessarily present for some embodiments of the present invention. In some embodiments, the polypeptides of the invention are active in the presence of magnesium. In one embodiment, the polypeptides of the invention exhibit RT activity in the presence of magnesium.

[0040] In one aspect, the present invention provides a composition comprising a polypeptide of the invention (e.g., a wildtype polypeptide, a mutant polypeptide, a fragment of a wildtype polypeptide and/or a fragment of a mutant polypeptide of the invention). In some embodiments, the polypeptide may have a DNA-dependent DNA polymerase activity and/or an RNA-dependent DNA polymerase activity. In some embodiments, one or more of these activities is thermostable. In some embodiments, the polypeptide possesses both activities and both activities are thermostable. The polypeptides may be present as intact polypeptides or may be present as fragments comprising either or both DNA polymerase activities. Compositions may comprise one or more template nucleic acid molecules that may be RNA, DNA, analogues of RNA and/or DNA or a mixture of these. Compositions may comprise one or more nucleoside triphosphates and/or analogs and/or derivatives thereof. Nucleoside triphosphates may be ribonucleosides (rNTPs), deoxyribonucleosides (dNTPs), dideoxynucleosides (ddNTPs) or mixtures thereof. Nucleoside triphosphates may contain one or more detectable groups or moieties, including, but not limited to fluorescent moieties and radioactive moieties. Compositions of the invention may comprise one or more additional polypeptides that may have one or more catalytic activities. An additional polypeptide may or may not have at least one region (e.g., domain) that is substantially homologous to a region of the polypeptide of the invention. In some embodiments, a composition of the invention may comprise a polypeptide of the invention and an additional polypeptide having a DNA polymerase activity. Compositions of this type may further comprise the ingredients listed above, for example, may comprise one or more nucleoside triphosphates, templates and the like. In one embodiment, a composition of the present invention may comprise a polypeptide of the invention, an additional polypeptide having a DNA polymerase activity, a nucleic acid template such as an mRNA, one or more nucleoside triphosphates, and suitable buffers or buffering salts, cofactors and the like to conduct a combined reverse transcription/polymerase chain reaction (RT-PCR). In some embodiments, compositions of the invention may comprise a divalent metal (e.g., Mg²⁺, Mn²⁺, etc.). In some embodiments, compositions may comprise Mg²⁺ and not comprise Mn²⁺.

[0041] In another embodiment, the present invention provides a nucleic acid molecule encoding a polypeptide of the present invention or a mutant and/or fragment thereof. Mutants and/or fragments may comprise one or more activities associated with the wild type polypeptide. In some embodiments, the present invention provides nucleic acid molecules encoding mutants, fragments and/or fragments of mutant DNA polymerases. In some embodiments, nucleic acids of the invention may encode all or a portion of a wild type or mutant polymerases from a thermophilic eubacteria including, but not limited to Clostridium spp. (e.g., Clostridium stercorarium, Clostridium thermosulfurogenes, etc.), Caldibacillus spp. (e.g., Caldibacillus cellulovorans CompA.2), Caldicellulosiruptor spp. (e.g., Caldicellulosiruptor Tok13B, Caldicellulosiruptor Tok7B, Caldicellulosiruptor RT69B), Bacillus spp. (e.g., Bacillus caldolyticus EA1), Thermus spp. (e.g., Thermus RT41A), and Dictyoglomus spp. (e.g., Dictyoglomus thermophilum). Specifically, DNA polymerases encoded by the nucleic acid molecules of the present invention may be wild type or may have one or more mutations and/or deletions that increase/decrease one or more desirable/undesirable characteristic of the polypeptide. For example, the present invention provides nucleic acids encoding polypeptides with mutations that result in enhanced thermo stability of the polymerase and/or mutations that result in the ability or improved ability of the mutant DNA polymerase to, under selected conditions, incorporate dideoxynucleotides into a DNA molecule. In some embodiments, the polypeptides encoded by the nucleic acid molecules of the invention incorporate dideoxynucleotides into a DNA molecule about as efficiently as deoxynucleotides. In some embodiments, the polypeptides encoded by the nucleic acid molecules of the invention may have one or more mutations that substantially reduce or increase an exonuclease activity, for example, a 5′-3′ exonuclease activity and/or a 3′-5′ exonuclease activity. A polypeptide encoded by a nucleic acid molecule of the invention, for example, a mutant DNA polymerase of this invention, can exhibit one or more of these properties.

[0042] In some embodiments, the present invention is also directed to a nucleic acid encoding a DNA polymerase from a thermophilic eubacterium. Such nucleic acids may comprise all or a portion of one or more of SEQ ID NOS: 2-13. The present invention also comprises a nucleic acid that encodes a polypeptide having all or a portion of one or more of the amino acid sequences of any one of SEQ ID NOS:14-25 representing the translations of the open reading frames of SEQ ID NOs:2-13. The present invention also encompasses polypeptides having at least 80% amino acid identity, preferably at least 90% identity, to at least 15, 20, 25, 30, 35, 40, 45, 50, 60, 70, 80, 90, 100, 150, 200, 250, 275, 300, 350, 400 or 450 contiguous amino acids of the sequence shown in any one of SEQ ID NOS:14-25. Typically, these polypeptides may possess one or more desirable activities, such as, DNA-dependent DNA polymerase activity, RT activity and/or exonuclease activity. The present invention also encompasses nucleic acid molecules encoding such polypeptides.

[0043] Nucleic acid molecules of the invention can be introduced into host cells and host cells expressing the polypeptides encoded by the nucleic acid molecules of the invention may be prepared. Any type or strain of host cell may be used to express the polypeptides of the present invention including prokaryotic and eukaryotic cells. In vitro cell free expression systems can also be used to express the polymerases of the present invention. Preferably, prokaryotic cells are used to express the polypeptides of the invention. A preferred prokaryotic host according to the present invention is E. coli.

[0044] The present invention also provides reaction conditions in which DNA polymerases, for example, some polymerases known in the prior art, exhibit a polymerase activity, for example, an RT activity. Such conditions preferably comprise a lower monovalent cation concentration than was previously employed. In some embodiments, the monovalent cation concentration is from about 1 mM to about 100 mM, from about 1 mM to about 75 mm, from about 1 mM to about 50 mM, from about 1 mM to about 40 mM, from about 1 mM to about 30 mM, from about 1 mM to about 25 mM, from about 1 mM to abut 20 mM, from about 1 mM to about 15 mM, from about 1 mM to about 10 mM, from about 1 mM to about 5 mM, from about 1 mM to about 2.5 mM, from about 5 mM to about 100 mM, from about 5 mM to about 75 mm, from about 5 mM to about 50 mM, from about 5 mM to about 40 mM, from about 5 mM to about 30 mM, from about 5 mM to about 25 mM, from about 5 mM to abut 20 mM, from about 5 mM to about 15 mM, from about 5 mM to about 10 mM, from about 10 mM to about 100 mM, from about 10 mM to about 75 mm, from about 10 mM to about 50 mM, from about 10 mM to about 40 mM, from about 10 mM to about 30 mM, from about 10 mM to about 25 mM, from about 10 mM to abut 20 mM, or from about 10 mM to about 15 mM. In some embodiments, the monovalent cation concentration is about 25 mM. Monovalent cations include, but are not limited to, lithium, potassium, sodium and ammonium. Suitable sources of monovalent cations include, but are not limited to, LiCl, KCl, NaCl, and (NH₄)₂SO₄. In some embodiments, the present invention provides conditions under which a polymerase enzyme exhibits an RT activity in the absence of Mn²⁺. The present invention also provides compositions comprising a thermostable DNA polymerase and monovalent cation, wherein the total concentration of monovalent cations is from about 0.1 mM to about 60 mM, from about 1 mM to about 60 mM from about 2 mM about 60 mM, from about 5 mM to about 60 mM, from about 5 mM to about 50 mM, from about 5 mM to about 40 mM, from about 5 mM to about 30 mM, from about 5 mM to about 20 mM or from about 5 mM to about 10 mM. Such compositions may further comprise one or more template molecules, which may by DNA or RNA and are preferably mRNA, one or more nucleotides, one or more divalent metals (e.g., Mg²⁺), one or more primers, and/or one or more buffers or buffer salts.

[0045] The present invention also relates to polypeptides of the invention that have multiple mutations such that the polypeptides lack or substantially lack exonuclease activity (5′-3′ and/or 3′-5′) and are nondiscriminatory against ddNTPs in sequencing reactions. These mutants may exhibit exonuclease activity under some specific conditions, but may lack or substantially lack the exonuclease activity under conditions used in reverse transcription and/or polymerization.

[0046] Preferred polypeptides of the invention relate to mutant polypeptides that are modified in at least one way selected from the group consisting of (a) to reduce or eliminate the 5′-3′ exonuclease activity of the polymerase; (b) to reduce or eliminate the 3′-5′ exonuclease activity of the polypeptide; (c) to reduce or eliminate discriminatory behavior against one or more dideoxynucleotides; (d) to enhance thermostability of one or more enzymatic activities of the polypeptide; (e) to enhance reverse transcriptase activity of the polypeptide (e.g., in the presence of Mg²⁺); and (f) combinations of two or more of (a) to (e). Each activity may be modified alone or in conjunction with a modification of another activity (e.g., 3′-5′ exonuclease activity can be modified or eliminated independently of actions affecting 5′-3′ exonuclease activity).

[0047] The present invention also relates to antibodies that specifically bind to the polypeptides of the invention. Such antibodies include fragments of antibodies that retain the ability to bind to the polypeptides of the invention. Such antibodies may bind to polypeptides of the invention at one temperature (e.g., a lower temperature) and may not bind to polypeptides of the invention at a second temperature (e.g., a higher temperature). Such antibodies may be useful in the practice of one or more methods of the invention to permit the use of a “hot start.” A hot start is one in which one or more activities of the polypeptides of the invention is inhibited at a temperature below a desired starting temperature and is not inhibited or is less inhibited at or above the desired temperature.

[0048] The invention also relates to a method of producing a DNA polymerase, the method comprising:

[0049] (a) culturing a host cell of the invention;

[0050] (b) expressing a DNA polymerase in the host cell; and

[0051] (c) isolating the DNA polymerase from the host cell.

[0052] The invention also relates to a method of synthesizing a nucleic acid molecule, the method comprising:
[0053] (a) mixing one or more template nucleic acid molecules with one or more polypeptides of the invention to form a mixture; and
[0054] (b) incubating the mixture under conditions sufficient to synthesize a nucleic acid molecule complementary to all or a portion of the template. In accordance with the invention, the synthesized nucleic acid molecule may be used as a template under appropriate conditions to synthesize nucleic acid molecules complementary to all or a portion of the templates, thereby forming double stranded nucleic acid molecules. In yet another aspect, the synthesized double stranded molecules may be amplified. In some embodiments, conditions sufficient to synthesize one or more nucleic acid molecules according to the invention may include one or more nucleotides, one or more buffers or buffering salts, one or more primers, one or more cofactors (e.g., divalent metal ions), and/or one or more additional polypeptides having a nucleotide polymerase activity. In some embodiments, conditions sufficient to synthesize one or more nucleic acid molecules according to the invention may include incubating at an elevated temperature (e.g., greater than about 37° C., 40° C., 45° C., 50° C., 55° C., 60° C., 65° C., 70° C., 75° C., 80° C., 85° C., 90° C., or 95° C.) and/or in the presence of one or more deoxy- or dideoxyribonucleoside triphosphates. Suitable deoxy- and dideoxyribonucleoside triphosphates include, but are not limited to, dATP, dCTP, dGTP, dTTP, dITP, 7-deaza-dGTP, 7-deaza-dATP, ddUTP, ddATP, ddCTP, ddGTP, ddITP, ddTTP, [α-S]dATP, [α-S]dTTP, [α-S]dGTP, and [α-S]dCTP. In some embodiments, the conditions may comprise a suitable concentration of at least one divalent metal cofactor. In some embodiments, the conditions may comprise more than one divalent metal cofactor. In some embodiments, the conditions may comprise Mg²⁺ and not Mn²⁺.

[0055] The invention also relates to a method of synthesizing a nucleic acid molecule, the method comprising:

[0056] (a) mixing one or more template nucleic acid molecules with one or more polypeptides of the invention to form a mixture, wherein the polypeptide is in a complex with a molecule that inhibits one or more activity of the polypeptide; and

[0057] (b) incubating the mixture under conditions sufficient to synthesize a nucleic acid molecule complementary to all or a portion of the template. In some embodiments, the polypeptide may be in a complex with an antibody that inhibits one or more activity of the polypeptide at a first temperature (e.g., inhibits a DNA-dependent and/or an RNA-dependent polymerase activity) and does not inhibit or inhibits to a lessor extent the activity at a second temperature. Such methods may further comprise performing step (a) at a first temperature and performing step (b) at a second temperature wherein the temperature of step (b) is greater than the temperature of step (a). In some embodiments, the second temperature may be greater than about 40° C., 45° C., 50° C., 55° C., 60° C., 65° C., 70° C., 75° C., 80° C., 85° C., 90° C., or 95° C. Methods of this type may be used to produce a nucleic acid molecule (e.g., a cDNA molecule) complementary to all or a portion of one or more mRNA template molecules and/or populations of mRNA template molecules. In accordance with the invention, the synthesized nucleic acid molecule may be used as a template under appropriate conditions to synthesize nucleic acid molecules complementary to all or a portion of the templates, thereby forming double stranded nucleic acid molecules. In yet another aspect, the synthesized double stranded molecules may be amplified. In some embodiments, conditions sufficient to synthesize one or more nucleic acid molecules according to the invention may include one or more nucleotides, one or more buffers or buffering salts, one or more primers, one or more cofactors (e.g., divalent metal ions), and/or one or more additional polypeptides having a nucleotide polymerase activity. In some embodiments, conditions sufficient to synthesize one or more nucleic acid molecules according to the invention may include incubating at an elevated temperature (e.g., greater than about 37° C., 40° C., 45° C., 50° C., 55° C., 60° C., 65° C., 70° C., 75° C., 80° C., 85° C., 90° C., or 95° C.) and/or in the presence of one or more deoxy- or dideoxyribonucleoside triphosphates. Suitable deoxy- and dideoxyribonucleoside triphosphates include, but are not limited to, dATP, dCTP, dGTP, dTTP, dITP, 7-deaza-dGTP, 7-deaza-dATP, ddUTP, ddATP, ddCTP, ddGTP, ddITP, ddTTP, [α-S]dATP, [α-S]dTTP, [α-S]dGTP, and [α-S]dCTP. In some embodiments, the conditions may comprise a suitable concentration of at least one divalent metal cofactor. In some embodiments, the conditions may comprise more than one divalent metal cofactor. In some embodiments, the conditions may comprise Mg²⁺ and not Mn²⁺.

[0058] In some embodiments, the present invention provides a method of making cDNA molecules. In accordance with the invention, cDNA molecules (single-stranded or double-stranded) may be prepared from a variety of nucleic acid template molecules. Preferred nucleic acid molecules for use in the present invention include single-stranded RNA molecules, as well as double-stranded DNA:RNA hybrids. More preferred nucleic acid molecules include messenger RNA (mRNA), transfer RNA (tRNA) and ribosomal RNA (rRNA) molecules, although mRNA molecules are the preferred template according to the invention. Such methods may comprise:

[0059] (a) mixing one or more RNA templates (e.g., mRNA) or a population of RNA templates with a polypeptide of the invention to form a mixture; and

[0060] (b) incubating said mixture under conditions sufficient to synthesize one or more nucleic acid molecules which are complementary to all or a portion of said templates. In accordance with the invention, the synthesized nucleic acid molecule may be used as a template under appropriate conditions to synthesize nucleic acid molecules complementary to all or a portion of the templates, thereby forming double stranded molecules. In yet another aspect, the synthesized double stranded molecules may be amplified. In some embodiments, conditions sufficient to synthesize one or more nucleic acid molecules according to the invention may include incubating at an elevated temperature (e.g., greater than about 37° C., 40° C., 45° C., 50° C., 55° C., 60° C., 65° C., 70° C., 75° C., 80° C., 85° C., 90° C., or 95° C.)) and/or in the presence of one or more deoxy- or dideoxyribonucleoside triphosphates, one or more of which may comprise a label (e.g., a fluorescent label, a radioactive label, a detectable moiety, a reactive moiety, etc.). Suitable deoxy- and dideoxyribonucleoside triphosphates include, but are not limited to, dATP, dCTP, dGTP, dTTP, dITP, 7-deaza-dGTP, 7-deaza-dATP, ddUTP, ddATP, ddCTP, ddGTP, ddITP, ddTTP, [α-S]dATP, [α-S]dTTP, [α-S]dGTP, and [α-S]dCTP. In some embodiments, the conditions may comprise a suitable concentration of at least one divalent metal cofactor. In some embodiments, the conditions may comprise more than one divalent metal cofactor. In some embodiments, the conditions may comprise Mg2+ and not Mn2+. The method may optionally comprise

[0061] (c) treating the reaction mixture to provide single stranded cDNA;

[0062] (d) hybridizing a second primer to the cDNA molecule in the presence of the polypeptide of the invention, under conditions such that an extension product is synthesized to provide a double-stranded cDNA molecule; and

[0063] (e) amplifying the double-stranded cDNA molecule of (d) (e.g., by a polymerase chain reaction). In one embodiment, amplification using the polymerase chain reaction is by a polymerase other than that of the present invention. Any thermostable polymerase used in polymerase chain reactions can be used, for example Taq DNA polymerase. The use of the polypeptides of the present invention allows the use of other DNA polymerases in the same buffer solution. In some embodiments, methods of the invention may further comprise isolating one or more cDNA molecules produced by the methods of the invention.

[0064] In another aspect of the invention, the present invention provides methods of amplifying one or more nucleic acid molecules. Such methods may comprise:

[0065] (a) mixing one or more templates with one or more primers and one or more polypeptides of the invention; and

[0066] (b) incubating said mixture under conditions sufficient to amplify said one or more templates. In particular, one or more template molecules may be double stranded nucleic acid molecules and such amplification methods may comprise:

[0067] (a) contacting a first strand of the nucleic acid template molecule with a first primer molecule which is complementary to a portion of said first strand and a second strand of the nucleic acid template molecule with a second primer molecule which is complementary to a portion of said second strand in the presence of one or more polypeptides of the invention;

[0068] (b) incubating said molecules under conditions sufficient to form a third strand complementary to all or a portion of said first strand and a fourth strand complementary to all or a portion of said second strand;

[0069] (c) denaturing said first and third and said second and fourth strands; and

[0070] (d) repeating steps (a) through (c) one or more times. In some embodiments, such conditions according to the invention may include one or more nucleotides, one or more buffers or buffering salts, one or more primers, one or more cofactors, and/or one or more additional polypeptides having a nucleotide polymerase activity (which may be polypeptides of the invention or otherwise).

[0071] The invention also relates to a method of sequencing a nucleic acid molecule, comprising:

[0072] (a) hybridizing a primer to a first nucleic acid molecule to form a complex comprising the nucleic acid molecule and the primer;

[0073] (b) contacting the complex of (a) with one or more deoxyribonucleoside triphosphates, a polypeptide of the invention, and at least one terminator nucleotide to form a mixture;

[0074] (c) incubating the mixture of (b) under conditions sufficient to synthesize a population of DNA molecules complementary to the first nucleic acid wherein a detectable portion of the synthesized DNA molecules comprise a terminator nucleotide at their respective 3′ termini; and

[0075] (d) separating the population of synthesized DNA molecules by size or assaying the population so that at least a part of the nucleotide sequence of the first nucleic acid molecule can be determined. Exemplary terminator nucleotides include ddTTP, ddATP, ddGTP, ddITP or ddCTP each of which may comprise a detectable moiety. In some embodiments, each will comprise a detectable moiety and each moiety will be different.

[0076] The invention also relates to a method for amplifying all or a portion of a double stranded DNA molecule, comprising:

[0077] (d) providing a first and second primer, wherein the first primer is complementary to a sequence at or near the 5′-terminus of a portion desired to be amplified of a first strand of the DNA molecule and the second primer is complementary to a sequence at or near the 3′-terminus of a portion desired to be amplified of a second strand of the DNA molecule;

[0078] (e) hybridizing the first primer to the first strand and the second primer to the second strand in the presence of a polypeptide of the invention, under conditions such that a third DNA molecule complementary to at least a portion of the first strand and a fourth DNA molecule complementary to at least a portion of the second strand are synthesized;

[0079] (c) denaturing the first and third strand, and the second and fourth strands; and optionally

[0080] (d) repeating steps (a) to (c) one or more times.

[0081] The invention also relates to a kit for sequencing a nucleic acid molecule, comprising one or more containers containing one or more of the following:

[0082] (a) a polypeptide of the invention;

[0083] (b) one or more dideoxyribonucleoside triphosphates, one or more of which may comprise a label (e.g., a fluorescent label, a radioactive label, a detectable moiety, a reactive moiety, etc.).; and

[0084] (c) one or more deoxyribonucleoside triphosphates.

[0085] The invention also relates to a kit for RT/PCR, comprising one or more containers containing one or more of the following:

[0086] (a) a polypeptide of the invention;

[0087] (b) one or more deoxyribonucleoside triphosphates, one or more of which may comprise a label (e.g., a fluorescent label, a radioactive label, a detectable moiety, a reactive moiety, etc.); and

[0088] (c) a thermostable DNA polymerase.

### BRIEF DESCRIPTION OF THE DRAWINGS/FIGURES

[0089] FIG. 1. An alignment of known bacterial DNA polI gene sequences at the position of two highly conserved amino acid motifs. Degenerate oligonucleotides designed to amplify the equivalent region from other bacterial polymerases are shown beneath the alignment.

[0090] FIG. 2. SDS-PAGE analysis of the purified DNA polymerases. Approximately 1 μg of each purified DNA polymerase was subjected to electrophoresis on a 4-20% Tris-glycine gel and stained using Gel-code Blue (Materials and Methods). Benchmark Protein Ladder was run as a standard on the left and the right sides of the samples and the molecular weight (kDa) of each band is labeled on the left side of the figure.

[0091] FIG. 3. Alkaline-agarose gel analysis of first-strand cDNA synthesized from CAT cRNA by purified thermostable DNA polymerases. CAT cRNA was reverse transcribed using a 24 bp gene specific DNA primer in the presence (+) and absence (−) of betaine. The cDNA products were subjected to electrophoresis on an alkaline 2% agarose gel. A 100 bp DNA ladder was used as a standard.

[0092] FIG. 4 is a bar graph showing the effects of KCl concentration on Mg2+-dependent reverse transcriptase activity for Clostridium stercorarium (C. sterco), Caldibacillus cellulovorans CompA.2 (CompA2) and Clostridium thermosulfurogenes (C. thermo) DNA polymerases. SUPERSCRIPT™ II (SSII, a modified M-MLV reverse transcriptase) was included as a control.

[0093] FIG. 5 is a bar graph shows the results of a comparison of the reverse transcriptase activity of varying amounts of the polymerases of the invention in the presence and absence of Betaine.

[0094] FIG. 6 is an autoradiograph of reverse transcriptase activity of several polymerases of the invention in the presence and absence of Betaine in low salt buffer.

[0095] FIG. 7 is an autoradiograph showing reverse transcriptase activity of several polymerases of the invention in the presence and absence of Betaine.

### DETAILED DESCRIPTION OF THE INVENTION

### Definitions

[0096] In the description that follows, a number of terms used in recombinant DNA technology are extensively utilized. In order to provide a clearer and consistent understanding of the specification and claims, including the scope to be given such terms, the following definitions are provided.

[0097] Cloning vector. A nucleic acid molecule, for example, a plasmid, cosmid or phage DNA or other DNA molecule, that is able to replicate autonomously in a host cell. A cloning vector may have one or a small number of recognition sites (e.g., recombination sites, restriction sites, topoisomerase sites, etc.) at which such DNA sequences may manipulated in a determinable fashion without loss of an essential biological function of the vector, and into which a nucleic acid segment of interest may be inserted in order to bring about its replication and cloning. The cloning vector may further contain a marker suitable for use in the identification of cells transformed with the cloning vector. Markers may be, for example, antibiotic resistance genes such as tetracycline resistance, ampicillin resistance or kanamycin resistance genes. Any other marker sequence known to those skilled in the art may be used.

[0098] Expression vector. A vector similar to a cloning vector but which is capable of enhancing the expression of a gene that has been cloned into it, after transformation into a host. The cloned gene is usually placed under the control of (i.e., operably linked to) certain control sequences such as promoter or enhancer sequences.

[0099] Recombinant host. Any prokaryotic cell or eukaryotic cell or microorganism which contains the desired cloned gene in an expression vector, cloning vector or any heterologous nucleic acid molecule. The term “recombinant host” is also meant to include those host cells which have been genetically engineered to contain the desired genes as part of the host chromosome or genome.

[0100] Host. Any prokaryotic cell or eukaryotic cell or microorganism that is the recipient of a replicable expression vector, cloning vector or any heterologous nucleic acid molecule. The nucleic acid molecule may contain, but is not limited to, a structural gene, or portion thereof, a promoter and/or an origin of replication.

[0101] Promoter. A DNA sequence to which an RNA polymerase binds such that the polymerase, in the presence of the appropriate cofactors, initiates transcription at a transcriptional start site of a nucleic acid sequence to be transcribed. RNA polymerase catalyzes the synthesis of messenger RNA complementary to the appropriate DNA strand of the coding region. Promoter also includes any 5′ non-coding region that may be present between the transcriptional start site and the translation start site. Promoter also includes cis-acting transcription control elements such as enhancers, and other nucleotide sequences capable of interacting with transcription factors.

[0102] Operably linked. As used herein means that the promoter or other control sequence, such as an enhancer, is positioned to control the transcription from a sequence operably linked thereto.

[0103] Expression. Expression is the process by which a polypeptide is produced from a nucleic acid. It may include transcription of a gene into messenger RNA (mRNA) and the translation of such mRNA into polypeptide(s).

[0104] Substantially Pure. As used herein “substantially pure” means that the desired purified protein is essentially free from contaminating cellular contaminants which are associated with the desired protein in nature and that unacceptably impair the desired function. Contaminating cellular components may include, but are not limited to, one or more phosphatases, exonucleases, endonucleases or undesirable DNA polymerase enzymes. In a preferred aspect, a polypeptide of the invention has 25% or less, preferably 15% or less, more preferably 10% or less, more preferably 5% or less, and still more preferably 1% or less contaminating cellular components. In another aspect, the polypeptides of the invention have no detectable protein contaminants when 200 units (DNA-dependent DNA polymerase units or RNA-dependent DNA polymerase units) of polypeptide are run on a protein gel (e.g., SDS-PAGE) and stained with Comassie blue. Preferably, polypeptides of the invention are substantially pure.

[0105] Substantially isolated. As used herein “substantially isolated” means that the polypeptide of the invention is essentially free from contaminating proteins, which may be associated with the polypeptide of the invention in nature and/or in a recombinant host. In one aspect, a substantially isolated polypeptide of the invention has 25% or less, preferably 15% or less, more preferably 10% or less, more preferably 5% or less, and still more preferably 1% or less contaminating proteins. In another aspect, in a sample of a substantially isolated polypeptide of the invention, 75% or greater (preferably 80%, 85%, 90%, 95%, 98%, or 99% or greater) of the protein in the sample is the desired polypeptide of the invention. The percentage of contaminating protein and/or protein of interest in a sample may be determined using techniques known in the art, for example, by using a protein gel (e.g., SDS-PAGE) and staining the gel with a protein dye (e.g., Coomassie blue, silver stain, amido black, etc.). In another aspect, the polypeptide of the invention have no detectable protein contaminants when 0.5 .mu.g of polypeptide are run on a protein gel (e.g., SDS-PAGE) and stained with Comassie blue or amido black.

[0106] Substantially reduced. An enzyme “substantially reduced” in an enzymatic activity means that the enzyme has less than about 30%, less than about 25%, less than about 20%, more preferably less than about 15%, less than about 10%, less than about 7.5%, or less than about 5%, and most preferably less than about 5% or less than about 2%, or less than about 1% of the activity of the corresponding un-mutated or wildtype enzyme.

[0107] Primer. As used herein “primer” refers to a single-stranded oligonucleotide that is extended by covalent bonding of nucleotide monomers during polymerization or amplification of a nucleic acid molecule.

[0108] Template. The term “template” as used herein refers to a double-stranded or single-stranded DNA or RNA molecule to be amplified, synthesized, sequenced or copied. In the case of a double-stranded DNA molecule, denaturation of its strands to form a first and a second strand is generally performed before these molecules are amplified, synthesized or sequenced. A primer complementary to a portion of the template is hybridized to the template under appropriate conditions and a polypeptide of the invention may then synthesize a DNA molecule complementary to the template or a portion thereof. Mismatch incorporation during the synthesis or extension of the newly synthesized DNA molecule may result in one or a number of mismatched base pairs. Thus, the synthesized DNA molecule need not be exactly complementary to the template. In the case of RNA, a DNA primer is hybridized to a strand of the template RNA and a polypeptide of the invention having reverse transcriptase activity may be used to synthesize a complementary DNA.

[0109] Incorporating. The term “incorporating” as used herein means becoming a part of a nucleic acid molecule or primer.

[0110] Amplification. As used herein “amplification” refers to any in vitro method for increasing the number of copies of a nucleotide sequence with the use of a DNA polymerase. Nucleic acid amplification results in the incorporation of nucleotides into a DNA molecule or primer thereby forming a new DNA molecule complementary to a template. The formed DNA molecule and its template can be used as templates to synthesize additional nucleic acid molecules. As used herein, one amplification reaction may consist of many rounds of DNA replication. DNA amplification reactions include, for example, polymerase chain reactions (PCR). One PCR reaction may consist of one or more e.g., 2, 3, 4, 5, 10, 15, 20, 25, 30, 50, 60, 70, 80, 90, 100 or more “cycles” of denaturation and synthesis of a DNA molecule.

[0111] Oligonucleotide. “Oligonucleotide” refers to a synthetic or natural molecule comprising a covalently linked sequence of nucleotides or nucleotide analogs. Such nucleotides or nucleotide analogs may be joined by a phosphodiester bond between the 3′ position of the pentose of one nucleotide and the 5′ position of the pentose of the adjacent nucleotide. Also encompassed are molecules in which one or more inter-nucleotide phosphate groups has been replaced by a different type of group, such as, a peptide bond, a phosphorothioate group or a methylene group. Sources of oligonucleotides are not limited. For example, animals, plants, bacteria, viruses, cultured cells, or other organisms may be a source of oligonucleotides. Oligonucleotides may be synthetically prepared. Any class, order, genus, species, or subspecies may be a source, for example, dicot, arthropod, insect, mammal, bovine, ovine, canine, human, murine, rodent, yeast, bacteria, E. coli, etc. can be a source of oligonucleotides.

[0112] Nucleotide. As used herein “nucleotide” refers to a base-sugar-phosphate combination. Nucleotides are monomeric units of a nucleic acid sequence (DNA and RNA). The term nucleotide includes deoxyribonucleoside triphosphates such as dATP, dCTP, dITP, dUTP, dGTP, dTTP, or derivatives thereof. Such derivatives include, for example, [α-S]dATP, 7-deaza-dGTP and 7-deaza-dATP. The term nucleotide as used herein also refers to dideoxyribonucleoside triphosphates (ddNTPs) and their derivatives. Illustrated examples of dideoxyribonucleoside triphosphates include, but are not limited to, ddATP, ddCTP, ddGTP, ddITP, and ddTTP. According to the present invention, a “nucleotide” may be unlabeled or detectably labeled by well known techniques. Detectable labels include, for example, radioactive isotopes, fluorescent labels, chemiluminescent labels, bioluminescent labels and enzyme labels. Nucleotides for use in the present invention may also comprise one or more reactive functional groups. Labels may be attached to the functional group before, during and/or after use of the nucleotide in a reaction involving a polypeptide of the invention.

[0113] According to the present invention, a “nucleotide” may be unlabeled or detectably labeled by well known techniques. Detectable labels include, for example, radioactive isotopes, fluorescent labels, chemiluminescent labels, bioluminescent labels and enzyme labels. Fluorescent labels of nucleotides may include but are not limited fluorescein, 5-carboxyfluorescein (FAM), 2′7′-dimethoxy-4′5-dichloro-6-carboxyfluorescein (JOE), rhodamine, 6-carboxyrhodamine (R6G), N,N,N′,N′-tetramethyl-6-carboxyrhodamine (TAMRA), 6-carboxy-X-rhodamine (ROX), 4-(4′ dimethylaminophenylazo) benzoic acid (DABCYL), Cascade Blue, Oregon Green, Texas Red, Cyanine and 5-(2′-aminoethyl)aminonaphthalene-1-sulfonic acid (EDANS). Specific examples of fluorescently labeled nucleotides include [R6G]dUTP, [TAMRA]dUTP, [R110] dCTP, [R6G]dCTP, [TAMRA]dCTP, [JOE]ddATP, [R6G]ddATP, [FAM]ddCTP, [R110] ddCTP, [TAMRA]ddGTP, [ROX]ddTTP, [dR6G]ddATP, [dR110] ddCTP, [dTAMRA]ddGTP, and [dROX]ddTTP available from Perkin Elmer, Foster City, Calif. FluoroLink DeoxyNucleotides, FluoroLink Cy3-dCTP, FluoroLink Cy5-dCTP, FluoroLink Fluor X-dCTP, FluoroLink Cy3-dUTP, and FluoroLink Cy5-dUTP available from Amersham Arlington Heights, Ill.; Fluorescein-15-dATP, Fluorescein-12-dUTP, Tetramethyl-rodamine-6-dUTP, IR₇₇₀-9-dATP, Fluorescein-12-ddUTP, Fluorescein-12-UTP, and Fluorescein-15-2′-dATP available from Boehringer Mannheim Indianapolis, Ind.; and ChromaTide Labeled Nucleotides, BODIPY-FL-14-UTP, BODIPY-FL-4-UTP, BODIPY-TMR-14-UTP, BODIPY-TMR-14-dUTP, BODIPY-TR-14-UTP, BODIPY-TR-14-dUTP, Cascade Blue-7-UTP, Cascade Blue-7-dUTP, fluorescein-12-UTP, fluorescein-12-dUTP, Oregon Green 488-5-dUTP, Rhodamine Green-5-UTP, Rhodamine Green-5-dUTP, tetramethylrhodamine-6-UTP, tetramethylrhodamine-6-dUTP, Texas Red-5-UTP, Texas Red-5-dUTP, and Texas Red-12-dUTP available from Molecular Probes, Eugene, Oreg.

[0114] Thermostable. As used herein “thermostable” refers to an activity of a molecule that is resistant to inactivation by heat. For example, DNA polymerases synthesize the formation of a DNA molecule complementary to a single-stranded DNA template by extending a primer in the 5′-to-3′ direction. This activity for mesophilic DNA polymerases may be inactivated by heat treatment. For example, T5 DNA polymerase activity is totally inactivated by exposing the enzyme to a temperature of 90° C. for 30 seconds. As used herein, a thermostable activity is more resistant to heat inactivation than a corresponding mesophilic activity. That is, a thermostable DNA polymerase does not refer to an enzyme that is totally resistant to heat inactivation. Thus heat treatment may reduce DNA polymerase activity to some extent in a thermostable polymerase. A thermostable DNA polymerase typically will also have a higher optimum temperature than common mesophilic DNA polymerases. The phrase “thermostable polymerase” is used herein to refer to an enzyme that is relatively stable to heat and is capable of catalyzing the formation of DNA or RNA from an existing nucleic acid template.

[0115] A polymerase is considered especially thermostable when it retains at least 5%, or at least 10%, or at least 15%, or at least 20%, or at least 25%, or at least 30%, or at least 35%, or at least 40%, or at least 40%, or at least 45%, or at least 50%, or at least 55%, or at least 60%, or at least 65%, or at least 70%, or at least 75%, or at least 80%, or at least 85%, or at least 90%, or at least 95% of the original polymerase activity after heating, for example, at 95° C. for 30 minutes.

[0116] Fidelity. Fidelity refers to the accuracy of polymerization, or the ability of the polymerase to discriminate correct from incorrect substrates, (e.g., nucleotides) when synthesizing nucleic acid molecules (e.g. RNA or DNA) which are complementary to a template. The higher the fidelity of a polymerase, the less the polymerase misincorporates nucleotides in the growing strand during nucleic acid synthesis; that is, an increase or enhancement in fidelity results in a more faithful polymerase having decreased error rate (decreased misincorporation rate).

[0117] Hybridization. The terms “hybridization” and “hybridizing” refer to pairing of two complementary single-stranded portions of nucleic acid molecules (RNA and/or DNA) to give a double-stranded molecular portion. As used herein, two nucleic acid molecule portions may be hybridized, although the base pairing is not completely complementary. Accordingly, mismatched bases do not prevent hybridization of two nucleic acid molecule portions provided that appropriate hybridization and stringency conditions, well known in the art, are used.

[0118] The ability of two nucleotide sequences to hybridize to each other is based upon a degree of complementarity of the two nucleotide sequences, which in turn is based on the fraction of matched complementary nucleotide pairs. The more nucleotides in a given sequence that are complementary to another sequence, the greater the degree of hybridization of one to the other. The degree of hybridization also depends on the conditions of stringency which include temperature, solvent ratios, salt concentrations, and the like. In particular, “selective hybridization” pertains to conditions in which the degree of hybridization of a polynucleotide of the invention to its target would require complete or nearly complete complementarity. The complementarity must be sufficiently high so as to assure that the polynucleotide of the invention will bind specifically to the target relative to binding other nucleic acids present in the hybridization medium. With selective hybridization, complementarity will be 90-100%, preferably 95-100%, more preferably 100%.

[0119] Stringent conditions. The phrase “stringent conditions” refers to conditions under which a nucleic acid probe will hybridize to its target sequence but will not hybridize or will only hybridize to an insubstantial extent with a non-target sequence. Stringent conditions depend upon the length and sequence composition of the probe and target. Longer sequences and sequences with a higher G:C base content hybridize specifically at higher temperatures.

[0120] Generally, for a selected ionic strength of hybridization and wash buffer, stringent conditions include a temperature of about 5° C. below the calculated Tₘ for the specific probe and target sequences. Suitable hybridization and wash solutions are known to those skilled in the art and stringent conditions for a given probe and target pair can be determined without undue experimentation by adjusting the salt concentration and temperature until a single or small number of signals is obtained, for example, in a Southern blot. Stringent conditions are typically those that (1) employ low ionic strength and high temperature for washing, for example, 0.015 M NaCl/0.0015 M sodium citrate/0.1% NaDodSO₄ at 50° C., or (2) employ during hybridization a denaturing agent such as formamide, for example, 50% (vol/vol) formamide with 0.1% bovine serum albumin (“BSA”)/0.1% Ficoll/0.1% polyvinylpyrrolidone/50 mM sodium phosphate buffer at pH 6.5 with 750 mM NaCl, 75 mM sodium citrate at 42° C. Another example is use of 50% formamide, 5×SSC (0.75 M NaCl and 0.075 M sodium citrate), 50 mM sodium phosphate (pH 6.8), 0.1% sodium pyrophosphate, 5×Denhardt's solution, sonicated salmon sperm DNA (50 mg/ml), 0.1% sodium dodecyl sulfate (“SDS”), and 10% dextran sulfate at 42° C., with washes at 42° C. in 0.2×SSC and 0.1% SDS. Other suitable conditions include hybridization at 42° C. in a solution comprising 50% formamide, a first wash at 65° C. in 2×SSC and 1% SDS, and a second wash at 65° C. in 0.1×SSC; and hybridization in 6×SSC 1% SDS, a first was in 6×SSC 1% SDS and a final wash in a solution having a salt concentration of from about 0.05×SSC to about 0.3×SSC and about 0.05% SDS to about 1% SDS at a temperature of from about 50° C. to about 95° C.

[0121] 3′-to-5′ Exonuclease Activity. “3′-to-5′ exonuclease activity” is an enzymatic activity well known to the art in which the 3′-most nucleotide is removed from a polynucleotide. This activity is often associated with DNA polymerases, and is thought to be involved in a DNA replication “editing” or correction mechanism.

[0122] Most DNA polymerases contain a 3′-5′ exonuclease activity in addition to polymerase activity. A T5 DNA polymerase that lacks 3′-5′ exonuclease activity is disclosed in U.S. Pat. No. 5,270,179. Polymerases lacking this activity are particularly useful for, e.g., TA Cloning®.

[0123] A “DNA polymerase substantially reduced in 3′-to-5′ exonuclease activity” is defined herein as either (1) a mutated DNA polymerase that has about or less than 10%, or preferably about or less than 1%, of the 3′-to-5′ exonuclease activity of the corresponding unmutated, wild type enzyme, or (2) a DNA polymerase having a 3′-to-5′ exonuclease specific activity which is less than about 1 unit/mg protein, or preferably about or less than 0.1 units/mg protein. A unit of activity of 3′-to-5′ exonuclease is defined as the amount of activity that solubilizes 10 nmoles of substrate ends in 60 min at 37° C., assayed as described in the “BRL 1989 Catalogue & Reference Guide,” page 5, with HhaI fragments of lambda DNA 3′-end labeled with [³H]dTTP by terminal deoxynucleotidyl transferase (TdT). Protein is measured by the method of Bradford, Anal. Biochem. 72:248 (1976). As a means of comparison, natural, wild type T5-DNA polymerase (DNAP) or T5-DNAP encoded by pTTQ19-T5-2 has a specific activity of about 10 units/mg protein while the DNA polymerase encoded by pTTQ19-T5-2(Exo) (U.S. Pat. No. 5,270,179) has a specific activity of about 0.0001 units/mg protein, or 0.001% of the specific activity of the unmodified enzyme, a 10⁵-fold reduction.

[0124] 5′-to-3′ Exonuclease Activity. “5′-to-3′ exonuclease activity” is another enzymatic activity well known in the art. This activity is often associated with DNA polymerases, such as E. coli PolI and PolIII. In many of the known polymerases, the 5′-to-3′ exonuclease activity is present in the N-terminal region of the polymerase. (Ollis, et al., Nature 313:762-766 (1985); Freemont, et al., Proteins 1:66-73 (1986); Joyce, Cur. Opin. Struct. Biol. 1:123-129 (1991)). There are some amino acids, the mutations of which are thought to impair the 5′-3′ exonuclease activity of E. coli DNA polymerase I. (Gutman & Minton, Nucl. Acids Res. 21:4406-4407 (1993)). These amino acids include Tyr77, Gly103, Gly184, and Gly192 in E. coli DNA polymerase I. It is known that the 5′-exonuclease domain is dispensable for polymerase activity. The best known example is the Klenow fragment of E. coli polymerase I. The Klenow fragment is a natural proteolytic fragment devoid of 5′-exonuclease activity (Joyce, et al., J. Biol. Chem. 257:1958-64 (1990)). Polymerases lacking this activity are useful for DNA sequencing.

[0125] A “DNA polymerase substantially reduced in 5′-to-3′ exonuclease activity” is defined herein as either (1) a mutated DNA polymerase that has about or less than 10%, or preferably about or less than 1%, of the 5′-to-3′ exonuclease activity of the corresponding unmutated, wild type enzyme, or (2) a DNA polymerase having 5′-to-3′ exonuclease specific activity which is less than about 1 unit/mg protein, or preferably about or less than 0.1 units/mg protein.

[0126] Both 3′-to-5′ and 5′-to-3′ exonuclease activities can be observed on sequencing gels. Active 5′-to-3′ exonuclease activity will produce nonspecific ladders in a sequencing gel by removing nucleotides from the 5′-end of the growing primers. 3′-to-5′ exonuclease activity can be measured by following the degradation of radiolabeled primers in a sequencing gel. Thus, the relative amounts of these activities, e.g. by comparing wild type and mutant polymerases, can be determined with no more than routine experimentation.

[0127] Reverse transcription activity or reverse transcriptase activity. Ability of an enzyme to synthesize a complementary DNA strand from single-stranded portion of RNA. Preferably the activity is sufficient to synthesize a complementary strand at least 10 to 20 nucleotides in length; more preferably the activity is sufficient to synthesize a complementary strand to at least about 20-50, 40-75, 50-100, 75-150, 100-200, 150-300, 200-400, 300-500, 400-600, 500-700, 600-750, 700-1000, 750-1200, 1000-1500, 1200-1800, 1500-2500, 2000-3000, 2500-4000, 3000-5000, 4000-7000, 5000-10000, 7000-15000 or even longer. Of course, an activity sufficient to synthesize a strand at least about 7000-15000 would necessarily be sufficient to synthesize a strand of less than 7000. Preferably the synthesis time is less than one day, preferably less than 4 hours, more preferably less than 60 minutes, 30 minutes, 10 minutes, 5 minutes, 1 minute or ½ minute. Synthesis temperatures are preferably from about 45° C. to about 100° C., including any desired temperature in between, e.g., about 48° C., 50° C., 52° C., 55, 58° C., 60° C., 62° C., 65° C., 68° C., 70° C., 72° C., 75° C., 78° C., 80° C., 82° C., 85° C., 88° C., 90° C., 92° C., 95° C., 98° C. or temperatures in between. Desired temperatures can be selected according to the user's criteria. For example, a desired temperature might be selected as a temperature about the optimum for an enzymatic activity or might be selected for improved availability or stability of the template molecule or synthesized molecule. Stability or inactivation of other substances in the reaction mix might also determine a desired temperature. Activity can be measured under any of these conditions. Presence or absence of activity can be defined functionally. For example, if a synthesis is performed at a desired temperature activity can be defined as the detectable synthesis of a molecule of a desired length. Alternatively a molar, absorbance, weight or other means of measuring may be used to set a threshold for activity.

[0128] Sequence Identity. Sequence identity is determined by comparing a reference sequence or a subsequence of the reference sequence to a test sequence (e.g., a nucleotide sequence, an amino acid sequence, etc.). The reference sequence and the test sequence are optimally aligned over an arbitrary number of residues termed a comparison window. In order to obtain optimal alignment, additions or deletions, such as gaps, may be introduced into the test sequence. The percent sequence identity is determined by determining the number of positions at which the same residue is present in both sequences and dividing the number of matching positions by the total length of the sequences in the comparison window and multiplying by 100 to give the percentage. In addition to the number of matching positions, the number and size of gaps is also considered in calculating the percentage sequence identity.

[0129] Sequence identity is typically determined using computer programs. A representative program is the BLAST (Basic Local Alignment Search Tool) program publicly accessible at the National Center for Biotechnology Information (NCBI, http://www.ncbi.nlm.nih.gov/). This program compares segments in a test sequence to sequences in a database to determine the statistical significance of the matches, then identifies and reports only those matches that that are more significant than a threshold level. A suitable version of the BLAST program is one that allows gaps, for example, version 2.X (Altschul, et al., Nucleic Acids Res 25(17):3389-402, 1997). Standard BLAST programs for searching nucleotide sequences (blastn) or protein (blastp) may be used. Translated query searches in which the query sequence is translated, i.e., from nucleotide sequence to protein (blastx) or from protein to nucleic acid sequence (tbblastn) may also be used as well as queries in which a nucleotide query sequence is translated into protein sequences in all 6 reading frames and then compared to an NCBI nucleotide database which has been translated in all six reading frames may be used (tbblastx).

[0130] Additional suitable programs for identifying proteins with sequence identity to the proteins of the invention include, but are not limited to, PHI-BLAST (Pattern Hit Initiated BLAST, Zhang, et al., Nucleic Acids Res 26(17):3986-90, 1998) and PSI-BLAST (Position-Specific Iterated BLAST, Altschul, et al., Nucleic Acids Res 25(17):3389-402, 1997).

[0131] Programs may be used with default searching parameters. Alternatively, one or more search parameter may be adjusted. Selecting suitable search parameter values is within the abilities of one of ordinary skill in the art.

### 1. Polypeptides of the Invention

[0132] In one aspect, the present invention provides polypeptides having a DNA polymerase activity (e.g., a DNA-dependent DNA polymerase activity and/or an RNA-dependent DNA polymerase activity). Polypeptides of the invention may preferably possess an RNA-dependent DNA polymerase activity, which may be active in the presence of Mg²⁺. Polypeptides of the invention may possess, or may not possess, one or more enzymatic activities in addition to DNA polymerase activities. For example, polypeptides of the invention may possess, or may not possess, an exonuclease activity (e.g., 5′-3′ exonuclease activity and/or 3′-5′ exonuclease activity). Preferably, polypeptides of the invention may be purified and/or isolated from a cell or organism expressing them, which may be a wild type cell or organism or a recombinant cell or organism. In some embodiments, such polypeptides may be substantially isolated from the cell or organism in which they are expressed. In some embodiments, polypeptides of the invention may be substantially pure.

[0133] In some embodiments, the polypeptide may be a DNA polymerase from a thermophilic eubacterium. Suitable eubacteria include, but are not limited to, Clostridium spp. (e.g., Clostridium stercorarium, Clostridium thermosulfurogenes, etc.), Caldibacillus spp. (e.g., Caldibacillus cellulovorans CompA.2), Caldicellulosiruptor spp. (e.g., Caldicellulosiruptor Tok13B, Caldicellulosiruptor Tok7B, Caldicellulosiruptor RT69B), Bacillus spp. (e.g., Bacillus caldolyticus EA1), Thermus spp. (e.g., Thermus RT41A), Dictyoglomus spp. (e.g., Dictyoglomus thermophilum), Spirochaete spp., and Tepidomonas spp. Polymerases can be isolated from any suitable strain of thermophilic eubacteria. Preferred thermophilic eubacterial strains from which to isolate a nucleic acid encoding DNA polymerase of the invention include those listed above. SEQ ID NOS: 2-13 are DNA sequences encoding a representative number of the polypeptides of the invention and the corresponding amino acid sequences are provided by SEQ ID NOS: 14-25. SEQ ID NOS: 27-34 are sequences of a variety of eubacterial DNA polymerases.

[0134] Polypeptides of the invention preferably possess an RNA-dependent DNA polymerase activity (i.e., a reverse transcriptase activity). This activity preferably occurs in the presence of Mg²⁺ as a divalent metal cofactor and, in some embodiments, this activity does not require the presence of any additional divalent metal ion cofactors (e.g. does not require the presence of an error-inducing metal such as Mn²⁺).

[0135] Those skilled in the art will recognize that several of the sequences of the polypeptides of the invention are provided with N-terminal tag sequences (e.g., a PelB leader) that are a result of the particular vector into which the coding sequence of the polypeptide was inserted. The amino acid sequences of a representative number of the polypeptides of the invention are provided in SEQ ID NOS: 14-25. Those skilled in the art will appreciate that the sequences provided include the leader sequences derived from the vector. In the interest of clarity of numbering of amino acid residues, numbers provided herein will include any leader sequence.

[0136] It has been unexpectedly found that the presence of one or more sequence motifs in a polypeptide of the invention is associated with the ability of the polypeptide to perform RNA-dependent DNA polymerase activity. The present invention identifies the Q-helix as a sequence motif associated with Mg²⁺ dependent RT activity and identifies specified amino acid residues within the Q-helix as being particularly important in assessing the potential for reverse transcriptase activity. A representative Q-helix may have the sequence RY-X₈-Y-X₃-SFAER, (SEQ ID NO:1) wherein X is any imino or amino acid. Other representative Q-helices (see Tables 35 and 37) include amino acid numbers 823 to 842 of the sequence of E. coli DNA polymerase I (SEQ ID NO:34), amino acid numbers 728 to 747 of Thermus aquaticus (Taq) DNA polymerase (SEQ ID NO:27), and amino acid numbers 820-838 of the Caldibacillus cellulovorans CompA.2 DNA polymerase amino acid sequence of SEQ ID NO:16. Each X may independently represent an Ala, Cys, Asp, Glu, Phe, Gly, His, Ile, Lys, Leu, Met, Asn, Pro, Gln, Arg, Ser, Thr, Val, Trp, or Tyr or may represent an amino or imino acid that is not naturally produced in most host cells. Q-helix motifs associated with Mg²⁺ dependent RT activity include, but are not limited to, Q-helices wherein position 11 of the Q-helix (SEQ ID NO:1) may be a phenylalanine or a tyrosine (F or Y) independently of the amino acid residue at positions 15 and/or 16. In some embodiments, position 15 of the Q-helix (SEQ ID NO:1) may be a serine or asparagine (S or N) independently of the amino acid residue at positions 11 and/or 16. In some embodiments, position 16 of the Q-helix (SEQ ID NO:1) may be a tyrosine or phenylalanine (Y or F) independently of the amino acid residue at positions 11 and/or 12. In one embodiment, position 11 may be a phenylalanine residue while position 15 is a serine residue and position 16 is a phenylalanine.

[0137] In another aspect, polypeptides of the invention include those with one or more specified amino acid residues at positions that correspond to Q628, I659, Q668, F669 and/or Q753 of the Caldibacillus cellulovorans CompA.2 (CompA.2) DNA polymerase amino acid sequence presented in SEQ ID NO:16. In some embodiments, polypeptides of the invention may include a residue at a position that corresponds to position 628 that is not a lysine or glutamate residue. Suitable amino acid residues include Ala, Cys, Asp, Phe, Gly, His, Ile, Leu, Met, Asn, Pro, Gln, Arg, Ser, Thr, Val, Trp, or Tyr. In some embodiments, polypeptides of the invention may have a glutamine residue at a position corresponding to position 628 of the ComA2 polymerase. In some embodiments, polypeptides of the invention may include a residue at a position corresponding to I659 of the CompA.2 DNA polymerase that is not a glycine. Suitable residues include Ala, Cys, Asp, Glu, Phe, His, Ile, Lys, Leu, Met, Asn, Pro, Gln, Arg, Ser, Thr, Val, Trp, or Tyr or may be an amino or imino acid that is not naturally produced in most host cells. In some embodiments, polypeptides of the invention may have a hydrophobic residue at this position, for example, Ile, Val, and/or Leu. In some embodiments, polypeptides of the invention may include a residue at a position corresponding to Q668 of the CompA.2 DNA polymerase that is not a serine. Suitable residues include Ala, Cys, Asp, Glu, Phe, Gly, His, Ile, Lys, Leu, Met, Asn, Pro, Gln, Arg, Thr, Val, Trp, or Tyr or may be an amino or imino acid that is not naturally produced in most host cells. In some embodiments, polypeptides of the invention may have a glutamine and/or a threonine at this position. In some embodiments, polypeptides of the invention may include a residue at a position corresponding to F669 of the CompA.2 DNA polymerase that is not an aspartate or glutamate. Suitable residues include Ala, Cys, Phe, Gly, His, Ile, Lys, Leu, Met, Asn, Pro, Gln, Arg, Ser, Thr, Val, Trp, or Tyr or may be an amino or imino acid that is not naturally produced in most host cells. In some embodiments, polypeptides of the invention may have an aromatic amino acid at this position, for example, a phenylalanine. In some embodiments, polypeptides of the invention may include a residue at a position corresponding to Q753 of the CompA.2 DNA polymerase that is not an alanine or valine. Suitable residues include Cys, Asp, Glu, Phe, Gly, His, Ile, Lys, Leu, Met, Asn, Pro, Gln, Arg, Ser, Thr, Trp, or Tyr or may be an amino or imino acid that is not naturally produced in most host cells. In some embodiments, polypeptides of the invention may have a glutamine at this position.

[0138] Some or all of the polypeptides of the invention may possess an RNA-dependent DNA polymerase activity. Mutants may be made of the polypeptides of the invention that have an enhanced RNA-dependent DNA polymerase activity as compared to the wild type polypeptide of the invention. Alternatively, for those polypeptides of the invention that lack a detectable RNA-dependent DNA polymerase activity, mutants having such activity may be constructed according to the present invention. The present invention provides amino acid residues associated with reverse transcriptase activity in eubacterial DNA polymerases. Such reverse transcriptase activity is preferably observed in the presence of Mg²⁺ as a divalent cation, optionally in the absence of Mn²⁺.

[0139] Mutants having an enhanced reverse transcriptase activity are preferably constructed by mutating one or more amino acids of the Q-helix of the polymerase. The Q-helix is defined as RY-X₈-Y-X₃-SFAER, (SEQ ID NO:1) wherein X is any imino or amino acid. Representative Q-helices include amino acid numbers 823 to 842 of the sequence of E. coli DNA polymerase I, amino acid numbers 728 to 747 of Thermus aquaticus (Taq) DNA polymerase, and amino acid numbers 820-838 of the Caldibacillus cellulovorans CompA.2 DNA polymerase amino acid sequence presented in SEQ ID NO:16. Tables 35 and 37 provide the location and sequence of a representative number of Q-helices from a variety of eubacterial DNA polymerases. Each X may independently represent an Ala, Cys, Asp, Glu, Phe, Gly, His, Ile, Lys, Leu, Met, Asn, Pro, Gln, Arg, Ser, Thr, Val, Trp, or Tyr or may represent an amino or imino acid that is not naturally produced in most host cells. Each X can be determined by selecting a corresponding nucleic acid codon. Modified or natural tRNAs can be used to introduce specific amino acids into the sequence at any X. In some preferred embodiments, position 11 of the Q-helix (SEQ ID NO:1) may be a phenylalanine or a tyrosine (F or Y) independently of the amino acid residue at positions 15 and/or 16. In some embodiments, position 15 of the Q-helix (SEQ ID NO:1) may be a serine or asparagine (S or N) independently of the amino acid residue at positions 11 and/or 16. In some embodiments, position 16 of the Q-helix (SEQ ID NO:1) may be a tyrosine or phenylalanine (Y or F) independently of the amino acid residue at positions 11 and/or 12. In one embodiment, position 11 of the Q-helix may be a phenylalanine residue while position 15 is a serine residue and position 16 is a phenylalanine.

[0140] In some embodiments, the present invention provides mutant DNA polymerases derived from eubacterial DNA polymerases. Preferably, such mutants may have an increased RNA-dependent DNA polymerase activity as compared to the wildtype polymerase (e.g., in the presence of Mg²⁺). In some embodiments, such mutants may have one or more mutations in the amino acid sequence of the Q-helix. Preferred mutations include changing an amino acid at position 11 of the Q-helix to phenylalanine or tyrosine (F or Y), changing an amino acid at position 15 of the Q-helix to serine or asparagine (S or N), and/or changing an amino acid at position 16 of the Q-helix to tyrosine or phenylalanine (Y of F). Mutants may comprise one or more of these mutations. In one embodiment, mutants may comprise a phenylalanine at position 11, a serine at position 15, and a phenylalanine at position 16.

[0141] If the polypeptide of the invention has 3′-to-5′ exonuclease activity, this activity may be reduced, substantially reduced, or eliminated by mutating the gene encoding the polypeptide. Such mutations include point mutations, frame shift mutations, deletions and/or insertions. Preferably, the region of the gene encoding the 3′-to-5′ exonuclease activity is mutated or deleted using techniques well known in the art (for example Sambrook, et al, (1989) in: Molecular Cloning, A Laboratory Manual (2nd Ed.), Cold Spring Harbor Laboratory Press, Cold Spring Harbor, N.Y.).

[0142] 5′-to-3′ exonuclease activity of a polypeptide of the invention can likewise be reduced, substantially reduced, or eliminated by mutating the gene encoding the polypeptide. Such mutations include point mutations, frame shift mutations, deletions, and/or insertions. Preferably, the region of the gene encoding the 5′-to-3′ exonuclease activity is deleted using techniques well known in the art. In specific embodiments of this invention, any conserved amino acids that are associated with the 5′-to-3′ exonuclease activity can be mutated. Examples of these conserved amino acids are amino acids that correspond to Asp8, Lys77, Glu112, Asp114, Asp115, Asp137, Asp139, or Lys202 of Thermatoga neopolitina DNA polymerase, which correspond to Asp32, Lys97, Glu132, Asp134, Asp135, Asp157, Asp159, or Lys222 of the Caldibacillus cellulovorans CompA.2 DNA polymerase.

[0143] The present invention is directed broadly to mutations of DNA polymerases that result in the reduction or elimination of 5′-3′ exonuclease activity. Other particular mutations correspond to the following amino acids.

[0144] E. coli PolI: Asp13, Glu113, Asp115, Asp116, Asp138, and Asp140.

[0145] Taq Pol: Asp18, Glu117, Asp 119, Asp120, Asp142, and Asp144.

[0146] Tma Pol: Asp8, Glu112, Asp114, Asp115, Asp137, and Asp139. Amino acid residues of Taq DNA polymerase are as numbered in U.S. Pat. No. 5,079,352 and SEQ ID NO:27. Amino acid residues of Thermotoga maritima (Tma) DNA polymerase are numbered as in U.S. Pat. No. 5,374,553.

[0147] By comparison to the amino acid sequence of other DNA polymerases, the corresponding sites can easily be located in the polypeptides of the invention and the DNA altered to produce a coding sequence for a mutated polypeptide of the invention that lacks 5′-3′ exonuclease activity. Examples of suitable sites in the polypeptides of the invention to be mutated include those corresponding to the following sites in other DNA polymerases:

| Enzyme or source | Mutation positions |
|---|---|
| Streptococcus pneumoniae | Asp10, Glu114, Asp16, Asp117, Asp139, |
| | Asp141 |
| Thermus flavus | Asp17, Glu116, Asp118, Asp119, |
| | Asp141, Asp143 |
| Thermus thermophilus | Asp18, Glu118, Asp120, Asp121, |
| | Asp143, Asp145 |
| Deinococcus radiodurans | Asp18, Glu117, Asp119, Asp120, |
| | Asp142, Asp144 |
| Bacillus caldotenax | Asp9, Glu109, Asp111, Asp112, Asp134, |
| | Asp136 |

[0148] Coordinates of S. pneumoniae, T. flavus, D. radiodurans, B. caldotenax were obtained from Gutman and Minton, supra. Coordinates of T. thermophilus were obtained from International Patent No. WO 92/06200. The sequences of a representative number of the polypeptides of the invention may be aligned one skilled in the art can readily identify the corresponding residues in the polypeptides of the invention by consulting the alignment.

[0149] To abolish 5′-3′ exonuclease activity, amino acids are preferably selected to have different properties. For example, an acidic amino acid such as Asp or Glu may be changed to a basic, neutral or polar but uncharged amino acid such as Lys, Arg, His (basic); Ala, Val, Leu, Ile, Pro, Met, Phe, Trp (neutral); or Gly, Ser, Thr, Cys, Tyr, Asn or Gln (polar but uncharged). For example, Glu may be changed to Asp, Ala, Val Leu, Ile, Pro, Met, Phe, Trp, Gly, Ser, Thr, Cys, Tyr, Asn or Gln. Specifically, the Ala substitution in the corresponding position of an acid residue is expected to abolish 5′-3′ exonuclease activity.

[0150] In a preferred embodiment, oligonucleotide directed mutagenesis is used to create mutant polypeptides of the invention. This allows for all possible base pair changes at any determined site along the encoding DNA molecule. In general, this technique involves annealing an oligonucleotide complementary (except for one or more desired mismatches) to a single stranded nucleotide sequence coding for the native DNA polymerase of interest. The mismatched oligonucleotide is then extended by DNA polymerase, generating a double stranded DNA molecule which contains the desired change in sequence on one strand. The changes in sequence can of course result in the deletion, substitution, or insertion of an amino acid. The changed strand can be used as a template to form a double stranded polynucleotide. The double stranded polynucleotide can then be inserted into an appropriate expression vector, and a mutant polypeptide can thus be produced. The above-described oligonucleotide directed mutagenesis can be carried out using any technique known to those skilled in the art, for example, PCR. Preferably, mutations designed to alter the exonuclease activity do not adversely affect the polymerase activity.

[0151] In other embodiments, the entire 5′-to-3′ exonuclease domain of a DNA polymerase can be deleted by proteolytic cleavage or by genetic engineering. For example, a unique restriction site can be used to obtain a clone devoid of nucleotides encoding the amino terminal amino acids of DNA polymerase associated with the activity (e.g., amino acids 1 to about 304 of the Caldibacillus cellulovorans CompA.2 sequence presented in SEQ ID NO:16). Alternatively, less than the entire amino terminal domain may be removed, for example, by treating the DNA coding for the eubacterial DNA polymerase with an exonuclease, isolating the fragments, ligating the fragments into a cloning vehicle, transfecting cells with the cloning vehicle, and screening the transformants for DNA polymerase activity and lack of 5′-to-3′ exonuclease activity. These tasks may be accomplished by one skilled in the art with no more than routine experimentation.

[0152] Mutations may be made in the polypeptides of the invention to render them less discriminating or non-discriminating against non-natural nucleotides such as dideoxynucleotides. Changes within the O-helix of the polypeptides of the invention, such as other point mutations, deletions, and insertions, can be made to render the polymerase non-discriminating. The O-helix region is a 14 amino acid sequence corresponding to amino acids 746-759 of the Clostridium stercorarium sequence presented in SEQ ID NO:14 and amino acid numbers 751-764 of the Caldibacillus cellulovorans CompA.2 sequence presented in SEQ ID NO:16. The O-helix may be defined as RXXXKXXXFXXXYX, (SEQ ID NO:26) wherein X is any amino acid. The most important amino acids in conferring discriminatory activity include Arg, Lys and Phe (R746, K750, F754 in SEQ ID NO:14 and R751, K755, and F759 in SEQ ID NO:16). With reference to the sequence SEQ ID NO: 14, amino acids which may be substituted for Arg at position 746 (and in the corresponding position of other polypeptides of the invention) include Asp, Glu, Ala, Val Leu, Ile, Pro, Met, Phe, Trp, Gly, Ser, Thr, Cys, Tyr, Gln, Asn, Lys and His or other less common natural or unnatural amino acids. Amino acids that may be substituted for Phe at position 754 (and in the corresponding position of other polypeptides of the invention) include Lys, Arg, His, Asp, Glu, Ala, Val, Leu, Ile, Pro, Met, Trp, Gly, Ser, Thr, Cys, Tyr, Asn and Gln or other less common natural or unnatural amino acids. Amino acids that may be substituted for Lys at position 750 (and in the corresponding position of other polypeptides of the invention) include Tyr, Arg, His, Asp, Glu, Ala, Val, Leu, Ile, Pro, Met, Trp, Gly, Ser, Thr, Cys, Phe, Asn and Gln or other less common natural or unnatural amino acids. Preferred mutants include Tyr754, Ala754, Ser754 and Thr754. Any of the one or more of the amino acids conferring discriminatory activity may be substituted to alter discrimination. Such mutants may be prepared by well known methods of site directed mutagenesis known in the art or as described herein. Other amino acids such as ornithine can be substituted for any one or more of the amino acids conferring discriminatory activity. For example, unnatural tRNAs can be used to insert other amino acids.

[0153] Polypeptides of the invention include, but are not limited to, polypeptides comprising, or alternatively consisting of, an amino acid sequence selected from SEQ ID NOS::14-25, polypeptides comprising, or alternatively consisting of, a polypeptide encoded by a nucleotide sequence selected from SEQ ID NOS::2-13, polypeptides comprising, or alternatively consisting of, a polypeptide encoded by a nucleotide sequence of one of the deposited clones (NRRL Deposit Numbers NRRL B-30617, NRRL B-30618, NRRL B-30619, NRRL B-30620, NRRL B-30621, NRRL B-30622, NRRL B-30623, NRRL B-30624, NRRL B-30625, NRRL B-30626, NRRL B-30576, NRRL B-30577, NRRL B-30579, NRRL B-30578, NRRL B-30580), and/or mutants, fragments (e.g., portions), and variants thereof. As described below, the invention also includes polynucleotides encoding such polypeptides.

[0154] As described above, and further described below, polypeptides of the invention also include, but are not limited to, polypeptides comprising, or alternatively consisting of, mutant polymerases which comprise one or more substitutions corresponding to an amino acid residue of an amino acid sequence selected from SEQ ID NOS:14-25, polypeptides comprising, or alternatively consisting of, mutant polymerases which comprise one or more substitutions (e.g., one, two, three, four, five, six, seven, eight, nine, ten, etc.) corresponding to an amino acid residue of a polypeptide encoded by a nucleotide sequence selected from SEQ ID NOS: 2-13, polypeptides comprising, or alternatively consisting of, mutant polymerases which comprise one or more substitutions (e.g., one, two, three, four, five, six, seven, eight, nine, ten, etc.) corresponding to an amino acid residue of a polypeptide encoded by a nucleotide sequence of one of the deposited clones (NRRL Deposit Numbers NRRL B-30617, NRRL B-30618, NRRL B-30619, NRRL B-30620, NRRL B-30621, NRRL B-30622, NRRL B-30623, NRRL B-30624, NRRL B-30625, NRRL B-30626, NRRL B-30576, NRRL B-30577, NRRL B-30579, NRRL B-30578, NRRL B-30580), and/or mutants, fragments (e.g., portions), and variants thereof. As described below, the invention also includes polynucleotides encoding such polypeptides.

[0155] The nucleotide sequences of SEQ ID NOS: 2-13 and the translated corresponding amino acid sequences of SEQ ID NOS:14-25, are sufficiently accurate and otherwise suitable for a variety of uses well known in the art and described further below. For instance, the nucleotide sequences of SEQ ID NOS:2-13 are useful for designing nucleic acid hybridization probes/primers that will detect and/or amplify nucleic acid sequences contained in SEQ ID NOS: 2-13, respectively, or the DNAs contained in the respective deposited clone. These probes/primers will also hybridize to/amplify nucleic acid molecules in microbiological samples, thereby enabling detection of the respective organism from which SEQ ID NOS: 2-13 are derived. Similarly, polypeptides identified from SEQ ID NOS:14-25 may be used, for example, to generate antibodies which bind specifically to the polypeptides of the invention.

[0156] Nevertheless, DNA sequences generated by sequencing reactions can contain sequencing errors. The errors exist as misidentified nucleotides, or as insertions or deletions of nucleotides in the generated DNA sequence. The erroneously inserted or deleted nucleotides cause frame shifts in the reading frames of the predicted amino acid sequence. In these cases, the predicted amino acid sequence diverges from the actual amino acid sequence, even though the generated DNA sequence may be greater than 99.9% identical to the actual DNA sequence (for example, one base insertion or deletion in an open reading frame of over 1000 bases).

[0157] Accordingly, for those applications requiring precision in the nucleotide sequence or the amino acid sequence, the present invention provides not only the generated nucleotide sequences SEQ ID NOS: 2-13 and the corresponding predicted translated amino acid sequences of SEQ ID NOS:14-25, but also a sample of plasmid DNA containing a DNA clone encoding the polymerases of the invention deposited with the NRRL (see examples). The nucleotide sequence of the deposited clones can readily be determined by sequencing the deposited clones in accordance with known methods. The predicted amino acid sequences can then be verified from such deposits. Moreover, the amino acid sequence of the protein encoded by the deposited clone can also be directly determined by peptide sequencing or by expressing the protein in a suitable host cell containing the deposited DNA, collecting the protein, and determining its sequence.

[0158] Polypeptides of the invention include polypeptides comprising or consisting of fragments of the polypeptides of SEQ ID NOS:14-25, preferably fragments of the polymerases of SEQ ID NOS:14-25 (i.e., the polypeptides set out in these sequences which do not contain the N-terminal amino acids encoded by the vector nucleic acids (e.g., the first 22 amino acids set out in SEQ ID NO:14)) and fragments of the polymerases encoded by the deposited clones. Polypeptide fragments of the invention may be employed for producing the corresponding full-length polypeptide by peptide synthesis, therefore, the fragments may be employed as intermediates for producing the full-length polypeptides. Polypeptide fragments of the invention may also be employed for generating antibody, as described herein.

[0159] Polypeptide fragments of the invention may be from 6 to 959 amino acids in length. In many instances, these polypeptides fragments comprise or consist of amino acid sequences set out in one or more of SEQ ID NOS:14-25 with or without the N-terminal amino acids encoded by the vectors (i.e., fragments of the full-length polypeptide or the polymerase set out in SEQ ID NOS:14-25).

[0160] Polypeptide fragments of the invention may be, for example, at least 10 amino acids in length, and may begin at any amino acid residue of the full length polypeptide or the full length polymerase (e.g., the polypeptides of SEQ ID NOS:14-25 with or without the N-terminal amino acids encoded by the vectors, or the polymerases encoded by the deposited clones). Thus, polypeptides of the invention may comprise or consist of 10 amino acid long fragments including amino acid residues 1-10, 2-11, 3-12, . . . , 911-920 of the polypeptide or polymerase of SEQ ID NO:14; residues 1-10, 2-11, 3-12, . . . , 880-889 of the polypeptide or polymerase of SEQ ID NO:15; residues 1-10, 2-11, 3-12, . . . , 916-925 of the polypeptide or polymerase of SEQ ID NO:16; residues 1-10, 2-11, 3-12, . . . , 862-871 of the polypeptide or polymerase of SEQ ID NO:17; residues 1-10, 2-11, 3-12, . . . , 862-871 of the polypeptide or polymerase of SEQ ID NO:18; residues 1-10, 2-11, 3-12, . . . , 862-871 of the polypeptide or polymerase of SEQ ID NO:19; residues 1-10, 2-11, 3-12, . . . , 891-900 of the polypeptide or polymerase of SEQ ID NO:20; residues 1-10, 2-11, 3-12, . . . , 855-864 of the polypeptide or polymerase of SEQ ID NO:21; residues 1-10, 2-11, 3-12, . . . , 875-884 of the polypeptide or polymerase of SEQ ID NO:22; residues 1-10, 2-11, 3-12, . . . , 861-870 of the polypeptide or polymerase of SEQ ID NO:23; residues 1-10, 2-11, 3-12, . . . , 919-928 of the polypeptide or polymerase of SEQ ID NO:24; residues 1-10, 2-11, 3-12, . . . , 951-960 of the polypeptide or polymerase of SEQ ID NO:25.

[0161] Polypeptide fragments of the invention may be at least 11 amino acids in length, and may begin at any amino acid residue of the full length polypeptide or the full length polymerase (e.g., the polypeptides of SEQ ID NOS:14-25 with or without the N-terminal amino acids encoded by the vectors, or the polymerases encoded by the deposited clones). Thus, polypeptides of the invention may comprise or consist of 11 amino acid long fragments including amino acid residues 1-11, 2-12, 3-13, . . . , 910-920 of the polypeptide or polymerase of SEQ ID NO:14; residues 1-11, 2-12, 3-13, . . . , 879-889 of the polypeptide or polymerase of SEQ ID NO:15; residues 1-11, 2-12, 3-13, . . . , 915-925 of the polypeptide or polymerase of SEQ ID NO:16; residues 1-11, 2-12, 3-13, . . . , 861-871 of the polypeptide or polymerase of SEQ ID NO:17; residues 1-11, 2-12, 3-13, . . . , 861-871 of the polypeptide or polymerase of SEQ ID NO:18; residues 1-11, 2-12, 3-13, . . . , 861-871 of the polypeptide or polymerase of SEQ ID NO:19; residues 1-11, 2-12, 3-13, . . . , 890-900 of the polypeptide or polymerase of SEQ ID NO:20; residues 1-11, 2-12, 3-13, . . . , 854-864 of the polypeptide or polymerase of SEQ ID NO:21; residues 1-11, 2-12, 3-13, . . . , 874-884 of the polypeptide or polymerase of SEQ ID NO:22; residues 1-11, 2-12, 3-13, . . . , 860-870 of the polypeptide or polymerase of SEQ ID NO:23; residues 1-11, 2-12, 3-13, . . . , 918-928 of the polypeptide or polymerase of SEQ ID NO:24; residues 1-11, 2-12, 3-13, . . . , 950-960 of the polypeptide or polymerase of SEQ ID NO:25.

[0162] Polypeptide fragments of the invention may be at least 12 amino acids in length, and may begin at any amino acid residue of the full length polypeptide or the full length polymerase (e.g., the polypeptides of SEQ ID NOS:14-25 with or without the N-terminal amino acids encoded by the vectors, or the polymerases encoded by the deposited clones). Thus, polypeptides of the invention may comprise or consist of 12 amino acid long fragments including amino acid residues 1-12, 2-13, 3-14, . . . , 909-920 of the polypeptide or polymerase of SEQ ID NO:14; residues 1-12, 2-13, 3-14, . . . , 878-889 of the polypeptide or polymerase of SEQ ID NO:15; residues 1-12, 2-13, 3-14, . . . , 914-925 of the polypeptide or polymerase of SEQ ID NO:16; residues 1-12, 2-13, 3-14, . . . , 860-871 of the polypeptide or polymerase of SEQ ID NO:17; residues 1-12, 2-13, 3-14, . . . , 860-871 of the polypeptide or polymerase of SEQ ID NO:18; residues 1-12, 2-13, 3-14, . . . , 860-871 of the polypeptide or polymerase of SEQ ID NO:19; residues 1-12, 2-13, 3-14, . . . , 889-900 of the polypeptide or polymerase of SEQ ID NO:20; residues 1-12, 2-13, 3-14, . . . , 853-864 of the polypeptide or polymerase of SEQ ID NO:21; residues 1-12, 2-13, 3-14, . . . , 873-884 of the polypeptide or polymerase of SEQ ID NO:22; residues 1-12, 2-13, 3-14, . . . , 859-870 of the polypeptide or polymerase of SEQ ID NO:23; residues 1-12, 2-13, 3-14, . . . , 917-928 of the polypeptide or polymerase of SEQ ID NO:24; residues 1-12, 2-13, 3-14, . . . , 949-960 of the polypeptide or polymerase of SEQ ID NO:25.

[0163] Polypeptide fragments of the invention may be at least 13 amino acids in length, and may begin at any amino acid residue of the full length polypeptide or the full length polymerase (e.g., the polypeptides of SEQ ID NOS::14-25 with or without the N-terminal amino acids encoded by the vectors, or the polymerases encoded by the deposited clones). Thus, polypeptides of the invention may comprise or consist of 13 amino acid long fragments including amino acid residues 1-13, 2-14, 3-15, . . . , 908-920 of the polypeptide or polymerase of SEQ ID NO:14; residues 1-13, 2-14, 3-15, . . . , 877-889 of the polypeptide or polymerase of SEQ ID NO:15; residues 1-13, 2-14, 3-15, . . . , 913-925 of the polypeptide or polymerase of SEQ ID NO:16; residues 1-13, 2-14, 3-15, . . . , 859-871 of the polypeptide or polymerase of SEQ ID NO:17; residues 1-13, 2-14, 3-15, . . . , 859-871 of the polypeptide or polymerase of SEQ ID NO:18; residues 1-13, 2-14, 3-15, . . . , 859-871 of the polypeptide or polymerase of SEQ ID NO:19; residues 1-13, 2-14, 3-15, . . . , 888-900 of the polypeptide or polymerase of SEQ ID NO:20; residues 1-13, 2-14, 3-15, . . . , 852-864 of the polypeptide or polymerase of SEQ ID NO:21; residues 1-13, 2-14, 3-15, . . . , 872-884 of the polypeptide or polymerase of SEQ ID NO:22; residues 1-13, 2-14, 3-15, . . . , 858-870 of the polypeptide or polymerase of SEQ ID NO:23; residues 1-13, 2-14, 3-15, . . . , 916-928 of the polypeptide or polymerase of SEQ ID NO:24; residues 1-13, 2-14, 3-15, . . . , 948-960 of the polypeptide or polymerase of SEQ ID NO:25.

[0164] Polypeptide fragments of the invention may be at least 14 amino acids in length, and may begin at any amino acid residue of the full length polypeptide or the full length polymerase (e.g., the polypeptides of SEQ ID NOS:14-25 with or without the N-terminal amino acids encoded by the vectors, or the polymerases encoded by the deposited clones). Thus, polypeptides of the invention may comprise or consist of 14 amino acid long fragments including amino acid residues 1-14, 2-15, 3-16, . . . , 907-920 of the polypeptide or polymerase of SEQ ID NO:14; residues 1-14, 2-15, 3-16, . . . , 876-889 of the polypeptide or polymerase of SEQ ID NO:15; residues 1-14, 2-15, 3-16, . . . , 912-925 of the polypeptide or polymerase of SEQ ID NO:16; residues 1-14, 2-15, 3-16, . . . , 858-871 of the polypeptide or polymerase of SEQ ID NO:17; residues 1-14, 2-15, 3-16, . . . , 858-871 of the polypeptide or polymerase of SEQ ID NO:18; residues 1-14, 2-15, 3-16, . . . , 858-871 of the polypeptide or polymerase of SEQ ID NO:19; residues 1-14, 2-15, 3-16, . . . , 887-900 of the polypeptide or polymerase of SEQ ID NO:20; residues 1-14, 2-15, 3-16, . . . , 851-864 of the polypeptide or polymerase of SEQ ID NO:21; residues 1-14, 2-15, 3-16, . . . , 871-884 of the polypeptide or polymerase of SEQ ID NO:22; residues 1-14, 2-15, 3-16, . . . , 857-870 of the polypeptide or polymerase of SEQ ID NO:23; residues 1-14, 2-15, 3-16, . . . , 915-928 of the polypeptide or polymerase of SEQ ID NO:24; residues 1-14, 2-15, 3-16, . . . , 947-960 of the polypeptide or polymerase of SEQ ID NO:25.

[0165] Polypeptide fragments of the invention may be at least 15 amino acids in length, and may begin at any amino acid residue of the full length polypeptide or the full length polymerase (e.g., the polypeptides of SEQ ID NOS:14-25 with or without the N-terminal amino acids encoded by the vectors, or the polymerases encoded by the deposited clones). Thus, polypeptides of the invention may comprise or consist of 15 amino acid long fragments including amino acid residues 1-15, 2-16, 3-17, . . . , 906-920 of the polypeptide or polymerase of SEQ ID NO:14; residues 1-15, 2-16, 3-17, . . . , 875-889 of the polypeptide or polymerase of SEQ ID NO:15; residues 1-15, 2-16, 3-17, . . . , 911-925 of the polypeptide or polymerase of (SEQ ID NO:16; residues 1-15, 2-16, 3-17, . . . , 857-871 of the polypeptide or polymerase of SEQ ID NO:17; residues 1-15, 2-16, 3-17, . . . , 857-871 of the polypeptide or polymerase of SEQ ID NO:18; residues 1-15, 2-16, 3-17, . . . , 857-871 of the polypeptide or polymerase of SEQ ID NO:19; residues 1-15, 2-16, 3-17, . . . , 886-900 of the polypeptide or polymerase of SEQ ID NO:20; residues 1-15, 2-16, 3-17, . . . , 850-864 of the polypeptide or polymerase of SEQ ID NO:21; residues 1-15, 2-16, 3-17, . . . , 870-884 of the polypeptide or polymerase of SEQ ID NO:22; residues 1-15, 2-16, 3-17, . . . , 856-870 of the polypeptide or polymerase of SEQ ID NO:23; residues 1-15, 2-16, 3-17, . . . , 914-928 of the polypeptide or polymerase of SEQ ID NO:24; residues 1-15, 2-16, 3-17, . . . , 946-960 of the polypeptide or polymerase of SEQ ID NO:25.

[0166] Polypeptide fragments of the invention may be at least 16 amino acids in length, and may begin at any amino acid residue of the full length polypeptide or the full length polymerase (e.g., the polypeptides of SEQ ID NOS:14-25 with or without the N-terminal amino acids encoded by the vectors, or the polymerases encoded by the deposited clones). Thus, polypeptides of the invention may comprise or consist of 16 amino acid long fragments including amino acid residues 1-16, 2-17, 3-18, . . . , 905-920 of the polypeptide or polymerase of SEQ ID NO:14; residues 1-16, 2-17, 3-18, . . . , 874-889 of the polypeptide or polymerase of SEQ ID NO:15; residues 1-16, 2-17, 3-18, . . . , 910-925 of the polypeptide or polymerase of SEQ ID NO:16; residues 1-16, 2-17, 3-18, . . . , 856-871 of the polypeptide or polymerase of SEQ ID NO:17; residues 1-16, 2-17, 3-18, . . . , 856-871 of the polypeptide or polymerase of SEQ ID NO:18; residues 1-16, 2-17, 3-18, . . . , 856-871 of the polypeptide or polymerase of SEQ ID NO:19; residues 1-16, 2-17, 3-18, . . . , 885-900 of the polypeptide or polymerase of SEQ ID NO:20; residues 1-16, 2-17, 3-18, . . . , 849-864 of the polypeptide or polymerase of SEQ ID NO:21; residues 1-16, 2-17, 3-18, . . . , 869-884 of the polypeptide or polymerase of SEQ ID NO:22; residues 1-16, 2-17, 3-18, . . . , 855-870 of the polypeptide or polymerase of SEQ ID NO:23); residues 1-16, 2-17, 3-18, . . . , 913-928 of the polypeptide or polymerase of (SEQ ID NO:24; residues 1-16, 2-17, 3-18, . . . , 945-960 of the polypeptide or polymerase of SEQ ID NO:25.

[0167] Polypeptide fragments of the invention may be at least 17 amino acids in length, and may begin at any amino acid residue of the full length polypeptide or the full length polymerase (e.g., the polypeptides of SEQ ID NOS:14-25 with or without the N-terminal amino acids encoded by the vectors, or the polymerases encoded by the deposited clones). Thus, polypeptides of the invention may comprise or consist of 17 amino acid long fragments including amino acid residues 1-17, 2-18, 3-19, . . . , 904-920 of the polypeptide or polymerase of SEQ ID NO:14; residues 1-17, 2-18, 3-19, . . . , 873-889 of the polypeptide or polymerase of SEQ ID NO:15; residues 1-17, 2-18, 3-19, . . . , 909-925 of the polypeptide or polymerase of SEQ ID NO:16; residues 1-17, 2-18, 3-19, . . . , 855-871 of the polypeptide or polymerase of SEQ ID NO:17; residues 1-17, 2-18, 3-19, . . . , 855-871 of the polypeptide or polymerase of SEQ ID NO:18; residues 1-17, 2-18, 3-19, . . . , 855-871 of the polypeptide or polymerase of SEQ ID NO:19; residues 1-17, 2-18, 3-19, . . . , 884-900 of the polypeptide or polymerase of SEQ ID NO:20; residues 1-17, 2-18, 3-19, . . . , 848-864 of the polypeptide or polymerase of SEQ ID NO:21; residues 1-17, 2-18, 3-19, . . . , 868-884 of the polypeptide or polymerase of SEQ ID NO:22; residues 1-17, 2-18, 3-19, . . . , 854-870 of the polypeptide or polymerase of SEQ ID NO:23; residues 1-17, 2-18, 3-19, . . . , 912-928 of the polypeptide or polymerase of SEQ ID NO:24; residues 1-17, 2-18, 3-19, . . . , 944-960 of the polypeptide or polymerase of SEQ ID NO:25.

[0168] Polypeptide fragments of the invention may be at least 18 amino acids in length, and may begin at any amino acid residue of the full length polypeptide or the full length polymerase (e.g., the polypeptides of SEQ ID NOS:14-25 with or without the N-terminal amino acids encoded by the vectors, or the polymerases encoded by the deposited clones). Thus, polypeptides of the invention may comprise or consist of 18 amino acid long fragments including amino acid residues 1-18, 2-19, 3-20, . . . , 903-920 of the polypeptide or polymerase of SEQ ID NO:14; residues 1-18, 2-19, 3-20, . . . , 872-889 of the polypeptide or polymerase of SEQ ID NO:15; residues 1-18, 2-19, 3-20, . . . , 908-925 of the polypeptide or polymerase of SEQ ID NO:16; residues 1-18, 2-19, 3-20, . . . , 854-871 of the polypeptide or polymerase of SEQ ID NO:17; residues 1-18, 2-19, 3-20, . . . , 854-871 of the polypeptide or polymerase of SEQ ID NO:18; residues 1-18, 2-19, 3-20, . . . , 854-871 of the polypeptide or polymerase of SEQ ID NO:19; residues 1-18, 2-19, 3-20, . . . , 883-900 of the polypeptide or polymerase of SEQ ID NO:20; residues 1-18, 2-19, 3-20, . . . , 847-864 of the polypeptide or polymerase of SEQ ID NO:21; residues 1-18, 2-19, 3-20, . . . , 867-884 of the polypeptide or polymerase of SEQ ID NO:22; residues 1-18, 2-19, 3-20, . . . , 853-870 of the polypeptide or polymerase of SEQ ID NO:23; residues 1-18, 2-19, 3-20, . . . , 911-928 of the polypeptide or polymerase of SEQ ID NO:24; residues 1-18, 2-19, 3-20, . . . , 943-960 of the polypeptide or polymerase of SEQ ID NO:25.

[0169] Polypeptide fragments of the invention may be at least 19 amino acids in length, and may begin at any amino acid residue of the full length polypeptide or the full length polymerase (e.g., the polypeptides of SEQ ID NOS:14-25 with or without the N-terminal amino acids encoded by the vectors, or the polymerases encoded by the deposited clones). Thus, polypeptides of the invention may comprise or consist of 19 amino acid long fragments including amino acid residues 1-19, 2-20, 3-21, . . . , 902-920 of the polypeptide or polymerase of SEQ ID NO:14; residues 1-19, 2-20, 3-21, . . . , 871-889 of the polypeptide or polymerase of SEQ ID NO:15; residues 1-19, 2-20, 3-21, . . . , 907-925 of the polypeptide or polymerase of SEQ ID NO:16; residues 1-19, 2-20, 3-21, . . . , 853-871 of the polypeptide or polymerase of SEQ ID NO:17; residues 1-19, 2-20, 3-21, . . . , 853-871 of the polypeptide or polymerase of SEQ ID NO:18; residues 1-19, 2-20, 3-21, . . . , 853-871 of the polypeptide or polymerase of SEQ ID NO:19; residues 1-19, 2-20, 3-21, . . . , 882-900 of the polypeptide or polymerase of SEQ ID NO:20; residues 1-19, 2-20, 3-21, . . . , 846-864 of the polypeptide or polymerase of SEQ ID NO:21; residues 1-19, 2-20, 3-21, . . . , 866-884 of the polypeptide or polymerase of SEQ ID NO:22; residues 1-19, 2-20, 3-21, . . . , 852-870 of the polypeptide or polymerase of SEQ ID NO:23; residues 1-19, 2-20, 3-21, . . . , 910-928 of the polypeptide or polymerase of SEQ ID NO:24; residues 1-19, 2-20, 3-21, . . . , 942-960 of the polypeptide or polymerase of SEQ ID NO:25.

[0170] Polypeptide fragments of the invention may be at least 20 amino acids in length, and may begin at any amino acid residue of the full length polypeptide or the full length polymerase (e.g., the polypeptides of SEQ ID NOS:14-25 with or without the N-terminal amino acids encoded by the vectors, or the polymerases encoded by the deposited clones). Thus, polypeptides of the invention may comprise or consist of 20 amino acid long fragments including amino acid residues 1-20, 2-21, 3-22, . . . , 901-920 of the polypeptide or polymerase of SEQ ID NO:14; residues 1-20, 2-21, 3-22, . . . , 870-889 of the polypeptide or polymerase of SEQ ID NO:15; residues 1-20, 2-21, 3-22, . . . , 906-925 of the polypeptide or polymerase of SEQ ID NO:16; residues 1-20, 2-21, 3-22, . . . , 852-871 of the polypeptide or polymerase of SEQ ID NO:17; residues 1-20, 2-21, 3-22, . . . , 852-871 of the polypeptide or polymerase of SEQ ID NO:18; residues 1-20, 2-21, 3-22, . . . , 852-871 of the polypeptide or polymerase of SEQ ID NO:19; residues 1-20, 2-21, 3-22, . . . , 881-900 of the polypeptide or polymerase of SEQ ID NO:20; residues 1-20, 2-21, 3-22, . . . , 845-864 of the polypeptide or polymerase of SEQ ID NO:21; residues 1-20, 2-21, 3-22, . . . , 865-884 of the polypeptide or polymerase of SEQ ID NO:22; residues 1-20, 2-21, 3-22, . . . , 851-870 of the polypeptide or polymerase of SEQ ID NO:23; residues 1-20, 2-21, 3-22, . . . , 909-928 of the polypeptide or polymerase of SEQ ID NO:24; residues 1-20, 2-21, 3-22, . . . , 941-960 of the polypeptide or polymerase of SEQ ID NO:25.

[0171] Polypeptide fragments of the invention may be at least 21 amino acids in length, and may begin at any amino acid residue of the full length polypeptide or the full length polymerase (e.g., the polypeptides of SEQ ID NOS:14-25 with or without the N-terminal amino acids encoded by the vectors, or the polymerases encoded by the deposited clones). Thus, polypeptides of the invention may comprise or consist of 21 amino acid long fragments including amino acid residues 1-21, 2-22, 3-23, . . . , 900-920 of the polypeptide or polymerase of SEQ ID NO:14; residues 1-21, 2-22, 3-23, . . . , 869-889 of the polypeptide or polymerase of SEQ ID NO:15; residues 1-21, 2-22, 3-23, . . . , 905-925 of the polypeptide or polymerase of SEQ ID NO:16; residues 1-21, 2-22, 3-23, . . . , 851-871 of the polypeptide or polymerase of SEQ ID NO:17; residues 1-21, 2-22, 3-23, . . . , 851-871 of the polypeptide or polymerase of SEQ ID NO:18; residues 1-21, 2-22, 3-23, . . . , 851-871 of the polypeptide or polymerase of SEQ ID NO:19; residues 1-21, 2-22, 3-23, . . . , 880-900 of the polypeptide or polymerase of SEQ ID NO:20; residues 1-21, 2-22, 3-23, . . . , 844-864 of the polypeptide or polymerase of SEQ ID NO:21; residues 1-21, 2-22, 3-23, . . . , 864-884 of the polypeptide or polymerase of SEQ ID NO:22; residues 1-21, 2-22, 3-23, . . . , 850-870 of the polypeptide or polymerase of SEQ ID No:23; residues 1-21, 2-22, 3-23, . . . , 908-928 of the polypeptide or polymerase of SEQ ID NO:24; residues 1-21, 2-22, 3-23, . . . , 940-960 of the polypeptide or polymerase of SEQ ID NO:25.

[0172] Polypeptide fragments of the invention may be at least 22 amino acids in length, and may begin at any amino acid residue of the full length polypeptide or the full length polymerase (e.g., the polypeptides of SEQ ID NOS:14-25 with or without the N-terminal amino acids encoded by the vectors, or the polymerases encoded by the deposited clones). Thus, polypeptides of the invention may comprise or consist of 22 amino acid long fragments including amino acid residues 1-22, 2-23, 3-24, . . . , 899-920 of the polypeptide or polymerase of SEQ ID NO:14; residues 1-22, 2-23, 3-24, . . . , 868-889 of the polypeptide or polymerase of SEQ ID NO:15; residues 1-22, 2-23, 3-24, . . . , 904-925 of the polypeptide or polymerase of SEQ ID NO:16; residues 1-22, 2-23, 3-24, . . . , 850-871 of the polypeptide or polymerase of SEQ ID NO:17; residues 1-22, 2-23, 3-24, . . . , 850-871 of the polypeptide or polymerase of SEQ ID NO:18; residues 1-22, 2-23, 3-24, . . . , 850-871 of the polypeptide or polymerase of SEQ ID NO:19; residues 1-22, 2-23, 3-24, . . . , 879-900 of the polypeptide or polymerase of SEQ ID NO:20; residues 1-22, 2-23, 3-24, . . . , 843-864 of the polypeptide or polymerase of SEQ ID NO:21; residues 1-22, 2-23, 3-24, . . . , 863-884 of the polypeptide or polymerase of SEQ ID NO:22; residues 1-22, 2-23, 3-24, . . . , 849-870 of the polypeptide or polymerase of SEQ ID NO:23; residues 1-22, 2-23, 3-24, . . . , 907-928 of the polypeptide or polymerase of SEQ ID NO:24; residues 1-22, 2-23, 3-24, . . . , 939-960 of the polypeptide or polymerase of SEQ ID NO:25.

[0173] Polypeptide fragments of the invention may be at least 23 amino acids in length, and may begin at any amino acid residue of the full length polypeptide or the full length polymerase (e.g., the polypeptides of SEQ ID NOS:14-25 with or without the N-terminal amino acids encoded by the vectors, or the polymerases encoded by the deposited clones). Thus, polypeptides of the invention may comprise or consist of 23 amino acid long fragments including amino acid residues 1-23, 2-24, 3-25, . . . , 898-920 of the polypeptide or polymerase of SEQ ID NO:14; residues 1-23, 2-24, 3-25, . . . , 867-889 of the polypeptide or polymerase of SEQ ID NO:15; residues 1-23, 2-24, 3-25, . . . , 903-925 of the polypeptide or polymerase of SEQ ID NO:16; residues 1-23, 2-24, 3-25, . . . , 849-871 of the polypeptide or polymerase of SEQ ID NO:17; residues 1-23, 2-24, 3-25, . . . , 849-871 of the polypeptide or polymerase of SEQ ID NO:18; residues 1-23, 2-24, 3-25, . . . , 849-871 of the polypeptide or polymerase of SEQ ID NO:19; residues 1-23, 2-24, 3-25, . . . , 878-900 of the polypeptide or polymerase of SEQ ID NO:20; residues 1-23, 2-24, 3-25, . . . , 842-864 of the polypeptide or polymerase of SEQ ID NO:21; residues 1-23, 2-24, 3-25, . . . , 862-884 of the polypeptide or polymerase of SEQ ID NO:22; residues 1-23, 2-24, 3-25, . . . , 848-870 of the polypeptide or polymerase of SEQ ID NO:23; residues 1-23, 2-24, 3-25, . . . , 906-928 of the polypeptide or polymerase of SEQ ID NO:24; residues 1-23, 2-24, 3-25, . . . , 938-960 of the polypeptide or polymerase of SEQ ID NO:25.

[0174] Polypeptide fragments of the invention may be at least 24 amino acids in length, and may begin at any amino acid residue of the full length polypeptide or the full length polymerase (e.g., the polypeptides of SEQ ID NOS:14-25 with or without the N-terminal amino acids encoded by the vectors, or the polymerases encoded by the deposited clones). Thus, polypeptides of the invention may comprise or consist of 24 amino acid long fragments including amino acid residues 1-23, 2-24, 3-25, . . . , 897-920 of the polypeptide or polymerase of SEQ ID NO:14; residues 1-23, 2-24, 3-25, . . . , 866-889 of the polypeptide or polymerase of SEQ ID NO:15; residues 1-23, 2-24, 3-25, . . . , 902-925 of the polypeptide or polymerase of SEQ ID NO:16; residues 1-23, 2-24, 3-25, . . . , 848-871 of the polypeptide or polymerase of SEQ ID NO:17; residues 1-23, 2-24, 3-25, . . . , 848-871 of the polypeptide or polymerase of SEQ ID NO:18; residues 1-23, 2-24, 3-25, . . . , 848-871 of the polypeptide or polymerase of SEQ ID NO:19; residues 1-23, 2-24, 3-25, . . . , 877-900 of the polypeptide or polymerase of SEQ ID NO:20; residues 1-23, 2-24, 3-25, . . . , 841-864 of the polypeptide or polymerase of SEQ ID NO:21; residues 1-23, 2-24, 3-25, . . . , 861-884 of the polypeptide or polymerase of SEQ ID NO:22; residues 1-23, 2-24, 3-25, . . . , 847-870 of the polypeptide or polymerase of SEQ ID NO:23; residues 1-23, 2-24, 3-25, . . . , 905-928 of the polypeptide or polymerase of SEQ ID NO:24; residues 1-23, 2-24, 3-25, . . . , 937-960 of the polypeptide or polymerase of SEQ ID NO:25.

[0175] Polypeptide fragments of the invention may be at least 25 amino acids in length, and may begin at any amino acid residue of the full length polypeptide or the full length polymerase (e.g., the polypeptides of SEQ ID NOS:14-25 with or without the N-terminal amino acids encoded by the vectors, or the polymerases encoded by the deposited clones). Thus, polypeptides of the invention may comprise or consist of 25 amino acid long fragments including amino acid residues 1-24, 2-25, 3-26, . . . , 896-920 of the polypeptide or polymerase of SEQ ID NO:14; residues 1-24, 2-25, 3-26, . . . , 865-889 of the polypeptide or polymerase of SEQ ID NO:15; residues 1-24, 2-25, 3-26, . . . , 901-925 of the polypeptide or polymerase of SEQ ID NO:16; residues 1-24, 2-25, 3-26, . . . , 847-871 of the polypeptide or polymerase of SEQ ID NO:17; residues 1-24, 2-25, 3-26, . . . , 847-871 of the polypeptide or polymerase of SEQ ID NO:18; residues 1-24, 2-25, 3-26, . . . , 847-871 of the polypeptide or polymerase of SEQ ID NO:19; residues 1-24, 2-25, 3-26, . . . , 876-900 of the polypeptide or polymerase of SEQ ID NO:20; residues 1-24, 2-25, 3-26, . . . , 840-864 of the polypeptide or polymerase of SEQ ID NO:21; residues 1-24, 2-25, 3-26, . . . , 860-884 of the polypeptide or polymerase of SEQ ID NO:22; residues 1-24, 2-25, 3-26, . . . , 846-870 of the polypeptide or polymerase of SEQ ID NO:23; residues 1-24, 2-25, 3-26, . . . , 904-928 of the polypeptide or polymerase of SEQ ID NO:24; residues 1-24, 2-25, 3-26, . . . , 936-960 of the polypeptide or polymerase of SEQ ID NO:25.

[0176] Polypeptide fragments of the invention may be at least 26 amino acids in length, and may begin at any amino acid residue of the full length polypeptide or the full length polymerase (e.g., the polypeptides of SEQ ID NOS:14-25 with or without the N-terminal amino acids encoded by the vectors, or the polymerases encoded by the deposited clones). Thus, polypeptides of the invention may comprise or consist of 26 amino acid long fragments including amino acid residues 1-25, 2-26, 3-27, . . . , 895-920 of the polypeptide or polymerase of SEQ ID NO:14; residues 1-25, 2-26, 3-27, . . . , 864-889 of the polypeptide or polymerase of SEQ ID NO:15; residues 1-25, 2-26, 3-27, . . . , 900-925 of the polypeptide or polymerase of SEQ ID NO:16; residues 1-25, 2-26, 3-27, . . . , 846-871 of the polypeptide or polymerase of SEQ ID NO:17; residues 1-25, 2-26, 3-27, . . . , 846-871 of the polypeptide or polymerase of SEQ ID NO:18; residues 1-25, 2-26, 3-27, . . . , 846-871 of the polypeptide or polymerase of SEQ ID NO:19; residues 1-25, 2-26, 3-27, . . . , 875-900 of the polypeptide or polymerase of SEQ ID NO:20; residues 1-25, 2-26, 3-27, . . . , 839-864 of the polypeptide or polymerase of SEQ ID NO:21) residues 1-25, 2-26, 3-27, . . . , 859-884 of the polypeptide or polymerase of SEQ ID NO:22; residues 1-25, 2-26, 3-27, . . . , 845-870 of the polypeptide or polymerase of SEQ ID NO:23; residues 1-25, 2-26, 3-27, . . . , 903-928 of the polypeptide or polymerase of SEQ ID NO:24; residues 1-25, 2-26, 3-27, . . . , 935-960 of the polypeptide or polymerase of SEQ ID NO:25.

[0177] Polypeptide fragments of the invention may be at least 27 amino acids in length, and may begin at any amino acid residue of the full length polypeptide or the full length polymerase (e.g., the polypeptides of SEQ ID NOS:14-25 with or without the N-terminal amino acids encoded by the vectors, or the polymerases encoded by the deposited clones). Thus, polypeptides of the invention may comprise or consist of 27 amino acid long fragments including amino acid residues 1-26, 2-27, 3-28, . . . , 894-920 of the polypeptide or polymerase of SEQ ID NO:14; residues 1-26, 2-27, 3-28, . . . , 863-889 of the polypeptide or polymerase of SEQ ID NO:15; residues 1-26, 2-27, 3-28, . . . , 899-925 of the polypeptide or polymerase of SEQ ID NO:16; residues 1-26, 2-27, 3-28, . . . , 845-871 of the polypeptide or polymerase of SEQ ID NO:17; residues 1-26, 2-27, 3-28, . . . , 845-871 of the polypeptide or polymerase of SEQ ID NO:18; residues 1-26, 2-27, 3-28, . . . , 845-871 of the polypeptide or polymerase of SEQ ID NO:19; residues 1-26, 2-27, 3-28, . . . , 874-900 of the polypeptide or polymerase of SEQ ID NO:20; residues 1-26, 2-27, 3-28, . . . , 838-864 of the polypeptide or polymerase of SEQ ID NO:21; residues 1-26, 2-27, 3-28, . . . , 858-884 of the polypeptide or polymerase of SEQ ID NO:22; residues 1-26, 2-27, 3-28, . . . , 844-870 of the polypeptide or polymerase of SEQ ID NO:23; residues 1-26, 2-27, 3-28, . . . , 902-928 of the polypeptide or polymerase of SEQ ID NO:24; residues 1-26, 2-27, 3-28, . . . , 934-960 of the polypeptide or polymerase of SEQ ID NO:25.

[0178] Polypeptide fragments of the invention may be at least 28 amino acids in length, and may begin at any amino acid residue of the full length polypeptide or the full length polymerase (e.g., the polypeptides of SEQ ID NOS:14-25 with or without the N-terminal amino acids encoded by the vectors, or the polymerases encoded by the deposited clones). Thus, polypeptides of the invention may comprise or consist of 28 amino acid long fragments including amino acid residues 1-27, 2-28, 3-29, . . . , 893-920 of the polypeptide or polymerase of SEQ ID NO:14; residues 1-27, 2-28, 3-29, . . . , 862-889 of the polypeptide or polymerase of SEQ ID NO:15; residues 1-27, 2-28, 3-29, . . . , 898-925 of the polypeptide or polymerase of SEQ ID NO:16; residues 1-27, 2-28, 3-29, . . . , 844-871 of the polypeptide or polymerase of SEQ ID NO:17; residues 1-27, 2-28, 3-29, . . . , 844-871 of the polypeptide or polymerase of SEQ ID NO:18; residues 1-27, 2-28, 3-29, . . . , 844-871 of the polypeptide or polymerase of SEQ ID NO:19; residues 1-27, 2-28, 3-29, . . . , 873-900 of the polypeptide or polymerase of SEQ ID NO:20; residues 1-27, 2-28, 3-29, . . . , 837-864 of the polypeptide or polymerase of SEQ ID NO:21; residues 1-27, 2-28, 3-29, . . . , 857-884 of the polypeptide or polymerase of SEQ ID NO:22; residues 1-27, 2-28, 3-29, . . . , 843-870 of the polypeptide or polymerase of SEQ ID NO:23; residues 1-27, 2-28, 3-29, . . . , 901-928 of the polypeptide or polymerase of SEQ ID NO:24; residues 1-27, 2-28, 3-29, . . . , 933-960 of the polypeptide or polymerase of SEQ ID NO:25.

[0179] Polypeptide fragments of the invention may be at least 29 amino acids in length, and may begin at any amino acid residue of the full length polypeptide or the full length polymerase (e.g., the polypeptides of SEQ ID NOS:14-25 with or without the N-terminal amino acids encoded by the vectors, or the polymerases encoded by the deposited clones). Thus, polypeptides of the invention may comprise or consist of 29 amino acid long fragments including amino acid residues 1-28, 2-29, 3-30, . . . , 892-920 of the polypeptide or polymerase of SEQ ID NO:14; residues 1-28, 2-29, 3-30, . . . , 861-889 of the polypeptide or polymerase of SEQ ID NO:15; residues 1-28, 2-29, 3-30, . . . , 897-925 of the polypeptide or polymerase of SEQ ID NO:16; residues 1-28, 2-29, 3-30, . . . , 843-871 of the polypeptide or polymerase of SEQ ID NO:17; residues 1-28, 2-29, 3-30, . . . , 843-871 of the polypeptide or polymerase of SEQ ID NO:18; residues 1-28, 2-29, 3-30, . . . , 843-871 of the polypeptide or polymerase of SEQ ID NO:19; residues 1-28, 2-29, 3-30, . . . , 872-900 of the polypeptide or polymerase of SEQ ID NO:20; residues 1-28, 2-29, 3-30, . . . , 836-864 of the polypeptide or polymerase of SEQ ID NO:21; residues 1-28, 2-29, 3-30, . . . , 856-884 of the polypeptide or polymerase of SEQ ID NO:22; residues 1-28, 2-29, 3-30, . . . , 842-870 of the polypeptide or polymerase of SEQ ID NO:23; residues 1-28, 2-29, 3-30, . . . , 900-928 of the polypeptide or polymerase of SEQ ID NO:24; residues 1-28, 2-29, 3-30, . . . , 932-960 of the polypeptide or polymerase of SEQ ID NO:25.

[0180] Polypeptide fragments of the invention may be at least 30 amino acids in length, and may begin at any amino acid residue of the full length polypeptide or the full length polymerase (e.g., the polypeptides of SEQ ID NOS:14-25 with or without the N-terminal amino acids encoded by the vectors, or the polymerases encoded by the deposited clones). Thus, polypeptides of the invention may comprise or consist of 30 amino acid long fragments including amino acid residues 1-29, 2-30, 3-31, . . . , 891-920 of the polypeptide or polymerase of SEQ ID NO:14; residues 1-29, 2-30, 3-31, . . . , 860-889 of the polypeptide or polymerase of SEQ ID NO:15; residues 1-29, 2-30, 3-31, . . . , 896-925 of the polypeptide or polymerase of SEQ ID NO:16; residues 1-29, 2-30, 3-31, . . . , 842-871 of the polypeptide or polymerase of SEQ ID NO:17; residues 1-29, 2-30, 3-31, . . . , 842-871 of the polypeptide or polymerase of SEQ ID NO:18; residues 1-29, 2-30, 3-31, . . . , 842-871 of the polypeptide or polymerase of SEQ ID NO:19; residues 1-29, 2-30, 3-31, . . . , 871-900 of the polypeptide or polymerase of SEQ ID NO:20; residues 1-29, 2-30, 3-31, . . . , 835-864 of the polypeptide or polymerase of SEQ ID NO:21; residues 1-29, 2-30, 3-31, . . . , 855-884 of the polypeptide or polymerase of SEQ ID NO:22 residues 1-29, 2-30, 3-31, . . . , 841-870 of the polypeptide or polymerase of SEQ ID NO:23; residues 1-29, 2-30, 3-31, . . . , 899-928 of the polypeptide or polymerase of SEQ ID NO:24; residues 1-29, 2-30, 3-31, . . . , 931-960 of the polypeptide or polymerase of SEQ ID NO:25.

[0181] Polypeptide fragments of the invention may be at least 31 amino acids in length, and may begin at any amino acid residue of the full length polypeptide or the full length polymerase (e.g., the polypeptides of SEQ ID NOS:14-25 with or without the N-terminal amino acids encoded by the vectors, or the polymerases encoded by the deposited clones). Thus, polypeptides of the invention may comprise or consist of 31 amino acid long fragments including amino acid residues 1-30, 2-31, 3-32, . . . , 890-920 of the polypeptide or polymerase of SEQ ID NO:14; residues 1-30, 2-31, 3-32, . . . , 859-889 of the polypeptide or polymerase of SEQ ID NO:15; residues 1-30, 2-31, 3-32, . . . , 895-925 of the polypeptide or polymerase of SEQ ID NO:16; residues 1-30, 2-31, 3-32, . . . , 841-871 of the polypeptide or polymerase of SEQ ID NO:17; residues 1-30, 2-31, 3-32, . . . , 841-871 of the polypeptide or polymerase of SEQ ID NO:18; residues 1-30, 2-31, 3-32, . . . , 841-871 of the polypeptide or polymerase of SEQ ID NO:19; residues 1-30, 2-31, 3-32, . . . , 870-900 of the polypeptide or polymerase of SEQ ID NO:20; residues 1-30, 2-31, 3-32, . . . , 834-864 of the polypeptide or polymerase of SEQ ID NO:21; residues 1-30, 2-31, 3-32, . . . , 854-884 of the polypeptide or polymerase of SEQ ID NO:22; residues 1-30, 2-31, 3-32, . . . , 840-870 of the polypeptide or polymerase of SEQ ID NO:23; residues 1-30, 2-31, 3-32, . . . , 898-928 of the polypeptide or polymerase of SEQ ID NO:24; residues 1-30, 2-31, 3-32, . . . , 930-960 of the polypeptide or polymerase of SEQ ID NO:25.

[0182] Polypeptide fragments of the invention may be at least 32 amino acids in length, and may begin at any amino acid residue of the full length polypeptide or the full length polymerase (e.g., the polypeptides of SEQ ID NOS:14-25 with or without the N-terminal amino acids encoded by the vectors, or the polymerases encoded by the deposited clones). Thus, polypeptides of the invention may comprise or consist of 32 amino acid long fragments including amino acid residues 1-31, 2-32, 3-33, . . . , 889-920 of the polypeptide or polymerase of SEQ ID NO:14; residues 1-31, 2-32, 3-33, . . . , 858-889 of the polypeptide or polymerase of SEQ ID NO:15; residues 1-31, 2-32, 3-33, . . . , 894-925 of the polypeptide or polymerase of SEQ ID NO:16; residues 1-31, 2-32, 3-33, . . . , 840-871 of the polypeptide or polymerase of SEQ ID NO:17; residues 1-31, 2-32, 3-33, . . . , 840-871 of the polypeptide or polymerase of SEQ ID NO:18; residues 1-31, 2-32, 3-33, . . . , 840-871 of the polypeptide or polymerase of SEQ ID NO:19; residues 1-31, 2-32, 3-33, . . . , 869-900 of the polypeptide or polymerase of SEQ ID NO:20; residues 1-31, 2-32, 3-33, . . . , 833-864 of the polypeptide or polymerase of SEQ ID NO:21; residues 1-31, 2-32, 3-33, . . . , 853-884 of the polypeptide or polymerase of SEQ ID NO:22; residues 1-31, 2-32, 3-33, . . . , 839-870 of the polypeptide or polymerase of SEQ ID NO:23; residues 1-31, 2-32, 3-33, . . . , 897-928 of the polypeptide or polymerase of SEQ ID NO:24; residues 1-31, 2-32, 3-33, . . . , 929-960 of the polypeptide or polymerase of SEQ ID NO:25.

[0183] Polypeptide fragments of the invention may be at least 33 amino acids in length, and may begin at any amino acid residue of the full length polypeptide or the full length polymerase (e.g., the polypeptides of SEQ ID NOS:14-25 with or without the N-terminal amino acids encoded by the vectors, or the polymerases encoded by the deposited clones). Thus, polypeptides of the invention may comprise or consist of 33 amino acid long fragments including amino acid residues 1-32, 2-33, 3-34, . . . , 888-920 of the polypeptide or polymerase of SEQ ID NO:14; residues 1-32, 2-33, 3-34, . . . , 857-889 of the polypeptide or polymerase of SEQ ID NO:15; residues 1-32, 2-33, 3-34, . . . , 893-925 of the polypeptide or polymerase of SEQ ID NO:16; residues 1-32, 2-33, 3-34, . . . , 839-871 of the polypeptide or polymerase of SEQ ID NO:17; residues 1-32, 2-33, 3-34, . . . , 839-871 of the polypeptide or polymerase of SEQ ID NO:18; residues 1-32, 2-33, 3-34, . . . , 839-871 of the polypeptide or polymerase of SEQ ID NO:19; residues 1-32, 2-33, 3-34, . . . , 868-900 of the polypeptide or polymerase of SEQ ID NO:20; residues 1-32, 2-33, 3-34, . . . , 832-864 of the polypeptide or polymerase of SEQ ID NO:21; residues 1-32, 2-33, 3-34, . . . , 852-884 of the polypeptide or polymerase of SEQ ID NO:22; residues 1-32, 2-33, 3-34, . . . , 838-870 of the polypeptide or polymerase of SEQ ID NO:23; residues 1-32, 2-33, 3-34, . . . , 896-928 of the polypeptide or polymerase of SEQ ID NO:24; residues 1-32, 2-33, 3-34, . . . , 928-960 of the polypeptide or polymerase of SEQ ID NO:25.

[0184] Polypeptide fragments of the invention may be at least 34 amino acids in length, and may begin at any amino acid residue of the full length polypeptide or the full length polymerase (e.g., the polypeptides of SEQ ID NOS:14-25 with or without the N-terminal amino acids encoded by the vectors, or the polymerases encoded by the deposited clones). Thus, polypeptides of the invention may comprise or consist of 34 amino acid long fragments including amino acid residues 1-33, 2-34, 3-35, . . . , 887-920 of the polypeptide or polymerase of SEQ ID NO:14; residues 1-33, 2-34, 3-35, . . . , 856-889 of the polypeptide or polymerase of SEQ ID NO:15; residues 1-33, 2-34, 3-35, . . . , 892-925 of the polypeptide or polymerase of SEQ ID NO:16; residues 1-33, 2-34, 3-35, . . . , 838-871 of the polypeptide or polymerase of SEQ ID NO:17; residues 1-33, 2-34, 3-35, . . . , 838-871 of the polypeptide or polymerase of SEQ ID NO:18; residues 1-33, 2-34, 3-35, . . . , 838-871 of the polypeptide or polymerase of SEQ ID NO:19; residues 1-33, 2-34, 3-35, . . . , 867-900 of the polypeptide or polymerase of SEQ ID NO:20; residues 1-33, 2-34, 3-35, . . . , 831-864 of the polypeptide or polymerase of SEQ ID NO:21; residues 1-33, 2-34, 3-35, . . . , 851-884 of the polypeptide or polymerase of SEQ ID NO:22; residues 1-33, 2-34, 3-35, . . . , 837-870 of the polypeptide or polymerase of SEQ ID NO:23; residues 1-33, 2-34, 3-35, . . . , 895-928 of the polypeptide or polymerase of SEQ ID NO:24; residues 1-33, 2-34, 3-35, . . . , 927-960 of the polypeptide or polymerase of SEQ ID NO:25.

[0185] An antibody of the invention may specifically bind one of the above fragments, or more than one fragments which overlap. Thus, the invention also includes antibodies which bind one or more polypeptides of the invention as well as methods for making such antibodies and compositions comprising such antibodies.

[0186] Polypeptide fragments of the invention may contain a continuous series of deleted residues from the amino (N)- or the carboxyl (C)-terminus, or both. For example, any number of amino acids, ranging from 1 to 981, can be deleted from the N-terminus. Polypeptides of the invention may comprise or consist of fragments containing a deletion of 1 to 10, 10 to 20, 20 to 30, 30 to 40, 40 to 50, 50 to 60, 60 to 70, 70 to 80, 80 to 90, 90 to 100, 100 to 110, 110 to 120, 120 to 130, 130 to 140, 140 to 150, 150 to 160, 160 to 170, 170 to 180, 180 to 190, 190 to 200, 200 to 210, 210 to 220, 220 to 230, 230 to 240, 240 to 250, 250 to 260, 260 to 270, 270 to 280, 280 to 290, 290 to 300, 300 to 310, 310 to 320, 320 to 330, 330 to 340, 340 to 350, 350 to 360, 360 to 370, 370 to 380, 380 to 390, 390 to 400, 400 to 410, 410 to 420, 420 to 430, 430 to 440, 440 to 450, 450 to 460, 460 to 470, or 470 to 480 amino acids from the N-terminus of the full length polypeptide or the full length polymerase (e.g., the polypeptides of SEQ ID NOS:14-25 with or without the N-terminal amino acids encoded by the vectors, or the polymerases encoded by the deposited clones).

[0187] As another example, any number of amino acids, ranging from 1 to 981, can be deleted from the C-terminus. Polypeptides of the invention may comprise or consist of fragments containing a deletion of 1 to 10, 10 to 20, 20 to 30, 30 to 40, 40 to 50, 50 to 60, 60 to 70, 70 to 80, 80 to 90, 90 to 100, 100 to 110, 110 to 120, 120 to 130, 130 to 140, 140 to 150, 150 to 160, 160 to 170, 170 to 180, 180 to 190, 190 to 200, 200 to 210, 210 to 220, 220 to 230, 230 to 240, 240 to 250, 250 to 260, 260 to 270, 270 to 280, 280 to 290, 290 to 300, 300 to 310, 310 to 320, 320 to 330, 330 to 340, 340 to 350, 350 to 360, 360 to 370, 370 to 380, 380 to 390, 390 to 400, 400 to 410, 410 to 420, 420 to 430, 430 to 440, 440 to 450, 450 to 460, 460 to 470, or 470 to 480 amino acids from the C-terminus of the full length polypeptide or the full length polymerase (e.g., the polypeptides of SEQ ID NOS:14-25 with or without the N-terminal amino acids encoded by the vectors, or the polymerases encoded by the deposited clones).

[0188] Furthermore, polypeptides of the invention may comprise or consist of fragments which contain combinations of N- and C-terminal deletions such as the N-terminal and C-terminal deletions described above. Combined N- and C-terminal deletion fragments of the invention may contain a deletion of 1 to 10, 10 to 20, 20 to 30, 30 to 40, 40 to 50, 50 to 60, 60 to 70, 70 to 80, 80 to 90, 90 to 100, 100 to 110, 110 to 120, 120 to 130, 130 to 140, 140 to 150, 150 to 160, 160 to 170, 170 to 180, 180 to 190, 190 to 200, 200 to 210, 210 to 220, 220 to 230, 230 to 240, 240 to 250, 250 to 260, 260 to 270, 270 to 280, 280 to 290, 290 to 300, 300 to 310, 310 to 320, 320 to 330, 330 to 340, 340 to 350, 350 to 360, 360 to 370, 370 to 380, 380 to 390, 390 to 400, 400 to 410, 410 to 420, 420 to 430, 430 to 440, 440 to 450, 450 to 460, 460 to 470, or 470 to 480 amino acids from the N-terminus and may also contain a deletion of 1 to 10, 10 to 20, 20 to 30, 30 to 40, 40 to 50, 50 to 60, 60 to 70, 70 to 80, 80 to 90, 90 to 100, 100 to 110, 110 to 120, 120 to 130, 130 to 140, 140 to 150, 150 to 160, 160 to 170, 170 to 180, 180 to 190, 190 to 200, 200 to 210, 210 to 220, 220 to 230, 230 to 240, 240 to 250, 250 to 260, 260 to 270, 270 to 280, 280 to 290, 290 to 300, 300 to 310, 310 to 320, 320 to 330, 330 to 340, 340 to 350, 350 to 360, 360 to 370, 370 to 380, 380 to 390, 390 to 400, 400 to 410, 410 to 420, 420 to 430, 430 to 440, 440 to 450, 450 to 460, 460 to 470, or 470 to 480 amino acids from the C-terminus.

[0189] Thus, exemplary polypeptides of the invention include polypeptides which comprise or consist of amino acids 33 to 840, 56 to 851, 73 to 893, 11 to 235, 450 to 863, 578 to 901, 435 to 920, 31 to 121, 41 to 93, 235 to 298, 425 to 779, or 534 to 859 of the full length polypeptide or the polymerase of SEQ ID NO:14. Additional exemplary of polypeptides of the invention include polypeptides which comprise or consist of amino acids 55 to 810, 67 to 878, 73 to 803, 11 to 240, 461 to 877, 578 to 889, 435 to 888, 41 to 142, 41 to 93, 235 to 303, 425 to 765, or 523 to 855 of the full length polypeptide or the polymerase in SEQ ID NO: 15. Other exemplary of polypeptides of the invention include polypeptides which comprise or consist of amino acids 55 to 810, 67 to 844, 73 to 779, 11 to 253, 461 to 852, 578 to 787, 435 to 831, 41 to 122, 48 to 93, 225 to 303, 455 to 765, or 513 to 845 of the full length polypeptide or the polymerase in SEQ ID NOS:16-25. The invention further includes nucleic acid molecules which encodes these polypeptides of the invention, as well as other polypeptides described herein, and host cells which contain such nucleic acid molecules. The invention further includes methods for making polypeptides of the invention (e.g., methods for producing polypeptides using nucleic acid molecules of the invention). In particular embodiments, polypeptides of the invention are provided in (1) isolated, (2) substantially pure, and/or (3) essentially pure forms. The invention further includes compositions and mixtures (e.g., reaction mixtures) which contain one or more polypeptides and/or polynucleotides of the invention.

[0190] Even if deletion of one or more amino acids from the N- and/or C-terminus of a protein results in modification of loss of one or more biological functions of the protein, other functional activities (e.g., enzymatic activities, antigenic activity, immunogenic activity) may still be retained. For example, the ability of shortened polypeptides to induce and/or bind to antibodies which recognize the complete forms of the polypeptides generally will be retained when less than the majority of the residues of the complete or mature polypeptide are removed from the N- and/or C-terminus. Whether a particular polypeptide lacking N- and/or C-terminal residues of a complete polypeptide retains such immunologic activities can readily be determined by routine methods described herein and otherwise known in the art. It is not unlikely that a fragment with a large number of deleted N- and/or C-terminal amino acid residues may retain some antigenic or immunogenic activities. In fact, peptides composed of as few as six amino acid residues may often evoke an immune response, as discussed below.

[0191] Polypeptide fragments of the invention may include unique regions, i.e., stretches of amino acids of the polymerases of SEQ ID NOS:14-25 that are less than 100% identical to corresponding stretches of amino acids in other proteins such the polypeptides of SEQ ID NOS:27-34). Unique regions of each polypeptide (e.g., polymerase) of the invention are shown in the alignment in Table 35, which indicates the identical and non-identical amino acids of the polymerases of SEQ ID NOS:14-25 (or the polymerases encoded by a deposited clone) as compared to the polypeptides of SEQ ID NOS:27-34. Polypeptide fragments of the invention containing unique regions are useful for generating highly specific antibodies of the invention, as discussed below, and for conferring upon a protein a particular activity, such as an enzymatic activity described herein. Thus, fragments containing unique regions are preferred antigenic fragments of the invention. Additionally, fragments containing unique regions are also useful for producing fusion proteins such as proteins produced by DNA shuffling, described in more detail below. Using DNA shuffling, fusion proteins are constructed which comprise fragments from one or more polymerases and which preferably have an enzymatic activity of a polymerase of SEQ ID NOS:14-25 or the polymerases encoded by a deposited clone.

[0192] Other fragments of the invention are fragments characterized by structural or functional attributes of the polypeptides of the invention. Such fragments include amino acid residues that comprise alpha-helix and alpha-helix forming regions (“alpha-regions”), beta-sheet and beta-sheet-forming regions (“beta-regions”), turn and turn-forming regions (“turn-regions”), coil and coil-forming regions (“coil-regions”), hydrophilic regions, hydrophobic regions, alpha amphipathic regions, beta amphipathic regions, surface forming regions, and high antigenic index regions (i.e., containing four or more contiguous amino acids having an antigenic index of greater than or equal to 1.5, as identified using the default parameters of the Jameson-Wolf program) of polypeptides of the invention (e.g., the polypeptides or polymerases of SEQ ID NOS:14-25). Certain preferred regions include, but are not limited to, regions of the aforementioned types identified by analysis of the amino acid sequence depicted in SEQ ID NOS:14-25, such preferred regions include; Garnier-Robson predicted alpha-regions, beta-regions, turn-regions, and coil-regions; Chou-Fasman predicted alpha-regions, beta-regions, turn-regions, and coil-regions; Kyte-Doolittle predicted hydrophilic and hydrophobic regions; Eisenberg alpha and beta amphipathic regions; Emini surface-forming regions; and Jameson-Wolf high antigenic index regions, as predicted using the default parameters of these computer programs. These structural or functional attributes can be generated using the various modules and algorithms of the DNA*STAR program set on default parameters.

[0193] Among preferred polypeptide fragments of the invention in this regard are those that comprise regions of the polypeptides that combine several structural features, such as several of the features set out above or below.

[0194] In another embodiment, the polypeptide may comprise or consist of one or more polypeptide fragments (e.g., regions) such as a polypeptide fragment of the invention described herein. For a polypeptide comprising or consisting of the amino acid sequence of two or more fragments (e.g., regions), the fragments (e.g., regions) may be contiguous with one another. In one embodiment, the fragments (e.g., regions) are not contiguous with one another, i.e., they are separated by one or more amino acid residues.

[0195] Preferably, the fragments (e.g., regions) align with the corresponding regions of the full length polypeptide such that they are separated by the same number of amino acid residues as separate them in the full length polypeptide or the full length polymerase (e.g., the polypeptides of SEQ ID NOS:14-25 with or without the N-terminal amino acids encoded by the vectors, (or the polymerases encoded by the deposited clones), or alternatively, the polypeptides of SEQ ID NOS:27-34.

[0196] Polypeptide fragments of the invention may contain antigenic regions (i.e., regions to which an antibody will bind; epitopes) of the polypeptides of the invention. Antigenic regions may be as small as 6 amino acids.

[0197] Polypeptide fragments of the invention which function as antigenic epitopes may be produced by any conventional means. See, e.g., Houghten, R. A., Proc. Natl. Acad. Sci. USA 82:5131-5135 (1985) further described in U.S. Pat. No. 4,631,211.

[0198] As to the selection of fragments bearing an antigenic region, it is well known in that art that relatively short synthetic peptides that mimic part of a protein sequence are routinely capable of eliciting an antiserum that reacts with the partially mimicked protein. See, e.g., Sutcliffe, J. G., Shinnick, T. M., Green, N. and Learner, R. A., Science 219:660-666 (1983).

[0199] Polypeptide fragments of the invention capable of eliciting protein-reactive sera are frequently represented in the primary sequence of a protein, can be characterized by a set of simple chemical rules, and are confined neither to immunodominant regions of intact proteins (i.e., immunogenic epitopes) nor to the amino or carboxyl terminals. Peptides that are extremely hydrophobic and those of fewer than six residues generally are ineffective at inducing antibodies that bind to the mimicked protein; longer, peptides, especially those containing proline residues, usually are effective. Sutcliffe et al., supra, at 661. For instance, 18 of 20 peptides designed according to these guidelines, containing 8-39 residues covering 75% of the sequence of the influenza virus hemagglutinin HA1 polypeptide chain, induced antibodies that reacted with the HA1 protein or intact virus; and 12/12 peptides from the MuLV polymerase and 18/18 from the rabies glycoprotein induced antibodies that precipitated the respective proteins. Thus, the invention includes polypeptides comprising or consisting of fragments of the full length polypeptide or the full length polymerase (e.g., the polypeptides of SEQ ID NOS:14-25 with or without the N-terminal amino acids encoded by the vectors, (or the polymerases encoded by the deposited clones) which are at least 6, 10, 12, 14, 18, or 20 amino acids in length and have one or more of the following features: (1) is not extremely hydrophobic, and/or (2) contains one or more proline residues.

[0200] Antigenic fragments of the invention, and polypeptides comprising them, are therefore useful to raise antibodies, including monoclonal antibodies, that bind specifically to a polypeptide of the invention. Thus, a high proportion of hybridomas obtained by fusion of spleen cells from donors immunized with an antigen epitope-bearing peptide generally secrete antibody that binds the native protein. Sutcliffe et al., supra, at 663. The antibodies raised by antigenic fragments or polypeptides comprising them are useful to detect the polypeptides of the invention, and antibodies to different fragments may be used for tracking the fate of various regions of a protein precursor which undergoes post-translational processing. The fragments and anti-fragment antibodies may be used in a variety of qualitative or quantitative assays for the mimicked protein, for instance in competition assays since it has been shown that even short peptides (e.g. about 9 amino acids) can bind and displace the larger peptides in immunoprecipitation assays. See, for instance, Wilson et al., Cell 37:767-778 (1984) at 777. The antibodies of the invention also are useful for purification of the polypeptides of the invention, for instance, by adsorption chromatography using methods well known in the art.

[0201] Antigenic fragments and polypeptides of the invention designed according to the above guidelines preferably contain a sequence of at least seven, more preferably at least nine and most preferably between about 15 to about 30 amino acids contained within the amino acid sequence of a polypeptide of the invention. However, fragments and polypeptides comprising, or alternatively consisting of, a larger portion such as about 30 to about 50 amino acids, or any length up to and including the entire amino acid sequence of a polypeptide of the invention, also are considered antigenic fragments or polypeptides of the invention and also are useful for inducing antibodies that react with the full length polypeptide. Preferably, the amino acid sequence of the antigenic fragment is selected to provide substantial solubility in aqueous solvents (i.e., the sequence includes relatively hydrophilic residues and highly hydrophobic sequences are preferably avoided); and sequences containing proline residues are particularly preferred.

[0202] In the present invention, antigenic fragments preferably contain a sequence of at least 4, at least 5, at least 6, at least 7, more preferably at least 8, at least 9, at least 10, at least 11, at least 12, at least 13, at least 14, at least 15, at least 20, at least 25, at least 30, at least 40, at least 50, and, most preferably, between about 15 to about 30 amino acids. Preferred polypeptides comprising antigenic fragments are at least 10, 15, 20, 25, 30, 35, 40, 45, 50, 55, 60, 65, 70, 75, 80, 85, 90, 95, or 100 amino acid residues in length. Additional non-exclusive preferred antigenic fragments include the fragments disclosed herein, as well as portions thereof. Antigenic fragments are useful, for example, to raise antibodies, including monoclonal antibodies, that specifically bind the epitope. Preferred antigenic fragments include the fragments disclosed herein, as well as any combination of two, three, four, five or more of these fragments. Antigenic fragments can be used as the target molecules in immunoassays. (See, for instance, Wilson et al., Cell 37:767-778 (1984); Sutcliffe et al., Science 219:660-666 (1983)).

[0203] Similarly, antigenic fragments can be used, for example, to induce antibodies according to methods well known in the art. (See, for instance, Sutcliffe et al., supra; Wilson et al., supra; Chow et al., Proc. Natl. Acad. Sci. USA 82:910-914; and Bittle et al., J. Gen. Virol. 66:2347-2354 (1985). The polypeptides comprising, or alternatively consisting of, one or more antigenic fragments may be presented for eliciting an antibody response together with a carrier protein, such as an albumin, to an animal system (such as rabbit or mouse), or, if the polypeptide is of sufficient length (at least about 25 amino acids), the polypeptide may be presented without a carrier. However, antigenic fragments comprising as few as 8 to 10 amino acids have been shown to be sufficient to raise antibodies capable of binding to, at the very least, linear epitopes in a denatured polypeptide (e.g., in Western blotting).

[0204] Polypeptides of the invention may comprise or consist of variants of the full length polypeptide or the full length polymerase (e.g., the polypeptides of SEQ ID NOS:14-25 with or without the N-terminal amino acids encoded by the vectors), variants of the polypeptides encoded by the deposited clones, and variants of the fragments described above. Variants include polypeptides which are at least 80%, 81%, 82%, 83%, 84%, 85%, 86%, 87%, 88%, 89%, 90%, 91%, 92%, 93%, 94%, 95% 96%, 97%, 98%, or 99% identical to a polypeptide encoded by a deposited clone, to a polypeptide or polymerase of SEQ ID NOS:14-25, or to a fragment described above.

[0205] Thus, the invention includes, in part, polypeptides which are at least 80%, 81%, 82%, 83%, 84%, 85%, 86%, 87%, 88%, 89%, 90%, 91%, 92%, 93%, 94%, 95% 96%, 97%, 98%, or 99% identical to (1) a polypeptide encoded by a deposited clone described herein, (2) to a polypeptide or polymerase having an amino acid sequence set out in SEQ ID NOS:14-25, or (3) to a subportion of one of these polypeptides or polymerases (e.g., amino acids 125-333, 156-392, or 450-771 of a polypeptide or polymerase having an amino acid sequence set out in SEQ ID NO:14). The invention further includes nucleic acid molecules which encode these polypeptides, as well as host cells which contain such nucleic acid molecules. The invention also includes compositions and mixtures (e.g., reaction mixtures) which contain one or more polypeptides and/or polynucleotides of the invention.

[0206] In many instances, the above described polypeptides, as well as other polypeptides of the invention, will have one or more activity associated with a polypeptide encoded by a deposited clone described herein or a polypeptide or polymerase having an amino acid sequence set out in SEQ ID NOS:14-25.

[0207] It will be recognized in the art that some amino acid sequences of the polypeptides of the invention can be varied without significant affect on the structure or function of the protein. If such differences in sequence are contemplated, it should be remembered that there may be critical areas on the protein which determine activity. In general, it is possible to replace residues which form the tertiary structure, provided that residues performing a similar structural or enzymatic function are used. In other instances, the type of residue may be completely unimportant if the alteration occurs at a non-critical region of the protein.

[0208] Thus, the invention includes variants which may show a functional activity. Preferably, the variants demonstrate a functional activity such as antigenicity or an enzymatic activity described above (e.g., a DNA polymerase activity such as DNA-dependent DNA polymerase activity and/or reverse transriptase activity).

[0209] The functional activity of polypeptides of the invention can be assayed by various methods. For example, in one embodiment where one is assaying for antigenicity, various immunoassays known in the art can be used, including but not limited to, competitive and non-competitive assay systems using techniques such as radioimmunoassays, ELISA (enzyme linked immunosorbent assay), “sandwich” immunoassays, immunoradiometric assays, gel diffusion precipitation reactions, immunodiffusion assays, in situ immunoassays (using colloidal gold, enzyme or radioisotope labels, for example), western blots, precipitation reactions, agglutination assays (e.g., gel agglutination assays, hemagglutination assays), complement fixation assays, immunofluorescence assays, protein A assays, and immunoelectrophoresis assays, etc. In one embodiment, antibody binding is detected by detecting a label on the primary antibody. In another embodiment, the primary antibody is detected by detecting binding of a secondary antibody or reagent to the primary antibody. In a further embodiment, the secondary antibody is labeled. Many means are known in the art for detecting binding in an immunoassay and are within the scope of the present invention.

[0210] In addition, assays described herein and otherwise known in the art may routinely be applied to measure the ability of variants to elicit an enzymatic activity.

[0211] Variants include deletions, insertions, inversions, repeats, and substitutions (e.g., conservative substitutions, non-conservative substitutions, type substitutions (for example, substituting one hydrophilic residue for another hydrophilic residue, but not a strongly hydrophilic for a strongly hydrophobic, as a rule), primary shifts, primary transpositions, secondary transpositions, and coordinated replacements).

[0212] More than one amino acid (e.g., 2, 3, 4, 5, 6, 7, 8, 9, 10, etc.) can be deleted or inserted or can be substituted with another amino acid as described above (either conservative or nonconservative). The deletion, insertion, or substitution can occur in the full length, mature, or proprotein form of the polypeptide, as well as in the fragments described above.

[0213] Variants may contain at least one amino acid substitution, deletion or insertion but not more than 50 (e.g., 15, 18, 20, 30, 35, 40, etc.) amino acid substitutions, deletions or insertions, even more preferably, not more than 40 amino acid substitutions, deletions or insertions, still more preferably, not more than 30 amino acid substitutions, deletions or insertions, and still even more preferably, not more than 20 amino acid substitutions, deletions or insertions. Of course, in order of increasing preference, it is preferable for a variant to contain at least one, but not more than 10, 9, 8, 7, 6, 5, 4, 3, 2 or 1 amino acid substitutions, deletions or insertions. In specific embodiments, the number of additions, substitutions, and/or deletions in the polypeptide (e.g., the full length form and/or fragments described herein), is 1-5, 5-10, 5-25, 5-50, 10-50 or 50-150. Conservative amino acid substitutions are preferable in some embodiments.

[0214] Of course, the number of amino acid substitutions a skilled artisan would make depends on many factors, including those described above and below.

[0215] Typically seen as conservative substitutions are the replacements, one for another, among the aliphatic amino acids Ala, Val, Leu and Ile; interchange of the hydroxyl residues Ser and Thr, exchange of the acidic residues Asp and Glu, substitution between the amide residues Asn and Gln, exchange of the basic residues Lys and Arg and replacements among the aromatic residues Phe, Tyr. (See Table 41).

[0216] Of additional special interest are also substitutions of charged amino acids with another charged amino acid or with neutral amino acids. This may result in proteins with improved characteristics such as less aggregation. Prevention of aggregation is highly desirable. Aggregation of proteins can result in a reduced activity.

[0217] Guidance concerning how to make phenotypically silent amino acid substitutions is provided in Bowie, J. U. et al., wherein the authors indicate that there are two main strategies for studying the tolerance of an amino acid sequence to change. Bowie, J. U. et al., “Deciphering the Message in Protein Sequences: Tolerance to Amino Acid Substitutions,” Science 247:1306-1310 (1990)

[0218] The first strategy exploits the tolerance of amino acid substitutions by natural selection during the process of evolution. By comparing amino acid sequences in different species, conserved amino acids can be identified. These conserved amino acids are likely important for protein function. In contrast, the amino acid positions where substitutions have been tolerated by natural selection indicates that these positions are not critical for protein function. Thus, positions tolerating amino acid substitution could be modified while still maintaining biological activity of the protein.

[0219] The second strategy uses genetic engineering to introduce amino acid changes at specific positions of a cloned gene to identify regions critical for protein function. For example, site directed mutagenesis or alanine-scanning mutagenesis (introduction of single alanine mutations at every residue in the molecule) can be used. (Cunningham and Wells, Science 244:1081-1085 (1989).) The resulting mutant molecules can then be tested for functional activity.

[0220] As the authors state, these two strategies have revealed that proteins are surprisingly tolerant of amino acid substitutions. The authors further indicate which amino acid changes are likely to be permissive at certain amino acid positions in the protein. For example, most buried (within the tertiary structure of the protein) amino acid residues require nonpolar side chains, whereas few features of surface side chains are generally conserved.

[0221] Moreover, tolerated conservative amino acid substitutions involve replacement of the aliphatic or hydrophobic amino acids Ala, Val, Leu and Ile; replacement of the hydroxyl residues Ser and Thr; replacement of the acidic residues Asp and Glu; replacement of the amide residues Asn and Gln, replacement of the basic residues Lys, Arg, and His; replacement of the aromatic residues Phe, Tyr, and Trp, and replacement of the small-sized amino acids Ala, Ser, Thr, Met, and Gly.

[0222] Thus, residues important for a particular functional activity (e.g., enzymatic, antigenic or immunogenic activity) may be identified by mutagenesis strategies designed to locally perturb the protein. In alanine scanning mutagenesis, all non-alanine residues of the protein (or of a region of the protein suspected to contain the binding site are replaced, one-by-one, with alanine, yielding a collection of single substitution mutants. Alanine is used because (1) it is the most common amino acid residue in proteins, (2) it has a small side chain, and therefore is not likely to sterically hinder other residues, and (3) its side chain does not form H-bonds, but is not especially hydrophobic. Cunningham and Wells (1989) conducted an Ala scanning mutagenesis study of residues 2-19, 54-74, and 167-191 in hGH. A total of 62 Ala mutations were produced. Of these, fourteen mutants destabilized the protein, eleven mutants seemingly enhanced activity. Of the remaining 37 mutants, only four impaired binding by 10-fold or more, and only nine by 5-fold or more. See generally WO90/04788.

[0223] For other uses of Ala-scan mutagenesis, see Yu et al (1995) (complete scan of a single disulfide derivative of the 58-residue protein BPTI); Allen et al (1987) (Ala-scan of residues 52-61 of hen egg white lysozyme); Ruf et al (1994) (Ala-scan of residues other than Gly, Pro and Cys; multiple Ala mutants examined first, then single Ala mutants); Williams et al (1995) (Ala-scan in insulin receptor of (1) charged amino acids, (2) aromatic residues, and (3) residues adjacent to (1) or (2), other than prolines, cysteines, or potential N-linked glycosylation sites); Kelly et al (1993) (Ala-scan of antibody CDR). Ala-scanning mutagenesis may be applied to all residues of a protein, or to residues selected on some rational basis, such as amino acid type (e.g., charged and aromatic residues), degree of variability in a homologous protein family, or relevance to function as shown by homologue-scanning mutagenesis.

[0224] Preferably, further mutations (especially non-conservative mutations) are made at sites where an alanine substitution does not lead to a decrease in an activity of interest of more than 20-fold, more preferably, of more than 10-fold, even more preferably, of more than 5-fold, still more preferably, of more than 2-fold. Most preferably, mutations are made at sites at which an alanine substitution improves activity.

[0225] Preferably, when multiple mutations are made, the expected (additive) effect of the mutations is one which does not lead to a decrease in activity of more than 10-fold, more preferably, of more than 5 fold, still more preferably, of more than two fold. Most preferably, the expected effect is to improve activity. The expected effect of a conservative substitution is the effect of that mutation as a single substitution if known, or otherwise neutral. The expected effect of a non-conservative substitution is the effect of that mutation as a single substitution if known, or otherwise the effect of a single substitution of a different residue of the same exchange group as the actual replacement residue, if known, or otherwise the effect of a single Ala substitution.

[0226] Another approach is homologue-scanning mutagenesis. This involves identifying a homologue which can be distinguished in an activity assay from the protein of interest, and screening mutants in which a segment of the protein of interest is replaced by corresponding segments of the homologue (or vice versa). Proteins that may be used as homologues include previously identified polymerases such as those encoded in SEQ ID NOS 27-34 or otherwise known in the art. If the replacement alters the activity of the modified protein, the segment in question presumably contributes to the observed difference in activity between the protein of interest and the homologous protein, and comparison of the interchanged segments helps to explain the character of the binding site involved in that activity. For example, segments of prolactin, which does not bind the GH receptor, have been used to replace segments of growth hormone, which does. If a substitution disrupts GH binding, it implies that the replaced segment was part of the GH receptor binding site, and one may then focus on how the replaced and replacing segments differ. (See WO90/04788).

[0227] If a residue is determined to be a part of the enzymatic or binding site, one may prepare all possible single substitution mutants of that site.

[0228] It is possible to incorporate two or more tolerable mutations into a protein. Generally speaking, as a first approximation, it is reasonable to assume that the effect of two or more mutations will be additive in nature.

[0229] Non-additive effects are more likely to occur between residues that are in Van der Waals contact with each other. See Sandberg and Terwilliger (1993). According to Schreiber and Fersht (1995), non-additive effects are more likely to occur between residues less than 7 Angstroms apart (10 Angstroms in the case of charged residues). The effect of a second mutation on a first one may be synergistic, additive, partially additive, neutral, antagonistic, or suppressive. Long range but low magnitude departures from additivity may occur reasonably often, see LiCata and Ackers (1995), but do not significantly impair the value of multiple mutation in protein engineering.

[0230] Gregoret et al (1993) assumed that, under selective conditions, the frequency of occurrence of a mutation in an active mutant was an indication of whether the mutant conferred resistance, and found that an additive model (multiplying the mutational frequencies of a pair of single Ala substitution mutants) was about 90% effective in predicting the activity class of a binomial (multiple Ala substitution) mutant.

[0231] The most common reason for combining mutations is to benefit from their additive or synergistic effect in combination. For example, if a mutation has both favorable and unfavorable activities, it may be possible to combine it with a second mutation that neutralizes the unfavorable activity of the first mutation.

[0232] One use of multiple mutations is to achieve, by combining mutations which individually have a small but favorable effect on activity, a mutant with a more substantial improvement in activity. It is not necessary that the mutations be strictly additive; it is sufficient that they be at least partially additive for the combination to be advantageous.

[0233] The interactivity of two residues is generally determined by preparing both single substitution mutants as well as a double substitution mutant, and determining whether the effects are additive or not. Therefore, if single Ala substitutions have been shown to favorably or unfavorably affect activity, one may prepare a double Ala mutant and compare its activity to that of the single substitution mutants. While it is certainly possible that two mutations which, by themselves, do not affect activity, may do so when combined, this is unlikely, especially if the sites are not close together.

[0234] One could prepare all possible double Ala mutants, which would mean preparing N(N−1) mutants, where N was the number of non-Ala residues in the protein. In general, it is preferable to limit the double substitution studies to sites known to favorably affect the activity. Possibly, one would also consider sites which were strongly unfavorable (to look for antagonistic interactions).

[0235] Another approach is binomial Ala-scanning mutagenesis. Here, one constructs a library in which, at each position of interest of a given protein molecule, the residue is randomly either the native residue, or Ala. See Gregoret and Sauer (1993). It is feasible to screen a library of 10¹⁰ mutants, so the combined effects of up to 30 different Ala substitutions (about 2²⁷ to about 10¹⁰) can be studied in one experiment. It should be noted that the Ala:non-Ala ratio at each position may be, but need not be equal.

[0236] If the protein is too large for all sites of interest to be sampled by binomial Ala-scanning mutagenesis in a single experiment, one may divide the protein into segments and subject each segment in turn to such mutagenesis, and then, as a cross-check, similarly mutate one residue from each segment.

[0237] Even when mutations are not additive in effect, this is may be desirable. Green and Shortle, (1993) reported that mutations which individually reduced stability, when not additive in their effects, were almost exclusively sub-additive, i.e., the reduction in stability was less than that expected by summing the individual destabilizations. This is credited to an overlap of the “spheres of perturbation” surrounding the two mutations. Ballinger et al (1995) reported that a combination subtilisin BPN' mutant had a larger than additive shift in specificity toward dibasic substrates, which is a desirable change.

[0238] Certain multiple mutations are worthy of special comment, as follows.

[0239] Primary shifts: In a primary shift the residue at position n becomes the replacement amino acid at position n+s, or vice versa. For example, instead of Cys at 30, one might have Cys at 31. The result is a mere displacement, rather than a loss, of the amino acid in question. In a primary shift, s (the shift distance) is most often equal to one, but may be two, three or more. The greater the value of s, the more the shift resembles an ordinary double mutation.

[0240] Primary transpositions: In a primary transposition, the residues at positions n and n+s in the primary amino acid sequence are swapped. Such swaps are less likely to perturb the protein than the individual replacements, examined singly, might suggests. A primary transposition is, in effect, a combination of two complementary shifts.

[0241] Secondary Transposition: Here, two amino acids which interact as a result of the folding of the protein are swapped. A classic example would be members of a salt bridge. If there is an Asp in one segment forming a salt bridge with a Lys in another segment, the Asp and Lys can be swapped, and a salt bridge can still form.

[0242] Coordinated Replacement: Here, replacement of residue x is coordinated with replacement of residue y. Thus, replacement of one Cys may be coordinated with replacement of a second Cys with which it otherwise forms a disulfide bond, and if one amino acid of a pair forming a salt bridge is replaced by an uncharged a.a., the other may likewise be replaced.

[0243] Primary shifts, primary transpositions, secondary transpositions and coordinated replacements are more likely to be tolerated than other multiple mutations involving the same individual amino acid changes.

[0244] Examples of production of amino acid substitutions in proteins which can be used for obtaining variants of the present invention include any known method steps, such as presented in U.S. Pat. No. RE 33,653, U.S. Pat. Nos. 4,959,314, 4,588,585 and 4,737,462, to Mark et al; U.S. Pat. No. 5,116,943 to Koths et al, U.S. Pat. No. 4,965,195 to Namen et al; U.S. Pat. No. 4,879,111 to Chong et al; and U.S. Pat. No. 5,017,691 to Lee et al; and lysine substituted proteins presented in U.S. Pat. No. 4,904,584 (Shaw et al).

[0245] Polypeptides of the invention may be altered by being subjected to random mutagenesis by error-prone PCR, random nucleotide insertion or other methods prior to recombination. Polypeptides of the invention may be produced by DNA shuffling, gene-shuffling, motif-shuffling, exon-shuffling, and/or codon-shuffling (collectively referred to as “DNA shuffling”). DNA shuffling involves the assembly of two or more DNA segments by homologous or site-specific recombination to generate variation in the polynucleotide sequence. DNA shuffling may be employed to modulate the activities of polypeptides of the invention, such methods can be used to generate polypeptides with altered activity. See, generally, U.S. Pat. Nos. 5,605,793; 5,811,238; 5,830,721; 5,834,252; 5,837,458; and 6,444,468; and Patten et al., Curr. Opinion Biotechnol. 8:724-33 (1997); Harayama, Trends Biotechnol. 16(2):76-82 (1998); Hansson, et al., J. Mol. Biol. 287:265-76 (1999); and Lorenzo and Blasco, Biotechniques 24(2):308-13 (1998). Thus, one or more components, motifs, sections, parts, domains, fragments, etc., of a polypeptide of the invention may be joined to one or more components, motifs, sections, parts, domains, fragments, etc. of one or more heterologous molecules, preferably the polymerases in SEQ ID NOS:27-34 and/or of SEQ ID NOS:14-25.

[0246] Polypeptides comprising fragments, mutants, variants, or full length polypeptides of the invention may be “free-standing,” or comprised within a larger polypeptide of which the fragment, mutant, variant, or full length polypeptide forms a part or region.

[0247] Thus, the polypeptides may include one or more additional amino acids and/or one or more heterologous sequences such as those described herein. For instance, a methionine residue may be added to the N-terminus of the polypeptide to allow for recombinant expression. Also, a sequence of additional amino acids, particularly charged amino acids, may be added to the N-terminus of the polypeptide to improve stability and persistence, in the host cell, during purification, or during subsequent handling and storage. Also, peptide moieties may be added to the polypeptide to facilitate purification. Such regions may be removed prior to final preparation of the polypeptide. The addition of peptide moieties to polypeptides to engender secretion or excretion, to improve stability and to facilitate purification, among others, are familiar and routine techniques in the art. A preferred fusion protein comprises a heterologous region from immunoglobulin that is useful to solubilize proteins. For example, EP-A-0 464 533 (Canadian counterpart 2045869) discloses fusion proteins comprising various portions of constant region of immunoglobin molecules together with another protein or part thereof. For some uses it would be desirable to be able to remove the Fc part after the fusion protein has been expressed, detected and purified in the advantageous manner described. This is the case when Fc portion proves to be a hindrance, for example when the fusion protein is to be used as an immunogen for raising antibodies. In drug discovery, for example, human proteins, such as hIL5-receptor, have been fused with Fc portions for the purpose of high-throughput screening assays to identify antagonists of hIL-5. See, D. Bennett et al., Journal of Molecular Recognition, Vol. 8:52-58 (1995) and K. Johanson et al., The Journal of Biological Chemistry, Vol. 270, No. 16:9459-9471 (1995).

[0248] Thus, the polypeptides may be in the form of the secreted protein, including a mature form, or may be a part of a larger protein, such as a fusion protein. It is often advantageous to include an additional amino acid(s), preferably a sequence which contains secretory or leader sequences, pro-sequences, sequences which aid in purification, such as multiple histidine residues, or an additional sequence for stability during recombinant production.

[0249] The polypeptides may be (i) one in which one or more of the amino acid residues are substituted with a conserved or non-conserved amino acid residue (preferably a conserved amino acid residue) and such substituted amino acid residue may or may not be one encoded by the genetic code, or (ii) one in which one or more of the amino acid residues includes a substituent group, or (iii) one which is fused with another compound, such as polyethylene glycol, or (iv) one which is fused to a heterologous sequence such as additional amino acids which aid in purification or which enhance processivity. Such polypeptides are deemed to be within the scope of those skilled in the art from the teachings herein.

[0250] Preferably, the polypeptides of the invention, including mutants, fragments and variants, demonstrate a functional activity such as an enzymatic activity described above (e.g., a DNA polymerase activity such as DNA-dependent DNA polymerase activity and/or reverse transriptase activity) or antigenicity.

[0251] The functional activity of polypeptides of the invention can be assayed by various methods. For example, in one embodiment where one is assaying for antigenicity, various immunoassays known in the art can be used, including but not limited to, competitive and non-competitive assay systems using techniques such as radioimmunoassays, ELISA (enzyme linked immunosorbent assay), “sandwich” immunoassays, immunoradiometric assays, gel diffusion precipitation reactions, immunodiffusion assays, in situ immunoassays (using colloidal gold, enzyme or radioisotope labels, for example), western blots, precipitation reactions, agglutination assays (e.g., gel agglutination assays, hemagglutination assays), complement fixation assays, immunofluorescence assays, protein A assays, and immunoelectrophoresis assays, etc. In one embodiment, antibody binding is detected by detecting a label on the primary antibody. In another embodiment, the primary antibody is detected by detecting binding of a secondary antibody or reagent to the primary antibody. In a further embodiment, the secondary antibody is labeled. Many means are known in the art for detecting binding in an immunoassay and are within the scope of the present invention.

[0252] In addition, assays described herein and otherwise known in the art may routinely be applied to measure the ability of polypeptides of the invention to elicit an enzymatic activity.

[0253] In some embodiments, the present invention provides polypeptides expressed from clones containing sequences encoding the polypeptides. The polypeptides may be expressed as native polypeptides, i.e., without any modifications to the primary sequence. Polypeptides may also be expressed as fusion proteins (e.g., N-terminal and/or C-terminal) and/or may be post-translationally modified (e.g., glycosylated, etc.).

[0254] In some embodiments, the polypeptides expressed from nucleic acids of the present invention may be modified to contain a tag (e.g., an affinity tag) in order to facilitate the purification of the polypeptide. Suitable tags are well known to those skilled in the art and include, but are not limited to, repeated sequences of amino acids such as six histidines, epitopes such as the hemagglutinin epitope, the V5 epitope, and the myc epitope, and other amino acid sequences that permit the simplified purification of the polypeptide. For example, the vectors used to clone the polyps of the invention contain the amino acid sequence of the PelB leader, which directs periplasmic localization of polypeptides. The present invention also contemplates polypeptides that do not contain a tag sequence. The sequences in SEQ ID NOS:14-25, which include a tag sequence, may be used to construct vectors expressing un-tagged versions of the polypeptides. The present invention also encompasses these un-tagged proteins and the nucleic acid that encode them.

[0255] The invention further relates to fusion proteins comprising (1) a polypeptide, or fragment thereof, having one or more desired characteristics and/or activities and (2) a tag (e.g., an affinity tag), as well as nucleic acid molecules that encode such fusion proteins. In particular embodiments, the invention includes a polypeptide described herein having one or more (e.g., one, two, three, four, five, six, seven, eight, etc.) tags. These tags may be located, for example, (1) at the N-terminus, (2) at the C-terminus, or (3) at both the N-terminus and C-terminus of the protein, or a fragment thereof having one or more desired characteristic and/or activity. A tag may also be located internally (e.g., between regions of amino acid sequence of a polypeptide of the invention).

[0256] Tags used in the invention may vary in length but will typically be from about 5 to about 100, from about 10 to about 100, from about 15 to about 100, from about 20 to about 100, from about 25 to about 100, from about 30 to about 100 from about 35 to about 100, from about 40 to about 100, from about 45 to about 100, from about 50 to about 100, from about 55 to about 100, from about 60 to about 100, from about 65 to about 100, from about 70 to about 100, from about 75 to about 100, from about 80 to about 100, from about 85 to about 100, from about 90 to about 100, from about 95 to about 100, from about 5 to about 80, from about 10 to about 80, from about 20 to about 80, from about 30 to about 80, from about 40 to about 80, from about 50 to about 80, from about 60 to about 80, from about 70 to about 80, from about 5 to about 60, from about 10 to about 60, from about 20 to about 60, from about 30 to about 60, from about 40 to about 60, from about 50 to about 60, from about 5 to about 40, from about 10 to about 40, from about 20 to about 40, from about 30 to about 40, from about 5 to about 30, from about 10 to about 30, from about 20 to about 30, from about 5 to about 25, from about 10 to about 25, or from about 15 to about 25 amino acid residues in length.

[0257] Tags used in the practice of the invention may serve any number of purposes. For example, such tags may (1) contribute to protein-protein interactions both internally within a protein (e.g., between a tag sequence and a polypeptide sequence to which the tag has been attached) and with other protein molecules, (2) make the polypeptide amenable to particular purification methods (e.g., affinity purification), (3) enable one to identify whether the polypeptide is present in a composition (e.g. ELISA, Western blot, etc.), and/or (4) stabilize or destabilize intra-protein interactions with the protein to which the tag has been added (e.g., increase or decrease thermostability of the protein).

[0258] Examples of tags which may be used in the practice of the invention include metal binding domains (e.g., a poly-histidine segments such as a three, four, five, six, or seven histidine region), immunoglobulin binding domains (e.g., (1) Protein A; (2) Protein G; (3) T cell, B cell, and/or Fc receptors; and/or (4) complement protein antibody-binding domain); sugar binding domains (e.g., a maltose binding domain); and detectable domains (e.g., at least a portion of .beta.-galactosidase). Fusion proteins may contain one or more tags such as those described above. Typically, fusion proteins that contain more than one tag will contain these tags at one terminus or both termini (i.e., the N-terminus and the C-terminus) of the polypeptide, although one or more tags may be located internally in addition to those present at the termini. Further, more than one tag may be present at one terminus, internally and/or at both termini of the polypeptide. For example, three consecutive tags could be linked end-to-end at the N-terminus of the polypeptide. The invention further includes compositions and reaction mixture that contain the above fusion proteins, as well as methods for preparing these fusion proteins, nucleic acid molecules (e.g., vectors) which encode these fusion proteins and recombinant host cells that contain these nucleic acid molecules. The invention also includes methods for using these fusion proteins as described elsewhere herein.

[0259] Tags that enable one to identify whether the fusion protein is present in a composition include, for example, tags that can be used to identify the protein in an electrophoretic gel. A number of such tags are known in the art and include epitopes and antibody binding domains, which can be used for Western blots.

[0260] In some embodiments, it may be desirable to remove all or a portion of a tag sequence from a fusion protein comprising a tag sequence and a polypeptide of the invention. In embodiments of this type, one or more amino acids forming a cleavage site, e.g., for a protease enzyme, may be incorporated into the primary sequence of the fusion protein. The cleavage site may be located such that cleavage at the site may remove all or a portion of the tag sequence from the fusion protein. In some embodiments, the cleavage site may be located between the tag sequence and the sequence of the polypeptide such that all of the tag sequence is removed by cleavage with a protease enzyme that recognizes the cleavage site. Examples of suitable cleavage sites include, but are not limited to, the Factor Xa cleavage site having the sequence Ile-Glu-Gly-Arg (SEQ ID NO:35), which is recognized and cleaved by blood coagulation factor Xa, and the thrombin cleavage site having the sequence Leu-Val-Pro-Arg (SEQ ID NO:36), which is recognized and cleaved by thrombin. Other suitable cleavage sites are known to those skilled in the art and may be used in conjunction with the present invention.

### 2. Nucleic Acid Molecules of the Invention

[0261] This invention also relates to nucleic acids that encode or are complementary a nucleic acid encoding a polypeptide of the invention. These nucleic acids can then be used to produce the polypeptide in recombinant cell culture. In still other aspects, the invention provides an isolated nucleic acid molecule encoding polypeptide of the invention, either labeled or unlabeled, or a nucleic acid sequence that is complementary to, or hybridizes under stringent conditions to, a nucleic acid sequence encoding a polypeptide of the invention.

[0262] Using the information provided herein, such as all or a portion of the nucleotide sequences in any one of SEQ ID NOS:2-13, a nucleic acid molecule of the present invention encoding a polypeptide of the invention may be obtained using standard cloning and screening procedures, such as those for cloning cDNAs using mRNA as starting material and/or those for screening a genomic library.

[0263] Nucleic acid molecules of the present invention may be in the form of RNA, such as mRNA, or in the form of DNA, including, for instance, cDNA and genomic DNA obtained by cloning or produced synthetically. The DNA may be double-stranded or single-stranded. Single-stranded DNA or RNA may be the coding strand, also known as the sense strand, or it may be the non-coding strand, also referred to as the anti-sense strand.

[0264] By “isolated” nucleic acid molecule(s) is intended a nucleic acid molecule, DNA or RNA, which has been removed from its native environment. For example, recombinant DNA molecules contained in vectors are considered isolated for the purposes of the present invention. Further examples of isolated DNA molecules include recombinant DNA molecules maintained in heterologous host cells or purified (partially or substantially) DNA molecules in solution. Isolated RNA molecules include in vivo or in vitro RNA transcripts of the DNA molecules of the present invention. Isolated nucleic acid molecules according to the present invention further include such molecules produced synthetically.

[0265] Isolated nucleic acid molecules of the present invention include DNA molecules comprising all or a portion of an open reading frame (ORF) shown in one or more of SEQ ID NOs: 14-25.

[0266] The present invention is further directed to fragments of the isolated nucleic acid molecules described herein. Preferred nucleic acid fragments of the present invention include nucleic acid molecules encoding one or more portions (e.g., domains) of a polypeptide of the invention having one or more activities (e.g., enzymatic activities such as enzymatic activities discussed herein). In particular, such nucleic acid fragments of the present invention include nucleic acid molecules encoding polypeptides having RNA-dependent DNA polymerase activity.

[0267] In another aspect, the invention provides an isolated nucleic acid molecule comprising a polynucleotide that hybridizes under stringent hybridization conditions to all or a portion of a polynucleotide encoding a polypeptide of the invention. By a polynucleotide which hybridizes to a “portion” of a polynucleotide is intended a polynucleotide (either DNA or RNA) hybridizing to at least about 15 nucleotides (nt), and more preferably at least about 20 nt, still more preferably at least about 30 nt, and even more preferably about 30-70 nt of a reference polynucleotide (e.g., one or more of SEQ ID NOS: 2-13). Preferably, a polynucleotide that hybridizes under stringent hybridization conditions to all or a portion of a reference sequence encodes a polypeptide having one or more enzymatic activities such as an enzymatic activity discussed herein (e.g., an RNA-dependent DNA polymerase activity).

[0268] Nucleic acid molecules of the present invention that encode a polypeptide of the invention may include, but are not limited to, those encoding the amino acid sequence of the polypeptide, by itself; the coding sequence for the polypeptide and additional sequences, such as those encoding a leader or secretory sequence, such as a pre-, or pro- or prepro-protein sequence; the coding sequence of the polypeptide, with or without the aforementioned additional coding sequences, together with additional, non-coding sequences, including for example, but not limited to non-coding 5′ and 3′ sequences, such as the transcribed, non-translated sequences that play a role in transcription, mRNA processing, including splicing and polyadenylation signals, for example—ribosome binding and stability of mRNA. Nucleic acid molecules of the invention include those encoding a polypeptide of the invention and comprising at least one additional coding sequences that codes for one or more of the tag sequences discussed above.

[0269] The present invention further relates to variants of the nucleic acid molecules of the present invention that encode portions, analogs or derivatives of the polypeptides of the invention. Variants may occur naturally, such as a natural allelic variant. By an “allelic variant” is intended one of several alternate forms of a gene occupying a given locus on a chromosome of an organism. Genes II, Lewin, B., ed., John Wiley & Sons, New York (1985).

[0270] Non-naturally occurring variants may be produced using art-known mutagenesis techniques. Such variants include those produced by nucleotide substitutions, deletions or additions which may involve one or more nucleotides. The variants may be altered in coding regions, non-coding regions, or both. Alterations in the coding regions may produce conservative or non-conservative amino acid substitutions, deletions or additions.

[0271] Further embodiments of the invention include isolated nucleic acid molecules comprising a polynucleotide having a nucleotide sequence at least 90% identical, and more preferably at least 95%, 96%, 97%, 98% or 99% identical to (a) a nucleotide sequence encoding a polypeptide having all or a portion of the amino acid sequence in any one of SEQ ID NOS:14-25 and (b) a nucleotide sequence complementary to any of the nucleotide sequences in (a).

[0272] Polynucleotides of the invention include, but are not limited to, polynucleotides comprising, or alternatively consisting of, a nucleic acid encoding a polypeptide of SEQ ID NOS:14-25, polynucleotides comprising, or alternatively consisting of, a nucleotide sequence of SEQ ID NOS: 2-13, polynucleotides comprising, or alternatively consisting of, a nucleic acid encoding a polypeptide encoded by a nucleotide sequence of one of the deposited clones (NRRL Deposit Numbers NRRL B-30617, NRRL B-30618, NRRL B-30619, NRRL B-30620, NRRL B-30621, NRRL B-30622, NRRL B-30623, NRRL B-30624, NRRL B-30625, NRRL B-30626, NRRL B-30576, NRRL B-30577, NRRL B-30579, NRRL B-30578, NRRL B-30580), polynucleotides comprising, or alternatively consisting of, a nucleotide sequence of one of the deposited clones (NRRL Deposit Numbers NRRL B-30617, NRRL B-30618, NRRL B-30619, NRRL B-30620, NRRL B-30621, NRRL B-30622, NRRL B-30623, NRRL B-30624, NRRL B-30625, NRRL B-30626, NRRL B-30576, NRRL B-30577, NRRL B-30579, NRRL B-30578, NRRL B-30580), and/or mutants, fragments (e.g., portions), and variants thereof.

[0273] As described above, and further described below, polynucleotides of the invention also include, but are not limited to, polynucleotides comprising, or alternatively consisting of, nucleic acids encoding a mutant polymerases which comprise one or more substitutions corresponding to an amino acid residue of an amino acid sequence of SEQ ID NOS:14-25, polynucleotides comprising, or alternatively consisting of, nucleic acids which comprise one or more substitutions corresponding to a nucleotide sequence of SEQ ID NOS:2-13, polynucleotides comprising, or alternatively consisting of, nucleic acids encoding mutant polymerases which comprise one or more substitutions corresponding to an amino acid residue of a polypeptide encoded by a nucleotide sequence of one of the deposited clones (NRRL Deposit Numbers NRRL B-30617, NRRL B-30618, NRRL B-30619, NRRL B-30620, NRRL B-30621, NRRL B-30622, NRRL B-30623, NRRL B-30624, NRRL B-30625, NRRL B-30626, NRRL B-30576, NRRL B-30577, NRRL B-30579, NRRL B-30578, NRRL B-30580), polynucleotides comprising, or alternatively consisting of, nucleic acids which comprise one or more substitutions corresponding to a nucleotide sequence of one of the deposited clones (NRRL Deposit Numbers NRRL B-30617, NRRL B-30618, NRRL B-30619, NRRL B-30620, NRRL B-30621, NRRL B-30622, NRRL B-30623, NRRL B-30624, NRRL B-30625, NRRL B-30626, NRRL B-30576, NRRL B-30577, NRRL B-30579, NRRL B-30578, NRRL B-30580) and/or mutants, fragments (e.g., portions), and variants thereof.

[0274] SEQ ID NOS: 2-13 and the corresponding translated SEQ ID NOS:14-25 are sufficiently accurate and otherwise suitable for a variety of uses well known in the art and described further below. For instance, SEQ ID NOS:2-13 are useful for designing nucleic acid hybridization probes/primers that will detect and/or amplify nucleic acid sequences contained in SEQ ID NOS:2-13, respectively, or the DNAs contained in the respective deposited clone. These probes/primers will also hybridize to/amplify nucleic acid molecules in microbiological samples, thereby enabling detection of the respective organism from which SEQ ID NOS: 2-13 are derived. Similarly, polypeptides identified from SEQ ID NOS:14-25 may be used, for example, to generate antibodies which bind specifically to the polypeptides of the invention.

[0275] Nevertheless, DNA sequences generated by sequencing reactions can contain sequencing errors. The errors exist as misidentified nucleotides, or as insertions or deletions of nucleotides in the generated DNA sequence. The erroneously inserted or deleted nucleotides cause frame shifts in the reading frames of the predicted amino acid sequence. In these cases, the predicted amino acid sequence diverges from the actual amino acid sequence, even though the generated DNA sequence may be greater than 99.9% identical to the actual DNA sequence (for example, one base insertion or deletion in an open reading frame of over 1000 bases).

[0276] Accordingly, for those applications requiring precision in the nucleotide sequence or the amino acid sequence, the present invention provides not only the generated nucleotide sequence identified as SEQ ID NOS: 2-13 and the predicted corresponding translated amino acid sequences identified as SEQ ID NOS:14-25, but also a sample of plasmid DNA containing a DNA clone the polymerases of the invention deposited with the NRRL depository (see examples). The nucleotide sequence of the deposited clones can readily be determined by sequencing the deposited clones in accordance with known methods. The predicted amino acid sequences can then be verified from such deposits. Moreover, the amino acid sequence of the protein encoded by the deposited clone can also be directly determined by peptide sequencing or by expressing the protein in a suitable host cell containing the deposited DNA, collecting the protein, and determining its sequence.

[0277] The polynucleotides of the present invention may be in the form of RNA or in the form of DNA, which DNA includes cDNA, genomic DNA, and synthetic DNA. The DNA may be double-stranded or single-stranded, and if single stranded may be the coding strand or non-coding (anti-sense) strand.

[0278] Nucleic acids encoding a polypeptide of SEQ ID NOS:14-25 may substantially differ from the nucleotide sequences in SEQ ID NOS: 2-13 or in the deposited clones due to the degeneracy of the genetic code. Of course, the genetic code is well known in the art. Thus, it would be routine for one skilled in the art to generate the degenerate polynucleotides described above.

[0279] The present invention particularly relates to polynucleotides which hybridize under stringent conditions to the hereinabove-described polynucleotides. The polynucleotides which hybridize to the hereinabove described polynucleotides in a preferred embodiment encode polypeptides which retain substantially the same functional activity as the polypeptide encoded by the nucleotide sequence of SEQ ID NOS: 2-13 or the polymerases encoded by the deposited clones.

[0280] In another aspect, the invention provides an isolated nucleic acid molecule comprising, or alternatively consisting of, a polynucleotide which hybridizes under stringent hybridization conditions to a portion of the polynucleotide in a nucleic acid molecule of the invention described above.

[0281] Such hybridizing polynucleotides may not encode a polypeptide, and are still useful, for example, as probes or primers.

[0282] By a polynucleotide which hybridizes to a “portion” of a polynucleotide is intended a polynucleotide (either DNA or RNA) hybridizing to at least about 15 nucleotides (nt), and more preferably at least about 20 nt, still more preferably at least about 30 nt, and even more preferably about 30-70 nt of the reference polynucleotide. Also intended is a polynucleotide hybridizing to at least about 15 nucleotides (nt), and more preferably at least about 20 nt, more preferably at least about 25 nt, still more preferably at least about 30 nt, and even more preferably about 30-70 (e.g., 30, 35, 40, 45, 50, 55, 60, 65, and/or 70 (of course, fragment lengths in addition to those recited herein are also useful)) nt of the reference polynucleotide. Alternatively, the polynucleotide may have at least 20 bases, preferably 30 bases, and more preferably at least 50 bases which hybridize to a polynucleotide of the present invention, as hereinabove described, and which may or may not encode a polypeptide. Of course, larger fragments 50-500 nt, 500-1000 nt, 1000-1500 nt, 1500-2000 nt, 2000-2500 nt, 2500-3000 nt, 3000-3500 nt in length are also useful in the present invention (see below). For example, such polynucleotides may be employed as probes for the full length polynucleotides, for example, for recovery or detection of the polynucleotide or as a PCR primer.

[0283] Of course, polynucleotides hybridizing to a larger portion of the reference polynucleotide (e.g. the deposited cDNA clone) or even to the entire length of the reference polynucleotide, are also useful as probes according to the present invention, as are polynucleotides corresponding to most, if not all, of the nucleotide sequence of the deposited clone or the nucleotide sequence as shown in SEQ ID NOS: 2-13. By a portion of a polynucleotide of “at least 20 nt in length,” for example, is intended 20 or more contiguous nucleotides from the nucleotide sequence of the reference polynucleotide. As indicated, such portions are useful as a probe according to conventional DNA hybridization techniques or as primers for amplification of a target sequence by the polymerase chain reaction (PCR), as described herein.

[0284] Generating polynucleotides which hybridize to a portion of the nucleic acid molecules would be routine to the skilled artisan. For example, restriction endonuclease cleavage or shearing by sonication of a deposited clone could easily be used to generate DNA portions of various sizes which are polynucleotides that hybridize to a portion of the full length nucleic acid molecule. Alternatively, the hybridizing polynucleotides of the present invention could be generated synthetically according to known techniques.

[0285] The present invention is further directed to fragments of the isolated nucleic acid molecules described herein. By a fragment of an isolated nucleic acid molecule having the nucleotide sequence of a deposited cone, or a nucleotide sequence shown in SEQ ID NOS: 2-13 is intended fragments of at least about 15 nucleotides (nt), and more preferably at least about 20 nt, still more preferably at least about 30 nt, and even more preferably, at least about 40 nt in length which are useful as probes and primers as discussed herein. Of course, larger fragments 50-500 nt, 500-1000 nt, 1000-1500 nt, 1500-2000 nt, 2000-2500 nt, 2500-3000 nt, 3000-3500 nt in length are also useful according to the present invention as are fragments corresponding to most, if not all, of a nucleotide sequence of a deposited clone, or as shown in SEQ ID NOS: 2-13. By a fragment at least 20 nt in length, for example, is intended fragments which include 20 or more contiguous bases from the nucleotide sequence of a deposited clone or the nucleotide sequence as shown in SEQ ID NOS: 2-13.

[0286] Polynucleotide fragments and hybridizing polynucleotides may be any length from 15 to 4000 nucleotides in length.

[0287] Polynucleotides of the invention include variants which are at least 80%, 81%, 82%, 83%, 84%, 85%, 86%, 87%, 88%, 89%, 90%, 91%, 92%, 93%, 94%, 95% 96%, 97%, 98%, or 99% identical to the polypeptide-encoding or polymerase-encoding nucleotide sequences of SEQ ID NOS:2-13, or to the polymerase nucleic acids of the deposited clones, or to the polynucleotide fragments described above.

[0288] Thus, the invention includes, in part, polynucleotides which are at least 80%, 81%, 82%, 83%, 84%, 85%, 86%, 87%, 88%, 89%, 90%, 91%, 92%, 93%, 94%, 95% 96%, 97%, 98%, or 99% identical to (1) nucleic acid contained in a deposited clone described herein, (2) to a polynucleotide having a nucleotide sequence set out in SEQ ID NOS:2-13, or (3) to a subportion of one of these polynucleotides (e.g., nucleotides 225-398, 156-402, 450-779, 459-2201 of SEQ ID NO:2). The invention further includes host cells which contain such nucleic acid molecules. The invention also includes compositions and mixtures (e.g., reaction mixtures) which contain one or more of these polynucleotides, as well as methods for producing polypeptides using these polynucleotides.

[0289] In many instances, the above described polynucleotides will encode polypeptides which have one or more activity associated with a polypeptide encoded by a deposited clone described herein or a polypeptide having an amino acid sequence set out in SEQ ID NOS:14-25.

[0290] The variants may contain alterations in the coding regions, non-coding regions, or both. Especially preferred are polynucleotide variants containing alterations which produce silent substitutions, additions, or deletions, but do not alter the properties or activities of the encoded polypeptide. Nucleotide variants produced by silent substitutions due to the degeneracy of the genetic code are preferred. Moreover, variants in which 5-10, 1-5, or 1-2 amino acids are substituted, deleted, or added in any combination are also preferred. Polynucleotide variants can be produced for a variety of reasons, e.g., to optimize codon expression for a particular host (change codons to those preferred by a particular bacterial host such as E. coli). Most highly preferred are nucleic acid molecules encoding an amino acid sequence encoded by a deposited clone, as described herein. Isolated nucleic acid molecules, particularly DNA molecules, are useful as probes and primers for producing the polypeptides of the invention, for example, by PCR or DNA shuffling.

[0291] Polynucleotides of the invention include polynucleotides comprising or consisting of nucleic acids encoding fragments of the polypeptides of SEQ ID NOS:14-25 or the polymerases encoded by the deposited clones.

[0292] Nucleic acids may encode fragments which are from 6 to 994 amino acids in length.

[0293] Nucleic acids may encode fragments which are 10 amino acids in length, and begin at any amino acid residue of the full length polypeptide or the full length polymerase (e.g., the polypeptides of SEQ ID NOS:14-25 with or without the N-terminal amino acids encoded by the vectors, or the polymerases encoded by the deposited clones). Thus, nucleic acids may encode fragments 10 amino acids in length such as residues 1-10, 2-11, 3-12, . . . , 911-920 of the polypeptide or polymerase of SEQ ID NO:14; residues 1-10, 2-11, 3-12, . . . , 880-889 of the polypeptide or polymerase of SEQ ID NO:15; residues 1-10, 2-11, 3-12, . . . , 916-925 of the polypeptide or polymerase of SEQ ID NO:16; residues 1-10, 2-11, 3-12, . . . , 862-871 of the polypeptide or polymerase of SEQ ID NO:17; residues 1-10, 2-11, 3-12, . . . , 862-871 of the polypeptide or polymerase of SEQ ID NO:18; residues 1-10, 2-11, 3-12, . . . , 862-871 of the polypeptide or polymerase of SEQ ID NO:19; residues 1-10, 2-11, 3-12, . . . , 891-900 of the polypeptide or polymerase of SEQ ID NO:20; residues 1-10, 2-11, 3-12, . . . , 855-864 of the polypeptide or polymerase of SEQ ID NO:21; residues 1-10, 2-11, 3-12, . . . , 875-884 of the polypeptide or polymerase of SEQ ID NO:22; residues 1-10, 2-11, 3-12, . . . , 861-870 of the polypeptide or polymerase of SEQ ID ID:23; residues 1-10, 2-11, 3-12, . . . , 919-928 of the polypeptide or polymerase of SEQ ID NO:24; residues 1-10, 2-11, 3-12, . . . , 951-960 of the polypeptide or polymerase of SEQ ID NO:25.

[0294] Nucleic acids may encode fragments which are 11 amino acids in length, and begin at any amino acid residue of the full length polypeptide or the full length polymerase (e.g., the polypeptides of SEQ ID NOS:14-25 with or without the N-terminal amino acids encoded by the vectors, or the polymerases encoded by the deposited clones). Thus, nucleic acids may encode fragments 11 amino acids in length such as amino acid residues 1-11, 2-12, 3-13, . . . , 910-920 of the polypeptide or polymerase of SEQ ID NO:14; residues 1-11, 2-12, 3-13, . . . , 879-889 of the polypeptide or polymerase of SEQ ID NO:15; residues 1-11, 2-12, 3-13, . . . , 915-925 of the polypeptide or polymerase of SEQ ID NO:16; residues 1-11, 2-12, 3-13, . . . , 861-871 of the polypeptide or polymerase of SEQ ID NO:17; residues 1-11, 2-12, 3-13, . . . , 861-871 of the polypeptide or polymerase of SEQ ID NO:18; residues 1-11, 2-12, 3-13, . . . , 861-871 of the polypeptide or polymerase of TablSEQ ID NO:19; residues 1-11, 2-12, 3-13, . . . , 890-900 of the polypeptide or polymerase of SEQ ID NO:20; residues 1-11, 2-12, 3-13, . . . , 854-864 of the polypeptide or polymerase of SEQ ID NO:21; residues 1-11, 2-12, 3-13, . . . , 874-884 of the polypeptide or polymerase SEQ ID NO:22; residues 1-11, 2-12, 3-13, . . . , 860-870 of the polypeptide or polymerase of SEQ ID NO:23; residues 1-11, 2-12, 3-13, . . . , 918-928 of the polypeptide or polymerase of SEQ ID NO:24; residues 1-11, 2-12, 3-13, . . . , 950-960 of the polypeptide or polymerase of SEQ ID NO:25. An antibody of the invention may specifically bind one of the above fragments, or more than one fragments which overlap.

[0295] Nucleic acids may encode fragments which are 12 amino acids in length, and begin at any amino acid residue of the full length polypeptide or the full length polymerase (e.g., the polypeptides of SEQ ID NOS:14-25 with or without the N-terminal amino acids encoded by the vectors, or the polymerases encoded by the deposited clones). Thus, nucleic acids may encode fragments 12 amino acids in length such as amino acid residues 1-12, 2-13, 3-14, . . . , 909-920 of the polypeptide or polymerase of SEQ ID NO:14; residues 1-12, 2-13, 3-14, . . . , 878-889 of the polypeptide or polymerase of SEQ ID NO:15; residues 1-12, 2-13, 3-14, . . . , 914-925 of the polypeptide or polymerase of SEQ ID NO:16; residues 1-12, 2-13, 3-14, . . . , 860-871 of the polypeptide or polymerase of SEQ ID NO:17; residues 1-12, 2-13, 3-14, . . . , 860-871 of the polypeptide or polymerase of SEQ ID NO:18; residues 1-12, 2-13, 3-14, . . . , 860-871 of the polypeptide or polymerase of SEQ ID NO:19; residues 1-12, 2-13, 3-14, . . . , 889-900 of the polypeptide or polymerase of SEQ ID NO:20; residues 1-12, 2-13, 3-14, . . . , 853-864 of the polypeptide or polymerase of SEQ ID NO:21; residues 1-12, 2-13, 3-14, . . . , 873-884 of the polypeptide or polymerase of SEQ ID NO:22; residues 1-12, 2-13, 3-14, . . . , 859-870 of the polypeptide or polymerase of SEQ ID NO:23; residues 1-12, 2-13, 3-14, . . . , 917-928 of the polypeptide or polymerase of SEQ ID NO:24; residues 1-12, 2-13, 3-14, . . . , 949-960 of the polypeptide or polymerase of SEQ ID NO:25.

[0296] Nucleic acids may encode fragments which are 13 amino acids in length, and begin at any amino acid residue of the full length polypeptide or the full length polymerase (e.g., the polypeptides of SEQ ID NOS:14-25 with or without the N-terminal amino acids encoded by the vectors, or the polymerases encoded by the deposited clones). Thus, nucleic acids may encode fragments 13 amino acids in length such as amino acid residues 1-13, 2-14, 3-15, . . . , 908-920 of the polypeptide or polymerase of SEQ ID NO:14; residues 1-13, 2-14, 3-15, . . . , 877-889 of the polypeptide or polymerase of SEQ ID NO:15; residues 1-13, 2-14, 3-15, . . . , 913-925 of the polypeptide or polymerase of SEQ ID NO:16; residues 1-13, 2-14, 3-15, . . . , 859-871 of the polypeptide or polymerase of SEQ ID NO:17; residues 1-13, 2-14, 3-15, . . . , 859-871 of the polypeptide or polymerase of SEQ ID NO:18; residues 1-13, 2-14, 3-15, . . . , 859-871 of the polypeptide or polymerase of SEQ ID NO:19; residues 1-13, 2-14, 3-15, . . . , 888-900 of the polypeptide or polymerase of SEQ ID NO:20; residues 1-13, 2-14, 3-15, . . . , 852-864 of the polypeptide or polymerase of SEQ ID NO:21; residues 1-13, 2-14, 3-15, . . . , 872-884 of the polypeptide or polymerase of SEQ ID NO:22; residues 1-13, 2-14, 3-15, . . . , 858-870 of the polypeptide or polymerase of SEQ ID NO:23; residues 1-13, 2-14, 3-15, . . . , 916-928 of the polypeptide or polymerase of SEQ ID NO:24; residues 1-13, 2-14, 3-15, . . . , 948-960 of the polypeptide or polymerase of SEQ ID NO:25.

[0297] Nucleic acids may encode fragments which are 14 amino acids in length, and begin at any amino acid residue of the full length polypeptide or the full length polymerase (e.g., the polypeptides of SEQ ID NOS:14-25 with or without the N-terminal amino acids encoded by the vectors, or the polymerases encoded by the deposited clones). Thus, nucleic acids may encode fragments 14 amino acids in length such as amino acid residues 1-14, 2-15, 3-16, . . . , 907-920 of the polypeptide or polymerase of SEQ ID NO:14; residues 1-14, 2-15, 3-16, . . . , 876-889 of the polypeptide or polymerase of SEQ ID NO:15; residues 1-14, 2-15, 3-16, . . . , 912-925 of the polypeptide or polymerase of SEQ ID NO:16; residues 1-14, 2-15, 3-16, . . . , 858-871 of the polypeptide or polymerase of SEQ ID NO:17; residues 1-14, 2-15, 3-16, . . . , 858-871 of the polypeptide or polymerase of SEQ ID NO:18; residues 1-14, 2-15, 3-16, . . . , 858-871 of the polypeptide or polymerase of SEQ ID NO:19; residues 1-14, 2-15, 3-16, . . . , 887-900 of the polypeptide or polymerase of SEQ ID NO:20; residues 1-14, 2-15, 3-16, . . . , 851-864 of the polypeptide or polymerase of SEQ ID NO:21; residues 1-14, 2-15, 3-16, . . . , 871-884 of the polypeptide or polymerase of SEQ ID NO:22; residues 1-14, 2-15, 3-16, . . . , 857-870 of the polypeptide or polymerase of SEQ ID NO:23; residues 1-14, 2-15, 3-16, . . . , 915-928 of the polypeptide or polymerase of SEQ ID NO:24; residues 1-14, 2-15, 3-16, . . . , 947-960 of the polypeptide or polymerase of SEQ ID NO:25.

[0298] Nucleic acids may encode fragments which are 15 amino acids in length, and begin at any amino acid residue of the full length polypeptide or the full length polymerase (e.g., the polypeptides of SEQ ID NOS:14-25 with or without the N-terminal amino acids encoded by the vectors, or the polymerases encoded by the deposited clones). Thus, nucleic acids may encode fragments 15 amino acids in length such as amino acid residues 1-15, 2-16, 3-17, . . . , 906-920 of the polypeptide or polymerase of SEQ ID NO:14; residues 1-15, 2-16, 3-17, . . . , 875-889 of the polypeptide or polymerase of SEQ ID NO:15; residues 1-15, 2-16, 3-17, . . . , 911-925 of the polypeptide or polymerase of SEQ ID NO:16; residues 1-15, 2-16, 3-17, . . . , 857-871 of the polypeptide or polymerase of SEQ ID NO:17; residues 1-15, 2-16, 3-17, . . . , 857-871 of the polypeptide or polymerase of SEQ ID NO:18; residues 1-15, 2-16, 3-17, . . . , 857-871 of the polypeptide or polymerase of SEQ ID NO:19; residues 1-15, 2-16, 3-17, . . . , 886-900 of the polypeptide or polymerase of SEQ ID NO:20; residues 1-15, 2-16, 3-17, . . . , 850-864 of the polypeptide or polymerase of SEQ ID NO:21; residues 1-15, 2-16, 3-17, . . . , 870-884 of the polypeptide or polymerase of SEQ ID NO:22; residues 1-15, 2-16, 3-17, . . . , 856-870 of the polypeptide or polymerase of SEQ ID NO:23; residues 1-15, 2-16, 3-17, . . . , 914-928 of the polypeptide or polymerase of SEQ ID NO:24; residues 1-15, 2-16, 3-17, . . . , 946-960 of the polypeptide or polymerase of SEQ ID NO:25.

[0299] Nucleic acids may encode fragments which are 16 amino acids in length, and may begin at any amino acid residue of the full length polypeptide or the full length polymerase (e.g., the polypeptides of SEQ ID NOS:14-25 with or without the N-terminal amino acids encoded by the vectors, or the polymerases encoded by the deposited clones). Thus, nucleic acids may encode fragments 16 amino acids in length such as amino acid residues 1-16, 2-17, 3-18, . . . , 905-920 of the polypeptide or polymerase of SEQ ID NO:14; residues 1-16, 2-17, 3-18, . . . , 874-889 of the polypeptide or polymerase of SEQ ID NO:15; residues 1-16, 2-17, 3-18, . . . , 910-925 of the polypeptide or polymerase of SEQ ID NO:16; residues 1-16, 2-17, 3-18, . . . , 856-871 of the polypeptide or polymerase of SEQ ID NO:17; residues 1-16, 2-17, 3-18, . . . , 856-871 of the polypeptide or polymerase of SEQ ID NO:18; residues 1-16, 2-17, 3-18, . . . , 856-871 of the polypeptide or polymerase of SEQ ID NO:19; residues 1-16, 2-17, 3-18, . . . , 885-900 of the polypeptide or polymerase of SEQ ID NO:20; residues 1-16, 2-17, 3-18, . . . , 849-864 of the polypeptide or polymerase of SEQ ID NO:21; residues 1-16, 2-17, 3-18, . . . , 869-884 of the polypeptide or polymerase of SEQ ID NO:22; residues 1-16, 2-17, 3-18, . . . , 855-870 of the polypeptide or polymerase of SEQ ID NO:23; residues 1-16, 2-17, 3-18, . . . , 913-928 of the polypeptide or polymerase of SEQ ID NO:24; residues 1-16, 2-17, 3-18, . . . , 945-960 of the polypeptide or polymerase of SEQ ID NO:25.

[0300] Nucleic acids may encode fragments which are 17 amino acids in length, and begin at any amino acid residue of the full length polypeptide or the full length polymerase (e.g., the polypeptides of SEQ ID NOS:14-25 with or without the N-terminal amino acids encoded by the vectors, or the polymerases encoded by the deposited clones). Thus, nucleic acids may encode fragments 17 amino acids in length such as amino acid residues 1-17, 2-18, 3-19, . . . , 904-920 of the polypeptide or polymerase of SEQ ID NO:14; residues 1-17, 2-18, 3-19, . . . , 873-889 of the polypeptide or polymerase of SEQ ID NO:15; residues 1-17, 2-18, 3-19, . . . , 909-925 of the polypeptide or polymerase of SEQ ID NO:16; residues 1-17, 2-18, 3-19, . . . , 855-871 of the polypeptide or polymerase of SEQ ID NO:17; residues 1-17, 2-18, 3-19, . . . , 855-871 of the polypeptide or polymerase of SEQ ID NO:18; residues 1-17, 2-18, 3-19, . . . , 855-871 of the polypeptide or polymerase of SEQ ID NO:19; residues 1-17, 2-18, 3-19, . . . , 884-900 of the polypeptide or polymerase of SEQ ID NO:20; residues 1-17, 2-18, 3-19, . . . , 848-864 of the polypeptide or polymerase of SEQ ID NO:21; residues 1-17, 2-18, 3-19, . . . , 868-884 of the polypeptide or polymerase of SEQ ID NO:22; residues 1-17, 2-18, 3-19, . . . , 854-870 of the polypeptide or polymerase of SEQ ID NO:23; residues 1-17, 2-18, 3-19, . . . , 912-928 of the polypeptide or polymerase of SEQ ID NO:24; residues 1-17, 2-18, 3-19, . . . , 944-960 of the polypeptide or polymerase of SEQ ID NO:25.

[0301] Nucleic acids may encode fragments which are 18 amino acids in length, and begin at any amino acid residue of the full length polypeptide or the full length polymerase (e.g., the polypeptides of SEQ ID NOS:14-25 with or without the N-terminal amino acids encoded by the vectors, or the polymerases encoded by the deposited clones). Thus, nucleic acids may encode fragments 18 amino acids in length such as amino acid residues 1-18, 2-19, 3-20, . . . , 903-920 of the polypeptide or polymerase of SEQ ID NO:14; residues 1-18, 2-19, 3-20, . . . , 872-889 of the polypeptide or polymerase of SEQ ID NO:15; residues 1-18, 2-19, 3-20, . . . , 908-925 of the polypeptide or polymerase of SEQ ID NO:16; residues 1-18, 2-19, 3-20, . . . , 854-871 of the polypeptide or polymerase of SEQ ID NO:17; residues 1-18, 2-19, 3-20, . . . , 854-871 of the polypeptide or polymerase of SEQ ID NO:18; residues 1-18, 2-19, 3-20, . . . , 854-871 of the polypeptide or polymerase of SEQ ID NO:19; residues 1-18, 2-19, 3-20, . . . , 883-900 of the polypeptide or polymerase of SEQ ID NO:20; residues 1-18, 2-19, 3-20, . . . , 847-864 of the polypeptide or polymerase of SEQ ID NO:21; residues 1-18, 2-19, 3-20, . . . , 867-884 of the polypeptide or polymerase of SEQ ID NO:22; residues 1-18, 2-19, 3-20, . . . , 853-870 of the polypeptide or polymerase of SEQ ID NO:23; residues 1-18, 2-19, 3-20, . . . , 911-928 of the polypeptide or polymerase of SEQ ID NO:24; residues 1-18, 2-19, 3-20, . . . , 943-960 of the polypeptide or polymerase of SEQ ID NO:25.

[0302] Nucleic acids may encode fragments which are 19 amino acids in length, and begin at any amino acid residue 1 of the full length polypeptide or the full length polymerase (e.g., the polypeptides of SEQ ID NOS:14-25 with or without the N-terminal amino acids encoded by the vectors, or the polymerases encoded by the deposited clones). Thus, nucleic acids may encode fragments 19 amino acids in length such as amino acid residues 1-19, 2-20, 3-21, . . . , 902-920 of the polypeptide or polymerase of SEQ ID NO:14; residues 1-19, 2-20, 3-21, . . . , 871-889 of the polypeptide or polymerase of SEQ ID NO:15; residues 1-19, 2-20, 3-21, . . . , 907-925 of the polypeptide or polymerase of SEQ ID NO:16; residues 1-19, 2-20, 3-21, . . . , 853-871 of the polypeptide or polymerase of SEQ ID NO:17; residues 1-19, 2-20, 3-21, . . . , 853-871 of the polypeptide or polymerase of SEQ ID NO:18; residues 1-19, 2-20, 3-21, . . . , 853-871 of the polypeptide or polymerase of SEQ ID NO:19; residues 1-19, 2-20, 3-21, . . . , 882-900 of the polypeptide or polymerase of SEQ ID NO:20; residues 1-19, 2-20, 3-21, . . . , 846-864 of the polypeptide or polymerase of SEQ ID NO:21; residues 1-19, 2-20, 3-21, . . . , 866-884 of the polypeptide or polymerase of SEQ ID NO:22; residues 1-19, 2-20, 3-21, . . . , 852-870 of the polypeptide or polymerase of SEQ ID NO:23; residues 1-19, 2-20, 3-21, . . . , 910-928 of the polypeptide or polymerase of SEQ ID NO:24; residues 1-19, 2-20, 3-21, . . . , 942-960 of the polypeptide or polymerase of SEQ ID NO:25.

[0303] Nucleic acids may encode fragments which are 20 amino acids in length, and begin at any amino acid residue of the full length polypeptide or the full length polymerase (e.g., the polypeptides of SEQ ID NOS:14-25 with or without the N-terminal amino acids encoded by the vectors, or the polymerases encoded by the deposited clones). Thus, nucleic acids may encode fragments 20 amino acids in length such as amino acid residues 1-20, 2-21, 3-22, . . . , 901-920 of the polypeptide or polymerase of SEQ ID NO:14; residues 1-20, 2-21, 3-22, . . . , 870-889 of the polypeptide or polymerase of SEQ ID NO:15; residues 1-20, 2-21, 3-22, . . . , 906-925 of the polypeptide or polymerase of SEQ ID NO:16; residues 1-20, 2-21, 3-22, . . . , 852-871 of the polypeptide or polymerase of SEQ ID NO:17; residues 1-20, 2-21, 3-22, . . . , 852-871 of the polypeptide or polymerase of SEQ ID NO:18; residues 1-20, 2-21, 3-22, . . . , 852-871 of the polypeptide or polymerase of SEQ ID NO:19; residues 1-20, 2-21, 3-22, . . . , 881-900 of the polypeptide or polymerase of SEQ ID NO:20; residues 1-20, 2-21, 3-22, . . . , 845-864 of the polypeptide or polymerase of SEQ ID NO:21; residues 1-20, 2-21, 3-22, . . . , 865-884 of the polypeptide or polymerase of SEQ ID NO:22; residues 1-20, 2-21, 3-22, . . . , 851-870 of the polypeptide or polymerase of SEQ ID NO:23; residues 1-20, 2-21, 3-22, . . . , 909-928 of the polypeptide or polymerase of SEQ ID NO:24; residues 1-20, 2-21, 3-22, . . . , 941-960 of the polypeptide or polymerase of SEQ ID NO:25.

[0304] Nucleic acids may encode fragments which are 21 amino acids in length, and begin at any amino acid residue of the full length polypeptide or the full length polymerase (e.g., the polypeptides of SEQ ID NOS:14-25 with or without the N-terminal amino acids encoded by the vectors, or the polymerases encoded by the deposited clones). Thus, nucleic acids may encode fragments 21 amino acid in length such as amino acid residues 1-21, 2-22, 3-23, . . . , 900-920 of the polypeptide or polymerase of SEQ ID NO:14; residues 1-21, 2-22, 3-23, . . . , 869-889 of the polypeptide or polymerase of SEQ ID NO:15; residues 1-21, 2-22, 3-23, . . . , 905-925 of the polypeptide or polymerase of SEQ ID NO:16; residues 1-21, 2-22, 3-23, . . . , 851-871 of the polypeptide or polymerase of SEQ ID NO:17; residues 1-21, 2-22, 3-23, . . . , 851-871 of the polypeptide or polymerase of SEQ ID NO:18; residues 1-21, 2-22, 3-23, . . . , 851-871 of the polypeptide or polymerase of SEQ ID NO:19; residues 1-21, 2-22, 3-23, . . . , 880-900 of the polypeptide or polymerase of SEQ ID NO:20; residues 1-21, 2-22, 3-23, . . . , 844-864 of the polypeptide or polymerase of SEQ ID NO:21; residues 1-21, 2-22, 3-23, . . . , 864-884 of the polypeptide or polymerase of SEQ ID NO:22; residues 1-21, 2-22, 3-23, . . . , 850-870 of the polypeptide or polymerase of SEQ ID NO:23; residues 1-21, 2-22, 3-23, . . . , 908-928 of the polypeptide or polymerase of SEQ ID NO:24; residues 1-21, 2-22, 3-23, . . . , 940-960 of the polypeptide or polymerase of SEQ ID NO:25.

[0305] Nucleic acids may encode fragments which are 22 amino acids in length, and begin at any amino acid residue of the full length polypeptide or the full length polymerase (e.g., the polypeptides of SEQ ID NOS:14-25 with or without the N-terminal amino acids encoded by the vectors, or the polymerases encoded by the deposited clones). Thus, nucleic acids may encode fragments 22 amino acids in length such as amino acid residues 1-22, 2-23, 3-24, . . . , 899-920 of the polypeptide or polymerase of SEQ ID NO:14; residues 1-22, 2-23, 3-24, . . . , 868-889 of the polypeptide or polymerase of SEQ ID NO:15; residues 1-22, 2-23, 3-24, . . . , 904-925 of the polypeptide or polymerase of SEQ ID NO:16; residues 1-22, 2-23, 3-24, . . . , 850-871 of the polypeptide or polymerase of SEQ ID NO:17; residues 1-22, 2-23, 3-24, . . . , 850-871 of the polypeptide or polymerase of SEQ ID NO:18; residues 1-22, 2-23, 3-24, . . . , 850-871 of the polypeptide or polymerase of SEQ ID NO:19; residues 1-22, 2-23, 3-24, . . . , 879-900 of the polypeptide or polymerase of SEQ ID NO:20; residues 1-22, 2-23, 3-24, . . . , 843-864 of the polypeptide or polymerase of SEQ ID NO:21; residues 1-22, 2-23, 3-24, . . . , 863-884 of the polypeptide or polymerase of SEQ ID NO:22; residues 1-22, 2-23, 3-24, . . . , 849-870 of the polypeptide or polymerase of SEQ ID NO:23; residues 1-22, 2-23, 3-24, . . . , 907-928 of the polypeptide or polymerase of SEQ ID NO:24; residues 1-22, 2-23, 3-24, . . . , 939-960 of the polypeptide or polymerase of SEQ ID NO:25.

[0306] Nucleic acids may encode fragments which are 23 amino acids in length, and begin at any amino acid residue of the full length polypeptide or the full length polymerase (e.g., the polypeptides of SEQ ID NOS:14-25 with or without the N-terminal amino acids encoded by the vectors, or the polymerases encoded by the deposited clones). Thus, nucleic acids may encode fragments 23 amino acids in length such as amino acid residues 1-23, 2-24, 3-25, . . . , 898-920 of the polypeptide or polymerase of SEQ ID NO:14; residues 1-23, 2-24, 3-25, . . . , 867-889 of the polypeptide or polymerase of SEQ ID NO:15; residues 1-23, 2-24, 3-25, . . . , 903-925 of the polypeptide or polymerase of SEQ ID NO:16; residues 1-23, 2-24, 3-25, . . . , 849-871 of the polypeptide or polymerase of SEQ ID NO:17; residues 1-23, 2-24, 3-25, . . . , 849-871 of the polypeptide or polymerase of SEQ ID NO:18; residues 1-23, 2-24, 3-25, . . . , 849-871 of the polypeptide or polymerase of SEQ ID NO:19; residues 1-23, 2-24, 3-25, . . . , 878-900 of the polypeptide or polymerase of SEQ ID NO:20; residues 1-23, 2-24, 3-25, . . . , 842-864 of the polypeptide or polymerase of SEQ ID NO:21; residues 1-23, 2-24, 3-25, . . . , 862-884 of the polypeptide or polymerase of SEQ ID NO:22; residues 1-23, 2-24, 3-25, . . . , 848-870 of the polypeptide or polymerase of SEQ ID NO:23; residues 1-23, 2-24, 3-25, . . . , 906-928 of the polypeptide or polymerase of SEQ ID NO:24; residues 1-23, 2-24, 3-25, . . . , 938-960 of the polypeptide or polymerase of SEQ ID NO:25.

[0307] Nucleic acids may encode fragments which are 24 amino acids in length, and begin at any amino acid residue of the full length polypeptide or the full length polymerase (e.g., the polypeptides of SEQ ID NOS:14-25 with or without the N-terminal amino acids encoded by the vectors, or the polymerases encoded by the deposited clones). Thus, nucleic acids may encode fragments 24 amino acids in length such as amino acid residues 1-23, 2-24, 3-25, . . . , 897-920 of the polypeptide or polymerase of SEQ ID NO:14; residues 1-23, 2-24, 3-25, . . . , 866-889 of the polypeptide or polymerase of SEQ ID NO:15; residues 1-23, 2-24, 3-25, . . . , 902-925 of the polypeptide or polymerase of SEQ ID NO:16; residues 1-23, 2-24, 3-25, . . . , 848-871 of the polypeptide or polymerase of SEQ ID NO:17; residues 1-23, 2-24, 3-25, . . . , 848-871 of the polypeptide or polymerase of SEQ ID NO:18; residues 1-23, 2-24, 3-25, . . . , 848-871 of the polypeptide or polymerase of SEQ ID NO:19; residues 1-23, 2-24, 3-25, . . . , 877-900 of the polypeptide or polymerase of SEQ ID NO:20; residues 1-23, 2-24, 3-25, . . . , 841-864 of the polypeptide or polymerase of SEQ ID NO:21; residues 1-23, 2-24, 3-25, . . . , 861-884 of the polypeptide or polymerase of SEQ ID NO:22; residues 1-23, 2-24, 3-25, . . . , 847-870 of the polypeptide or polymerase of SEQ ID NO:23; residues 1-23, 2-24, 3-25, . . . , 905-928 of the polypeptide or polymerase of SEQ ID NO:24; residues 1-23, 2-24, 3-25, . . . , 937-960 of the polypeptide or polymerase of SEQ ID NO:25.

[0308] Nucleic acids may encode fragments which are 25 amino acids in length, and begin at any amino acid residue of the full length polypeptide or the full length polymerase (e.g., the polypeptides of SEQ ID NOS:14-25 with or without the N-terminal amino acids encoded by the vectors, or the polymerases encoded by the deposited clones). Thus, nucleic acids may encode fragments 25 amino acids in length such as amino acid residues 1-24, 2-25, 3-26, . . . , 896-920 of the polypeptide or polymerase of SEQ ID NO:14; residues 1-24, 2-25, 3-26, . . . , 865-889 of the polypeptide or polymerase of SEQ ID NO:15; residues 1-24, 2-25, 3-26, . . . , 901-925 of the polypeptide or polymerase of SEQ ID NO:16; residues 1-24, 2-25, 3-26, . . . , 847-871 of the polypeptide or polymerase of SEQ ID NO:17; residues 1-24, 2-25, 3-26, . . . , 847-871 of the polypeptide or polymerase of SEQ ID NO:18; residues 1-24, 2-25, 3-26, . . . , 847-871 of the polypeptide or polymerase of SEQ ID NO:19; residues 1-24, 2-25, 3-26, . . . , 876-900 of the polypeptide or polymerase of SEQ ID NO:20; residues 1-24, 2-25, 3-26, . . . , 840-864 of the polypeptide or polymerase of SEQ ID NO:21; residues 1-24, 2-25, 3-26, . . . , 860-884 of the polypeptide or polymerase of SEQ ID NO:22; residues 1-24, 2-25, 3-26, . . . , 846-870 of the polypeptide or polymerase of SEQ ID NO:23; residues 1-24, 2-25, 3-26, . . . , 904-928 of the polypeptide or polymerase of SEQ ID NO:24; residues 1-24, 2-25, 3-26, . . . , 936-960 of the polypeptide or polymerase of SEQ ID NO:25.

[0309] Nucleic acids may encode fragments which are 26 amino acids in length, and begin at any amino acid residue of the full length polypeptide or the full length polymerase (e.g., the polypeptides of SEQ ID NOS:14-25 with or without the N-terminal amino acids encoded by the vectors, or the polymerases encoded by the deposited clones). Thus, nucleic acids may encode fragments 26 amino acids in length such as amino acid residues 1-25, 2-26, 3-27, . . . , 895-920 of the polypeptide or polymerase of SEQ ID NO:14; residues 1-25, 2-26, 3-27, . . . , 864-889 of the polypeptide or polymerase of SEQ ID NO:15; residues 1-25, 2-26, 3-27, . . . , 900-925 of the polypeptide or polymerase of SEQ ID NO:16; residues 1-25, 2-26, 3-27, . . . , 846-871 of the polypeptide or polymerase of SEQ ID NO:17; residues 1-25, 2-26, 3-27, . . . , 846-871 of the polypeptide or polymerase of SEQ ID NO:18; residues 1-25, 2-26, 3-27, . . . , 846-871 of the polypeptide or polymerase of SEQ ID NO:19; residues 1-25, 2-26, 3-27, . . . , 875-900 of the polypeptide or polymerase of SEQ ID NO:20; residues 1-25, 2-26, 3-27, . . . , 839-864 of the polypeptide or polymerase of SEQ ID NO:21; residues 1-25, 2-26, 3-27, . . . , 859-884 of the polypeptide or polymerase of SEQ ID NO:22; residues 1-25, 2-26, 3-27, . . . , 845-870 of the polypeptide or polymerase of SEQ ID NO:23; residues 1-25, 2-26, 3-27, . . . , 903-928 of the polypeptide or polymerase of SEQ ID NO:24; residues 1-25, 2-26, 3-27, . . . , 935-960 of the polypeptide or polymerase of SEQ ID NO:25.

[0310] Nucleic acids may encode fragments which are 27 amino acids in length, and begin at any amino acid residue of the full length polypeptide or the full length polymerase (e.g., the polypeptides of SEQ ID NOS:14-25 with or without the N-terminal amino acids encoded by the vectors, or the polymerases encoded by the deposited clones). Thus, nucleic acids may encode fragments 27 amino acids in length such as amino acid residues 1-26, 2-27, 3-28, . . . , 894-920 of the polypeptide or polymerase of SEQ ID NO:14; residues 1-26, 2-27, 3-28, . . . , 863-889 of the polypeptide or polymerase of SEQ ID NO:15; residues 1-26, 2-27, 3-28, . . . , 899-925 of the polypeptide or polymerase of SEQ ID NO:16; residues 1-26, 2-27, 3-28, . . . , 845-871 of the polypeptide or polymerase of SEQ ID NO:17; residues 1-26, 2-27, 3-28, . . . , 845-871 of the polypeptide or polymerase of SEQ ID NO:18; residues 1-26, 2-27, 3-28, . . . , 845-871 of the polypeptide or polymerase of SEQ ID NO:19; residues 1-26, 2-27, 3-28, . . . , 874-900 of the polypeptide or polymerase of SEQ ID NO:20; residues 1-26, 2-27, 3-28, . . . , 838-864 of the polypeptide or polymerase of SEQ ID NO:21; residues 1-26, 2-27, 3-28, . . . , 858-884 of the polypeptide or polymerase of SEQ ID NO:22; residues 1-26, 2-27, 3-28, . . . , 844-870 of the polypeptide or polymerase of SEQ ID NO:23; residues 1-26, 2-27, 3-28, . . . , 902-928 of the polypeptide or polymerase of SEQ ID NO:24; residues 1-26, 2-27, 3-28, . . . , 934-960 of the polypeptide or polymerase of SEQ ID NO:25.

[0311] Nucleic acids may encode fragments which are 28 amino acids in length, and begin at any amino acid residue of the full length polypeptide or the full length polymerase (e.g., the polypeptides of SEQ ID NOS:14-25) with or without the N-terminal amino acids encoded by the vectors, or the polymerases encoded by the deposited clones). Thus, nucleic acids may encode fragments 28 amino acids in length such as amino acid residues 1-27, 2-28, 3-29, . . . , 893-920 of the polypeptide or polymerase of SEQ ID NO:14; residues 1-27, 2-28, 3-29, . . . , 862-889 of the polypeptide or polymerase of SEQ ID NO:15; residues 1-27, 2-28, 3-29, . . . , 898-925 of the polypeptide or polymerase of SEQ ID NO:16; residues 1-27, 2-28, 3-29, . . . , 844-871 of the polypeptide or polymerase of SEQ ID NO:17; residues 1-27, 2-28, 3-29, . . . , 844-871 of the polypeptide or polymerase of SEQ ID NO:18; residues 1-27, 2-28, 3-29, . . . , 844-871 of the polypeptide or polymerase of SEQ ID NO:19; residues 1-27, 2-28, 3-29, . . . , 873-900 of the polypeptide or polymerase of SEQ ID NO:20; residues 1-27, 2-28, 3-29, . . . , 837-864 of the polypeptide or polymerase of SEQ ID NO:21; residues 1-27, 2-28, 3-29, . . . , 857-884 of the polypeptide or polymerase of SEQ ID NO:22; residues 1-27, 2-28, 3-29, . . . , 843-870 of the polypeptide or polymerase of SEQ ID NO:23; residues 1-27, 2-28, 3-29, . . . , 901-928 of the polypeptide or polymerase of SEQ ID NO:24; residues 1-27, 2-28, 3-29, . . . , 933-960 of the polypeptide or polymerase of SEQ ID NO:25.

[0312] Nucleic acids may encode fragments which are 29 amino acids in length, and begin at any amino acid residue of the full length polypeptide or the full length polymerase (e.g., the polypeptides of SEQ ID NOS:14-25 with or without the N-terminal amino acids encoded by the vectors, or the polymerases encoded by the deposited clones). Thus, nucleic acids may encode fragments 29 amino acids in length such as amino acid residues 1-28, 2-29, 3-30, . . . , 892-920 of the polypeptide or polymerase of SEQ ID NO:14; residues 1-28, 2-29, 3-30, . . . , 861-889 of the polypeptide or polymerase of SEQ ID NO:15; residues 1-28, 2-29, 3-30, . . . , 897-925 of the polypeptide or polymerase of SEQ ID NO:16; residues 1-28, 2-29, 3-30, . . . , 843-871 of the polypeptide or polymerase of SEQ ID NO:17; residues 1-28, 2-29, 3-30, . . . , 843-871 of the polypeptide or polymerase of SEQ ID NO:18; residues 1-28, 2-29, 3-30, . . . , 843-871 of the polypeptide or polymerase of SEQ ID NO:19; residues 1-28, 2-29, 3-30, . . . , 872-900 of the polypeptide or polymerase of SEQ ID NO:20; residues 1-28, 2-29, 3-30, . . . , 836-864 of the polypeptide or polymerase of SEQ ID NO:21; residues 1-28, 2-29, 3-30, . . . , 856-884 of the polypeptide or polymerase of SEQ ID NO:22; residues 1-28, 2-29, 3-30, . . . , 842-870 of the polypeptide or polymerase of SEQ ID NO:23; residues 1-28, 2-29, 3-30, . . . , 900-928 of the polypeptide or polymerase of SEQ ID NO:24; residues 1-28, 2-29, 3-30, . . . , 932-960 of the polypeptide or polymerase of SEQ ID NO:25.

[0313] Nucleic acids may encode fragments which are 30 amino acids in length, and begin at any amino acid residue of the full length polypeptide or the full length polymerase (e.g., the polypeptides of SEQ ID NOS:14-25 with or without the N-terminal amino acids encoded by the vectors, or the polymerases encoded by the deposited clones). Thus, nucleic acids may encode fragments 30 amino acids in length such as amino acid residues 1-29, 2-30, 3-31, . . . , 891-920 of the polypeptide or polymerase of SEQ ID NO:14; residues 1-29, 2-30, 3-31, . . . , 860-889 of the polypeptide or polymerase of SEQ ID NO:15; residues 1-29, 2-30, 3-31, . . . , 896-925 of the polypeptide or polymerase of SEQ ID NO:16; residues 1-29, 2-30, 3-31, . . . , 842-871 of the polypeptide or polymerase of SEQ ID NO:17; residues 1-29, 2-30, 3-31, . . . , 842-871 of the polypeptide or polymerase of SEQ ID NO:18; residues 1-29, 2-30, 3-31, . . . , 842-871 of the polypeptide or polymerase of SEQ ID NO:19; residues 1-29, 2-30, 3-31, . . . , 871-900 of the polypeptide or polymerase of SEQ ID NO:20; residues 1-29, 2-30, 3-31, . . . , 835-864 of the polypeptide or polymerase of SEQ ID NO:21; residues 1-29, 2-30, 3-31, . . . , 855-884 of the polypeptide or polymerase of SEQ ID NO:22; residues 1-29, 2-30, 3-31, . . . , 841-870 of the polypeptide or polymerase of SEQ ID NO:23; residues 1-29, 2-30, 3-31, . . . , 899-928 of the polypeptide or polymerase of SEQ ID NO:24; residues 1-29, 2-30, 3-31, . . . , 931-960 of the polypeptide or polymerase of SEQ ID NO:25.

[0314] Nucleic acids may encode fragments which are 31 amino acids in length, and begin at any amino acid residue of the full length polypeptide or the full length polymerase (e.g., the polypeptides of SEQ ID NOS:14-25 with or without the N-terminal amino acids encoded by the vectors, or the polymerases encoded by the deposited clones). Thus, nucleic acids may encode fragments 31 amino acids in length such as amino acid residues 1-30, 2-31, 3-32, . . . , 890-920 of the polypeptide or polymerase of SEQ ID NO:14; residues 1-30, 2-31, 3-32, . . . , 859-889 of the polypeptide or polymerase of SEQ ID NO:15; residues 1-30, 2-31, 3-32, . . . , 895-925 of the polypeptide or polymerase of SEQ ID NO:16; residues 1-30, 2-31, 3-32, . . . , 841-871 of the polypeptide or polymerase of SEQ ID NO:17; residues 1-30, 2-31, 3-32, . . . , 841-871 of the polypeptide or polymerase of SEQ ID NO:18; residues 1-30, 2-31, 3-32, . . . , 841-871 of the polypeptide or polymerase of SEQ ID NO:19; residues 1-30, 2-31, 3-32, . . . , 870-900 of the polypeptide or polymerase of SEQ ID NO:20; residues 1-30, 2-31, 3-32, . . . , 834-864 of the polypeptide or polymerase of SEQ ID NO:21; residues 1-30, 2-31, 3-32, . . . , 854-884 of the polypeptide or polymerase of SEQ ID NO:22; residues 1-30, 2-31, 3-32, . . . , 840-870 of the polypeptide or polymerase of SEQ ID NO:23; residues 1-30, 2-31, 3-32, . . . , 898-928 of the polypeptide or polymerase of SEQ ID NO:24; residues 1-30, 2-31, 3-32, . . . , 930-960 of the polypeptide or polymerase of SEQ ID NO:25.

[0315] Nucleic acids may encode fragments which are 32 amino acids in length, and begin at any amino acid residue of the full length polypeptide or the full length polymerase (e.g., the polypeptides of SEQ ID NOS:14-25 with or without the N-terminal amino acids encoded by the vectors, or the polymerases encoded by the deposited clones). Thus, nucleic acids may encode fragments 32 amino acids in length such as amino acid residues 1-31, 2-32, 3-33, . . . , 889-920 of the polypeptide or polymerase of SEQ ID NO:14; residues 1-31, 2-32, 3-33, . . . , 858-889 of the polypeptide or polymerase of SEQ ID NO:15; residues 1-31, 2-32, 3-33, . . . , 894-925 of the polypeptide or polymerase of SEQ ID NO:16; residues 1-31, 2-32, 3-33, . . . , 840-871 of the polypeptide or polymerase of SEQ ID NO:17; residues 1-31, 2-32, 3-33, . . . , 840-871 of the polypeptide or polymerase of SEQ ID NO:18; residues 1-31, 2-32, 3-33, . . . , 840-871 of the polypeptide or polymerase of SEQ ID NO:19; residues 1-31, 2-32, 3-33, . . . , 869-900 of the polypeptide or polymerase of SEQ ID NO:20; residues 1-31, 2-32, 3-33, . . . , 833-864 of the polypeptide or polymerase of SEQ ID NO:21; residues 1-31, 2-32, 3-33, . . . , 853-884 of the polypeptide or polymerase of SEQ ID NO:22; residues 1-31, 2-32, 3-33, . . . , 839-870 of the polypeptide or polymerase of SEQ ID NO:23; residues 1-31, 2-32, 3-33, . . . , 897-928 of the polypeptide or polymerase of SEQ ID NO:24; residues 1-31, 2-32, 3-33, . . . , 929-960 of the polypeptide or polymerase of SEQ ID NO:25.

[0316] Nucleic acids may encode fragments which are 33 amino acids in length, and begin at any amino acid residue of the full length polypeptide or the full length polymerase (e.g., the polypeptides of SEQ ID NOS:14-25 with or without the N-terminal amino acids encoded by the vectors, or the polymerases encoded by the deposited clones). Thus, nucleic acids may encode fragments 33 amino acids in length such as amino acid residues 1-32, 2-33, 3-34, . . . , 888-920 of the polypeptide or polymerase of SEQ ID NO:14; residues 1-32, 2-33, 3-34, . . . , 857-889 of the polypeptide or polymerase of SEQ ID NO:15; residues 1-32, 2-33, 3-34, . . . , 893-925 of the polypeptide or polymerase of SEQ ID NO:16; residues 1-32, 2-33, 3-34, . . . , 839-871 of the polypeptide or polymerase of SEQ ID NO:17; residues 1-32, 2-33, 3-34, . . . , 839-871 of the polypeptide or polymerase of TaSEQ ID NO:18; residues 1-32, 2-33, 3-34, . . . , 839-871 of the polypeptide or polymerase of SEQ ID NO:19; residues 1-32, 2-33, 3-34, . . . , 868-900 of the polypeptide or polymerase of SEQ ID NO:20; residues 1-32, 2-33, 3-34, . . . , 832-864 of the polypeptide or polymerase of SEQ ID NO:21; residues 1-32, 2-33, 3-34, . . . , 852-884 of the polypeptide or polymerase of SEQ ID NO:22; residues 1-32, 2-33, 3-34, . . . , 838-870 of the polypeptide or polymerase of SEQ ID NO:23; residues 1-32, 2-33, 3-34, . . . , 896-928 of the polypeptide or polymerase of SEQ ID NO:24; residues 1-32, 2-33, 3-34, . . . , 928-960 of the polypeptide or polymerase of SEQ ID NO:25.

[0317] Nucleic acids may encode fragments which are 34 amino acids in length, and begin at any amino acid residue of the full length polypeptide or the full length polymerase (e.g., the polypeptides of SEQ ID NOS:14-25 with or without the N-terminal amino acids encoded by the vectors, or the polymerases encoded by the deposited clones). Thus, nucleic acids may encode fragments 34 amino acids in length such as amino acid residues 1-33, 2-34, 3-35, . . . , 887-920 of the polypeptide or polymerase of SEQ ID NO:14; residues 1-33, 2-34, 3-35, . . . , 856-889 of the polypeptide or polymerase of SEQ ID NO:15; residues 1-33, 2-34, 3-35, . . . , 892-925 of the polypeptide or polymerase of SEQ ID NO:16; residues 1-33, 2-34, 3-35, . . . , 838-871 of the polypeptide or polymerase of SEQ ID NO:17; residues 1-33, 2-34, 3-35, . . . , 838-871 of the polypeptide or polymerase of SEQ ID NO:18; residues 1-33, 2-34, 3-35, . . . , 838-871 of the polypeptide or polymerase of SEQ ID NO:19; residues 1-33; 2-34, 3-35, . . . , 867-900 of the polypeptide or polymerase of SEQ ID NO:20; residues 1-33, 2-34, 3-35, . . . , 831-864 of the polypeptide or polymerase of SEQ ID NO:21; residues 1-33, 2-34, 3-35, . . . , 851-884 of the polypeptide or polymerase of SEQ ID NO:22; residues 1-33, 2-34, 3-35, . . . , 837-870 of the polypeptide or polymerase of SEQ ID NO:23; residues 1-33, 2-34, 3-35, . . . , 895-928 of the polypeptide or polymerase of SEQ ID NO:24; residues 1-33, 2-34, 3-35, . . . , 927-960 of the polypeptide or polymerase of SEQ ID NO:25.

[0318] Nucleic acids of the invention may encode fragments which contain a continuous series of deleted residues from the amino (N)- or the carboxyl (C)-terminus, or both. For example, any number of amino acids, ranging from 1 to 954, can be deleted from the N-terminus of the encoded fragment. Thus, nucleic acids may encode fragments containing a deletion of 1 to 10, 10 to 20, 20 to 30, 30 to 40, 40 to 50, 50 to 60, 60 to 70, 70 to 80, 80 to 90, 90 to 100, 100 to 110, 110 to 120, 120 to 130, 130 to 140, 140 to 150, 150 to 160, 160 to 170, 170 to 180, 180 to 190, 190 to 200, 200 to 210, 210 to 220, 220 to 230, 230 to 240, 240 to 250, 250 to 260, 260 to 270, 270 to 280, 280 to 290, 290 to 300, 300 to 310, 310 to 320, 320 to 330, 330 to 340, 340 to 350, 350 to 360, 360 to 370, 370 to 380, 380 to 390, 390 to 400, 400 to 410, 410 to 420, 420 to 430, 430 to 440, 440 to 450, 450 to 460, 460 to 470, or 470 to 480 amino acids from the N-terminus of the full length polypeptide or the full length polymerase (e.g., the polypeptides of SEQ ID NOS:14-25 with or without the N-terminal amino acids encoded by the vectors, or the polymerases encoded by the deposited clones).

[0319] As another example, nucleic acids of the invention may encode fragments containing a deletion of from 1 to 954 amino acids at the C-terminus. Thus, nucleic acids may encode C-terminal deletion fragments which contain a deletion of 1 to 10, 10 to 20, 20 to 30, 30 to 40, 40 to 50, 50 to 60, 60 to 70, 70 to 80, 80 to 90, 90 to 100, 100 to 110, 110 to 120, 120 to 130, 130 to 140, 140 to 150, 150 to 160, 160 to 170, 170 to 180, 180 to 190, 190 to 200, 200 to 210, 210 to 220, 220 to 230, 230 to 240, 240 to 250, 250 to 260, 260 to 270, 270 to 280, 280 to 290, 290 to 300, 300 to 310, 310 to 320, 320 to 330, 330 to 340, 340 to 350, 350 to 360, 360 to 370, 370 to 380, 380 to 390, 390 to 400, 400 to 410, 410 to 420, 420 to 430, 430 to 440, 440 to 450, 450 to 460, 460 to 470, or 470 to 480 amino acids from the C-terminus of the full length polypeptide or the full length polymerase (e.g., the polypeptides of SEQ ID NOS:14-25 with or without the N-terminal amino acids encoded by the vectors, or the polymerases encoded by the deposited clones).

[0320] Furthermore, nucleic acids of the invention may encode fragments which contain combinations of the above N- and C-terminal deletions. Nucleic acids encoding combined N- and C-terminal deletions fragments may encode a fragment containing a deletion of 1 to 10, 10 to 20, 20 to 30, 30 to 40, 40 to 50, 50 to 60, 60 to 70, 70 to 80, 80 to 90, 90 to 100, 100 to 110, 110 to 120, 120 to 130, 130 to 140, 140 to 150, 150 to 160, 160 to 170, 170 to 180, 180 to 190, 190 to 200, 200 to 210, 210 to 220, 220 to 230, 230 to 240, 240 to 250, 250 to 260, 260 to 270, 270 to 280, 280 to 290, 290 to 300, 300 to 310, 310 to 320, 320 to 330, 330 to 340, 340 to 350, 350 to 360, 360 to 370, 370 to 380, 380 to 390, 390 to 400, 400 to 410, 410 to 420, 420 to 430, 430 to 440, 440 to 450, 450 to 460, 460 to 470, or 470 to 480 amino acids from the N-terminus and a deletion of 1 to 10, 10 to 20, 20 to 30, 30 to 40, 40 to 50, 50 to 60, 60 to 70, 70 to 80, 80 to 90, 90 to 100, 100 to 110, 110 to 120, 120 to 130, 130 to 140, 140 to 150, 150 to 160, 160 to 170, 170 to 180, 180 to 190, 190 to 200, 200 to 210, 210 to 220, 220 to 230, 230 to 240, 240 to 250, 250 to 260, 260 to 270, 270 to 280, 280 to 290, 290 to 300, 300 to 310, 310 to 320, 320 to 330, 330 to 340, 340 to 350, 350 to 360, 360 to 370, 370 to 380, 380 to 390, 390 to 400, 400 to 410, 410 to 420, 420 to 430, 430 to 440, 440 to 450, 450 to 460, 460 to 470, or 470 to 480 amino acids from the C-terminus.

[0321] Even if deletion of one or more amino acids from the N- and/or C-terminus of an encoded protein results in modification of loss of one or more biological functions of the encoded protein, other functional activities (e.g., enzymatic activities, antigenic activity, immunogenic activity) may still be retained. For example, the ability of shortened polypeptides to induce and/or bind to antibodies which recognize the complete forms of the polypeptides generally will be retained when less than the majority of the residues of the complete or mature polypeptide are removed from the N- and/or C-terminus. Whether a particular encoded polypeptide lacking N- and/or C-terminal residues of a complete polypeptide retains such immunologic activities can readily be determined by routine methods described herein and otherwise known in the art. It is not unlikely that an encoded fragment with a large number of deleted N- and/or C-terminal amino acid residues may retain some antigenic or immunogenic activities. In fact, peptides composed of as few as six amino acid residues may often evoke an immune response, as discussed below.

[0322] Nucleic acids may encode fragments which include unique regions, i.e., stretches of amino acids of the polypeptides or polymerases of SEQ ID NOS:14-25 that are less than 100% identical to corresponding stretches of amino acids in other proteins such the polypeptides of SEQ ID NOS:27-34. Unique regions of each encoded polypeptide of the invention are shown in the alignment in Table 35, which indicates the identical and non-identical amino acids of the polymerases of SEQ ID NOS:14-25 (or the polymerases encoded by a deposited clone) as compared to the polypeptides of SEQ ID NOS:27-34. Nucleic acids encoding fragments which contain unique regions are useful for generating highly specific antibodies of the invention, for example by DNA vaccination or by vaccination or screening using recombinant polypeptide. Thus, nucleic acids encoding fragments which contain unique regions are preferred for producing recombinant antigenic fragments of the invention. Additionally, nucleic acids encoding fragments which contain unique regions are especially useful for producing fusion proteins such as proteins produced by DNA shuffling. Using DNA shuffling, nucleic acids encoding fusion proteins are constructed which encode polypeptides comprising fragments from one or more polymerases and which preferably have an enzymatic activity of a polypeptide or polymerase of SEQ ID NOS:14-25 or the polymerases encoded by a deposited clone.

[0323] Other nucleic acids encode fragments characterized by structural or functional attributes of the polypeptides of the invention. Such nucleic acids encode fragments which comprise alpha-helix and alpha-helix forming regions (“alpha-regions”), beta-sheet and beta-sheet-forming regions (“beta-regions”), turn and turn-forming regions (“turn-regions”), coil and coil-forming regions (“coil-regions”), hydrophilic regions, hydrophobic regions, alpha amphipathic regions, beta amphipathic regions, surface forming regions, and high antigenic index regions (i.e., containing four or more contiguous amino acids having an antigenic index of greater than or equal to 1.5, as identified using the default parameters of the Jameson-Wolf program) of full-length polypeptides (e.g., the polypeptides of SEQ ID NOS:14-25). Nucleic acids encoding certain preferred regions include, but are not limited to, those encoding regions of the aforementioned types identified by analysis of the amino acid sequence depicted in SEQ ID NOS:14-25, such preferred regions include; Garnier-Robson predicted alpha-regions, beta-regions, turn-regions, and coil-regions; Chou-Fasman predicted alpha-regions, beta-regions, turn-regions, and coil-regions; Kyte-Doolittle predicted hydrophilic and hydrophobic regions; Eisenberg alpha and beta amphipathic regions; Emini surface-forming regions; and Jameson-Wolf high antigenic index regions, as predicted using the default parameters of these computer programs. These structural or functional attributes can be generated using the various modules and algorithms of the DNA*STAR program set on default parameters.

[0324] Among preferred nucleic acids encoding fragments in this regard are those that encode fragments which comprise regions of the polypeptides that combine several structural features, such as several of the features set out above or below.

[0325] In another embodiment, nucleic acids may encode polypeptides which comprise or consist of one or more fragments (e.g., regions). For a nucleic acids encoding a polypeptide comprising or consisting of the amino acid sequence of two or more fragments (e.g., regions), the encoded fragments (e.g., regions) may be contiguous with one another. In one embodiment, the encoded fragments (e.g., regions) are not contiguous with one another, i.e., they are separated by one or more amino acid residues.

[0326] Preferably, the nucleic acids encode fragments (e.g., regions) which align with the corresponding regions of the full length polypeptide such that they are separated by the same number of amino acid residues as separate them in the full length polypeptide or the full length polymerase (e.g., the polypeptides of SEQ ID NOS:14-25 with or without the N-terminal amino acids encoded by the vectors, (or the polymerases encoded by the deposited clones), or alternatively, the polypeptides of SEQ ID NOS:27-34.

[0327] Nucleic acids may encode fragments containing antigenic regions (i.e., regions to which an antibody will bind; epitopes) of the polypeptides of the invention. Nucleic acids may encode antigenic regions as small as 6 amino acids.

[0328] The selection of nucleic acids encoding fragments bearing an antigenic region is described above. See, e.g., Sutcliffe, J. G., Shinnick, T. M., Green, N. and Learner, R. A., Science 219:660-666 (1983).

[0329] Nucleic acids encoding antigenic fragments preferably encode a sequence of at least seven, more preferably at least nine and most preferably between about 15 to about 30 amino acids. However, nucleic acids may encode a larger portion such as about 30 to about 50 amino acids, or any length up to and including the entire amino acid sequence of a polypeptide of the invention.

[0330] In the present invention, nucleic acids may encode antigenic fragments which preferably contain a sequence of at least 4, at least 5, at least 6, at least 7, more preferably at least 8, at least 9, at least 10, at least 11, at least 12, at least 13, at least 14, at least 15, at least 20, at least 25, at least 30, at least 40, at least 50, and, most preferably, between about 15 to about 30 amino acids. Preferred nucleic acids encoding polypeptides comprising antigenic fragments are at least 10, 15, 20, 25, 30, 35, 40, 45, 50, 55, 60, 65, 70, 75, 80, 85, 90, 95, or 100 amino acid residues in length. Additional non-exclusive preferred nucleic acids which encode antigenic fragments include nucleic acids encoding the fragments disclosed herein, as well as portions thereof. Preferred antigenic fragments include the fragments disclosed herein, as well as any combination of two, three, four, five or more of these fragments.

[0331] Polynucleotides comprising nucleic acids encoding one or more antigenic fragments may encode a carrier protein, such as an albumin, either separately or fused in frame the antigenic fragment.

[0332] Polynucleotides of the invention may comprise or consist of nucleic acids encoding variants of the full length polypeptide or the fall length polymerase (e.g., the polypeptides of SEQ ID NOS:14-25 with or without the N-terminal amino acids encoded by the vectors, variants of the polypeptides encoded by the deposited clones, and variants of the fragments described above. Encoded variants include polypeptides which are at least 80%, 81%, 82%, 83%, 84%, 85%, 86%, 87%, 88%, 89%, 90%, 91%, 92%, 93%, 94%, 95% 96%, 97%, 98%, or 99% identical to a polypeptide encoded by a deposited clone, to a polypeptide of SEQ ID NOS:14-25, or to a fragment described above.

[0333] The invention includes nucleic acids encoding variants which may show a functional activity. Preferably, nucleic acids encode variants which demonstrate a functional activity such as antigenicity or an enzymatic activity described above (e.g., a DNA polymerase activity such as DNA-dependent DNA polymerase activity and/or reverse transriptase activity).

[0334] Polynucleotide variants include nucleotide deletions, insertions, inversions, repeats, and substitutions. Polynucleotide variants also include nucleic acids encoding polypeptide deletions, insertions, inversions, repeats, and substitutions (e.g., conservative substitutions, non-conservative substitutions, type substitutions (for example, substituting one hydrophilic residue for another hydrophilic residue, but not a strongly hydrophilic for a strongly hydrophobic, as a rule), primary shifts, primary transpositions, secondary transpositions, and coordinated replacements).

[0335] Nucleic acids may encode polypeptide variants in which more than one amino acid (e.g., 2, 3, 4, 5, 6, 7, 8, 9 and 10) is substituted with another amino acid as described above (either conservative or nonconservative). The substituted amino acids can occur in the full length form of the polypeptide, as well as in the fragments described above.

[0336] Nucleic acids may encode variants which contain at least one amino acid substitution, but not more than 50 amino acid substitutions, even more preferably, not more than 40 amino acid substitutions, still more preferably, not more than 30 amino acid substitutions, and still even more preferably, not more than 20 amino acid substitutions. Of course, in order of increasing preference, it is preferable for a nucleic acid to encode a variant containing at least one, but not more than 10, 9, 8, 7, 6, 5, 4, 3, 2 or 1 amino acid substitutions. In specific embodiments, the number of additions, substitutions, and/or deletions in the encoded polypeptide (e.g., the full length form and/or fragments described herein), is 1-5, 5-10, 5-25, 5-50, 10-50 or 50-150. Encoded variants may preferably contain conservative amino acid substitutions.

[0337] Typically seen as conservative substitutions are the replacements, one for another, among the aliphatic amino acids Ala, Val, Leu and Ile; interchange of the hydroxyl residues Ser and Thr, exchange of the acidic residues Asp and Glu, substitution between the amide residues Asn and Gln, exchange of the basic residues Lys and Arg and replacements among the aromatic residues Phe, Tyr. (See Table 41).

[0338] Of additional special interest are also substitutions of charged amino acids with another charged amino acid or with neutral amino acids. This may result in proteins with improved characteristics such as less aggregation. Prevention of aggregation is highly desirable. Aggregation of proteins can result in a reduced activity.

[0339] Polynucleotides of the invention may be altered by being subjected to random mutagenesis by error-prone PCR, random nucleotide insertion or other methods prior to recombination. Polynucleotides of the invention may be produced by DNA shuffling, gene-shuffling, motif-shuffling, exon-shuffling, and/or codon-shuffling (collectively referred to as “DNA shuffling”). DNA shuffling involves the assembly of two or more DNA segments by homologous or site-specific recombination to generate variation in the polynucleotide sequence. DNA shuffling may be employed to modulate the activities of polypeptides of the invention, such methods can be used to generate polypeptides with altered activity. See, generally, U.S. Pat. Nos. 5,605,793; 5,811,238; 5,830,721; 5,834,252; 5,837,458; and 6,444,468; and Patten et al., Curr. Opinion Biotechnol. 8:724-33 (1997); Harayama, Trends Biotechnol. 16(2):76-82 (1998); Hansson, et al., J. Mol. Biol. 287:265-76 (1999); and Lorenzo and Blasco, Biotechniques 24(2):308-13 (1998). Polynucleotides of the invention encode contain one or more components, motifs, sections, parts, domains, fragments, etc., of a polypeptide of the invention joined to one or more components, motifs, sections, parts, domains, fragments, etc. of one or more heterologous molecules, preferably the polymerases in SEQ ID NOS:14-25.

[0340] Nucleic acids encoding fragments, mutants, variants, or full length polypeptides of the invention may be “free-standing,” or comprised within a larger polynucleotide of which the nucleic acid encoding the fragment, mutant, variant, or full length polypeptide forms a part or region.

[0341] Thus, polynucleotides may encode one or more additional amino acids and/or one or more heterologous sequences such as those described herein. For instance, polynucleotides may comprise a codon for methionine added to the 5′ end of the nucleic acid encoding the polypeptide, such that the encoded polypeptide comprises a Met residue at the N-terminus, thus allowing for recombinant expression. Also, the polynucleotide may comprise a nucleic acid encoding additional a sequence of amino acids, particularly charged amino acids, which may fused to the N-terminus of the encoded polypeptide to improve stability and persistence, in the host cell, during purification, or during subsequent handling and storage. A preferred polynucleotide encodes a fusion protein comprising a heterologous region from immunoglobulin that is useful to solubilize proteins.

[0342] Thus, polynucleotides may comprise the nucleic acids above and may also encode one or more additional amino acids and/or one or more heterologous polypeptides. Heterologous polypeptides include secretory or leader sequences, pro-sequences, tags or other sequences which aid in purification, such as multiple histidine residues, or an additional sequence for stability during recombinant production.

[0343] Preferably, polynucleotides encode polypeptides which demonstrate a functional activity such as an enzymatic activity described above (e.g., a DNA polymerase activity such as DNA-dependent DNA polymerase activity and/or reverse transriptase activity) or antigenicity.

[0344] As indicated, nucleic acid molecules of the present invention which encode a polypeptide of the invention may include, but are not limited to those encoding the amino acid sequence of the polypeptide (e.g., full length, fragment, mutant, or variant) by itself; the coding sequence for the polypeptide and additional sequences, such as those encoding the leader or secretory sequence, such as a pre-, or pro- or prepro-protein sequence; the coding sequence of the polypeptide, with or without the aforementioned additional coding sequences, together with additional, non-coding sequences, including for example, but not limited to introns and non-coding 5′ and 3′ sequences, such as the transcribed, non-translated sequences that play a role in transcription, mRNA processing, including splicing and polyadenylation signals for eucaryotic expression, for example—ribosome binding and stability of mRNA; an additional coding sequence which codes for additional amino acids, such as heterologous sequences, for example those which provide additional functionalities. Thus, the sequence encoding the polypeptide may be fused to a marker sequence, such as a sequence encoding a peptide which facilitates purification of the fused polypeptide. In certain preferred embodiments of this aspect of the invention, the marker amino acid sequence is a hexa-histidine peptide, such as the tag provided in a pQE vector (Qiagen, Inc.), among others, many of which are commercially available. As described in Gentz et al., Proc. Natl. Acad. Sci. USA 86:821-824 (1989), for instance, hexa-histidine provides for convenient purification of the fusion protein. The “HA” tag is another peptide useful for purification which corresponds to an epitope derived from the influenza hemagglutinin protein, which has been described by Wilson et al., Cell 37: 767 (1984). As discussed below, other such nucleic acids encoding fusion proteins include those encoding a polypeptide of the invention fused to Fc at the N- or C-terminus.

### 3. Cloning and Expression of the Polypeptides of the Invention.

[0345] Organisms from which to clone polypeptides of the invention (e.g., thermophilic eubacteria) can be isolated from many sources, for example, a compost pile. Suitable organisms include, but are not limited to, archaeabacteria and eubacteria. Nucleic acids encoding polypeptides of the invention may be cloned from eubacteria from one or more of the genera Acanthamoeba, Acinetobacter, Actinomyces, Actinomyces, Agrobacterium, Anisakids, Ascaris, Aspergillus, Azomonas, Azotobacter, Babesia, Bacillus, Bacteroides, Balantidium, Bdellovibrio, Bifidobacterium, Bordetella, Borrelia, Bradyrhizobium, Brucella, Caldibacillus, Caldicellulosiruptor, Campylobacter, Candida, Ceratocystis, Chlamydia, Chlorobium, Chloroflexus, Chromatium, Citrobacter, Clostridium, Corynebacterium, Coxiella, Cryphonectria, Cryptosporidium, Dictyoglomus, Echinococcus, Etamoeba, Enterobacter, Enterobius, Enterococcus, Escherichia, Francisella, Fusobacterium, Gambierdiscus, Gardnerella, Gelidium, Giardia, Haloarcula, Halobacterium, Helicobacter, Haemophilus, Isospora, Klebsiella, LactoBacillus, Legionella, Leptospira, Listeria, Moraxella, Mucor, Mycobacterium, Mycoplasma, Naegleria, Neisseria, Necator, Nocardia, Nosema, Paragonimus, Pasteurella, Penicillium, Phytophthora, Pityrosporum, Plasmodium, Pneumocystis, Propionibacterium, Proteus, Pseudomonas, Rhizopus, Rickettsia, Rhizobium, Rhodopseudomonas, Saccharomyces, Salmonella, Schizosaccharomyces, Serratia, Shigella, Schistosoma, Staphylococcus, Stella, Streptococcus, Taenia, Thermatoga, Thermus, Toxoplasmosis, Treponema, Trichinella, Trichomonas, Tripanosoma, Veillonella, Vibrio, Yersinia and used in the practice of the present invention. Nucleic acids encoding polypeptides of the invention may be cloned from archaeabacteria from one or more of the genera Pyrodictium, Thermoproteus, Thermococcus, Methanococcus, Methanobacterium, Methanomicrobium, and Halobacterium.

[0346] In some embodiments, a nucleic acid encoding a polypeptide of the invention may be cloned from a suitable organism including, but not limited to, those listed above. In some embodiments, a nucleic acid encoding such a polypeptide may be cloned from one or more eubacteria including, but not limited to, Clostridium spp. (e.g., Clostridium stercorarium, Clostridium thermosulfurogenes, etc.), Caldibacillus spp. (e.g., Caldibacillus cellulovorans CompA.2), Caldicellulosiruptor spp. (e.g., Caldicellulosiruptor Tok13B, Caldicellulosiruptor Tok7B, Caldicellulosiruptor RT69B), Bacillus spp. (e.g., Bacillus caldolyticus EA1), Thermus spp. (e.g., Thermus RT41A), Dictyoglomus spp. (e.g., Dictyoglomus thermophilum), Spirochaete spp., and Tepidomonas spp.

[0347] Clostridium stercorarium was obtained from Watkato University. Clostridium stercorarium (isolated from compost) is available as ATCC 35414. Another suitable source from which to isolate a gene coding for a polypeptide of the present invention is Clostridium thermosulfurogenes. Clostridium thermosulfurogenes was obtained from a thermal spring in Yellowstone Notional Park, USA and is available as ATCC 33743. Other similar organisms can be isolated from thermal environments or can be obtained from various depositories.

[0348] To clone a gene encoding a polypeptide of the invention, for example, a eubacterial DNA polymerase, isolated DNA that encodes the polymerase is obtained from bacterial cells using standard techniques and may be used to construct a recombinant DNA library in a vector. Any vector can be used to clone wild type or mutant polypeptides of the present invention. However, the vector used is preferably compatible with the host in which the recombinant DNA library will be transformed.

[0349] Prokaryotic vectors for constructing a library include plasmids such as those capable of replication in E. coli, for example, pBR322, ColE1, pSC101, pUC-vectors (pUC18, pUC19, etc.: In: Molecular Cloning, A Laboratory Manual, Cold Spring Harbor Laboratory Press, Cold Spring Harbor, N.Y. (1982); and Sambrook, et al., In: Molecular Cloning A Laboratory Manual (2d ed.) Cold Spring Harbor Laboratory Press, Cold Spring Harbor, N.Y. (1989)). Bacillus plasmids include pC194, pC221, pC217, etc. Such plasmids are disclosed by Glyczan, T. in: The Molecular Biology Bacilli, Academic Press, York (1982), 307-329. Suitable Streptomyces plasmids include pIJ101 (Kendall, et al, J. Bacteriol 169:4177-4183 (1987)). Pseudomonas plasmids are reviewed by John, et al, (Rad. Insec. Dis. 8:693-704 (1986)), and Igaki, (Jpn. J. Bacteriol. 33:729-742 (1978)). Broad-host range plasmids or cosmids, such as pCP13 (Darzins and Chakrabarbary, J. Bacteriol. 159:9-18, 1984) can also be used for the present invention. Preferred vectors for cloning the genes of the present invention are prokaryotic vectors. For example pET and pUC vectors can be used to clone genes of the present invention.

[0350] A preferred host for cloning wild type or mutant DNA polymerase genes of the invention is a prokaryotic host. A preferred prokaryotic host is E. coli. However, wild type or mutant DNA polymerase genes of the present invention may be cloned in other prokaryotic hosts including, but not limited to, Escherichia, Bacillus, Streptomyces, Pseudomonas, Salmonella, Serratia, and Proteus. Bacterial hosts of particular interest include E. coli BL21SI, which may be obtained from Invitrogen Corporation, Carlsbad, Calif.

[0351] Eukaryotic hosts for cloning and expression of wild type or mutant DNA polymerases of the present invention include yeast, fungi, insect and mammalian cells. Expression of the desired DNA polymerase in such eukaryotic cells may require the use of eukaryotic regulatory regions which include eukaryotic promoters. Cloning and expressing wild type or mutant genes encoding polypeptides of the invention in eukaryotic cells may be accomplished by known techniques using known eukaryotic vector systems.

[0352] Once a DNA library has been constructed in a particular vector, an appropriate host can be transformed by one of many well-known techniques and transformed host cells may be screened for a desired activity. For example transformed colonies may be plated at a density of approximately 200-300 colonies per petri dish. Colonies can then be screened for expression of a heat stable DNA polymerase by transferring transformed colonies to nitrocellulose membranes. After the transferred cells are grown on the membranes (approximately 12 hours), the cells are lysed by standard techniques, and the membranes are then treated at 95° C. for 5 minutes to inactivate the endogenous E. coli enzyme. Other procedures can be used, for example, other temperatures may be used to inactivate host polymerases depending on the host used and the temperature stability of the DNA polymerase to be cloned. Stable DNA polymerase activity can then be detected by assaying for the presence of DNA polymerase activity using any of the well known techniques. See e.g., Sanger, et al., Gene 97:119-123 (1991), which is hereby incorporated by reference in its entirety. A gene encoding a DNA polymerase of the present invention can be cloned for example by using the procedure described by Sagner, et al., supra.

[0353] Recombinant hosts, each containing a nucleic acid encoding a polypeptide of the invention, have been made. The genes encoding Clostridium stercorarium, Clostridium thermosulfurogenes, Caldibacillus cellulovorans CompA.2, Caldicellulosiruptor Tok 13B.1, Caldicellulosiruptor Tok7B.1, Caldicellulosiruptor Rt69B.1, Bacillus caldolyticus EA1, Thermus Rt41A.1, Dictyoglomus thermophilum, Caldicellulosiruptor saccharolyticus, Spirochaete, and Tepidomonas DNA polymerases have been used to generate recombinant E. coli BL21SI using the vector pET26B. The genes have also been cloned and sequenced and the DNA sequences are represented in SEQ ID NOS: 2-13. The corresponding amino acid sequences are represented in SEQ ID NOS:14-25. The genes can be inserted into other plasmids and/or hosts for expression.

### 4. Enhancing Expression of the Polypeptides of the Invention.

[0354] To optimize expression of a wild type or mutant polypeptide of the present invention, a nucleic acid sequence encoding the polypeptide may be operatively linked to a promoter, for example, an inducible or constitutive promoter. Suitable promoters are well known to those skilled in the art and may be selected to express high levels of a polypeptide in a recombinant host. Similarly, high copy number vectors, well known in the art, may be used to achieve high levels of expression. Inducible, highly active promoters may be used in conjunction with high copy number vectors to enhance expression of a polypeptide of the invention in a recombinant host.

[0355] To express a polypeptide in a prokaryotic cell (such as, E. coli, B. subtilis, Pseudomonas, etc.), it is preferred to operably link a nucleic acid sequence encoding the polypeptide to a functional prokaryotic promoter. However, the promoter associated with the coding sequence in its native host may function in prokaryotic hosts allowing expression of the polypeptide of the invention. Thus, natural thermophilic eubacterial promoters (e.g., from Clostridium spp., Caldibacillus spp., Caldicellulosiruptor spp., Bacillus spp., Thermus spp., Dictyoglomus spp., etc.) promoters or other promoters may be used to express the polypeptides of the invention. Such other promoters may be used to enhance expression and may either be constitutive or regulatable (i.e., inducible or derepressible) promoters. Examples of constitutive promoters include the int promoter of bacteriophage λ, and the bla promoter of the β-lactamase gene of pBR322. Examples of inducible prokaryotic promoters include the major right and left promoters of bacteriophage λ (P_{R} and P_{L}), trp, recA, lacZ, lacI, tet, gal, trc, and tac promoters of E. coli. The B. subtilis promoters include α-amylase (Ulmanen, et al., J. Bacteriol. 162:176-182 (1985)) and Bacillus bacteriophage promoters (Gryczan, T., In: The Molecular Biology Of Bacilli, Academic Press, New York (1982)). Streptomyces promoters are described by Ward, et al., Mol. Gen. Genet. 203:468-478 (1986)). Prokaryotic promoters are also reviewed by Glick, J. Ind. Microbiol. 1:277-282 (1987); Cenatiempto, Y., Biochimie 68:505-516 (1986); and Gottesman, Ann. Rev. Genet. 18:415-442 (1984). Generally presence of a ribosomal binding site upstream of the gene-encoding sequence is preferred. Such ribosomal binding sites are disclosed, for example, by Gold, et al., Ann. Rev. Microbiol. 35:365-404 (1981).

[0356] To enhance expression of a polypeptide of the invention in a eukaryotic cell, many well known eukaryotic promoters and hosts may be used. Preferably, however, enhanced expression of a polypeptide of the invention is accomplished in a prokaryotic host. A preferred prokaryotic host for overexpressing this enzyme is E. coli.

### 5. Isolation and Purification of the Polypeptides of the Invention.

[0357] Polypeptides of the present invention (e.g., DNA polymerases from thermophilic eubacteria, and fragments and mutants thereof) are preferably produced by fermentation of a recombinant host containing and expressing a cloned polypeptide gene. However, wild type and mutant DNA polymerases of the present invention may be isolated from any organism (e.g., a thermophilic eubacterial strain) that produces a polypeptide of the present invention. Fragments of the polypeptides of the invention are also included in the present invention. Such fragments include proteolytic fragments, deletion fragments and especially fragments having polymerase activity. Preferred fragments include those having an RNA-directed DNA polymerase activity and, optionally, lacking one or more exonuclease activity found in the wild type polypeptide.

[0358] Any nutrient that can be assimilated by a cell or organism naturally expressing a polypeptide of the invention or by a host containing a cloned nucleic acid sequence encoding a polypeptide of the invention may be present in the culture medium. Culture conditions should be selected case by case according to the strain used and the composition of the culture medium. Such selection is routinely practiced by those skilled in the art. Antibiotics may also be added to the media to insure maintenance of vector DNA containing the desired gene to be expressed. Media formulations are described for example in DSM or ATCC Catalogs and Sambrook, et al., In: Molecular Cloning, a Laboratory Manual (2nd ed.), Cold Spring Harbor Laboratory Press, Cold Spring Harbor, N.Y. (1989).

[0359] Cells or organisms naturally expressing the polypeptides of the invention and/or recombinant host cells producing the polypeptide of the invention can be separated from liquid culture, for example, by centrifugation. In general, the collected cells are dispersed in a suitable buffer, and then broken down by ultrasonic treatment, chemical treatment or by other well known procedures to allow extraction of the enzymes by the buffer solution. After removal of cell debris by ultracentrifugation or centrifugation, the polypeptide can be purified by standard protein purification techniques such as extraction, precipitation, chromatography, affinity chromatography, electrophoresis or the like. Assays to detect presence of DNA polymerase during purification are well known in the art and can be used during and/or after conventional biochemical purification methods to determine the presence of these enzymes.

### 6. Uses of the Polypeptides of the Invention.

[0360] Wild type and mutant polypeptides of the present invention may be used to prepare cDNA from RNA templates including mRNA, tRNA, rRNA, nuclear RNA, and total RNA isolated from a sample. Polymerases of the present invention may be used in a method for reverse transcribing RNA into complementary DNA (cDNA) and amplifying the cDNA, comprising:

[0361] (a) providing a first and second primer, wherein the first primer is sufficiently complementary to a target RNA to hybridize therewith;

[0362] (b) hybridizing the first primer to the RNA molecule in the presence of a DNA polymerase of the invention, under conditions such that a cDNA molecule complementary to the target RNA is synthesized;

[0363] (c) treating the reaction mixture to provide single stranded cDNA;

[0364] (d) hybridizing the second primer to the cDNA molecule in the presence of a DNA polymerase of the invention, under conditions such that an extension product is synthesized to provide a double-stranded cDNA molecule; and, optionally,

[0365] (e) amplifying the double-stranded cDNA molecule of (d) (e.g., by a polymerase chain reaction). Amplification may be performed using a polypeptide of the invention and/or an additional polymerase. Suitable additional polymerases, preferably from thermophilic organisms, are known in the art (e.g., Taq DNA polymerase, Pfu DNA polymerase, Tne DNA polymerase, etc.). Methods of reverse transcribing an RNA may be performed in buffers comprising Mg²⁺, which buffers may or may not, and preferably do not, comprise Mn²⁺. Suitable conditions may also comprise the addition of one or more nucleotides, one or more of which may be modified (e.g., may comprise a label such as a fluorescent label and/or a reactive functional group to which a label may be attached).

[0366] The invention also relates to a method of preparing cDNA from messenger RNA (mRNA), comprising:

[0367] (a) contacting RNA with an oligo(dT) primer or other complementary primer to form a complex, and

[0368] (b) contacting the complex formed in step (a) with the polypeptide or mutant of the invention and dNTPs, whereby a cDNA-RNA hybrid is obtained. Methods of preparing a cDNA from an mRNA may be performed in buffers comprising Mg²⁺, which buffers may or may not, and preferably do not, comprise Mn²⁺.

[0369] If the reaction mixture in step (b) further comprises an appropriate oligonucleotide that is complementary to the cDNA being produced, it is also possible to obtain dsDNA following first strand synthesis. Thus, the invention is also directed to a method of preparing dsDNA with the polypeptides, fragments and/or mutants thereof of the present invention.

[0370] A thermostable DNA polymerase for use in amplifying the dsDNA can be used with the polypeptides of the present invention in a coupled reverse transcription/amplification reaction. The same reaction buffer solution can be used for both enzymes thereby replacing prior methods requiring the need to change, adjust or dilute the buffer components including divalent cations, salts, and pH between the reverse transcription and amplification steps.

[0371] DNA polymerases (including thermostable DNA polymerases) that may be used in combination with the polypeptides of the present invention include, but are not limited to, Taq DNA polymerase, Tne DNA polymerase, Tma DNA polymerase, Pfu DNA polymerase, Tfl DNA polymerase, Tth DNA polymerase, Thr DNA polymerase, Pwo DNA polymerase, Bst DNA polymerase, Bca DNA polymerase, VENT DNA polymerase, T7 DNA polymerase, T5 DNA polymerase, DNA polymerase III, Klenow fragment DNA polymerase, Stoffel fragment DNA polymerase, and mutants, fragments or derivatives thereof.

[0372] The present invention is suitable for reverse transcribing and amplifying RNA from a number of sources. The RNA template may be contained within a nucleic acid preparation from an organism. Examples of organisms from which RNA may be prepared include, but are not limited to, animals, plants, yeast, viruses, and/or bacteria. The preparation may contain cell debris and other components, crude or purified total RNA, or crude or purified mRNA. The RNA template may be a population of heterogeneous RNA molecules in a sample or a specific target RNA molecule. The RNA may be produced in a cell or using a cell free system. RNA from any source can be used in the present invention.

[0373] RNA suitable for use in the present methods may be contained in any source that comprises RNA, for example in a biological sample hypothesized to contain a specific target RNA. The biological sample may be a heterogeneous sample in which RNA is a small portion of the sample, as in for example, a blood sample or a patient tissue sample, for example, one obtained by a biopsy. Thus, the method is useful for clinical detection and diagnosis. The RNA target may be indicative of a specific disease or infectious agent.

[0374] The wild type and mutant polypeptides of the present invention may be used in well known assays such as DNA sequencing, DNA labeling, DNA amplification and cDNA synthesis reactions. For example, eubacterial DNA polymerase mutants devoid of or substantially reduced in 5′-to-3′ exonuclease activity, or containing one or mutations in the O-helix that make the enzyme nondiscriminatory for dNTPs and ddNTPs (e.g., a Phe754-to-Tyr754 mutation of SEQ ID NO:2) are especially useful for DNA sequencing, DNA labeling, and DNA amplification reactions and cDNA synthesis.

[0375] Moreover, mutants containing two or more of these properties are also especially useful for DNA sequencing, DNA labeling, DNA amplification or cDNA synthesis reactions. As is well known, sequencing reactions (isothermal DNA sequencing and cycle sequencing of DNA) require the use of DNA polymerases. Dideoxy-mediated sequencing involves the use of a chain-termination technique which uses a specific polymer for extension by DNA polymerase, a base-specific chain terminator and the use of polyacrylamide gels to separate the newly synthesized chain-terminated DNA molecules by size so that at least a part of the nucleotide sequence of the original DNA molecule can be determined. Specifically, a DNA molecule is sequenced by using four separate DNA sequence reactions, each of which contains different base-specific terminators. For example, the first reaction may contain a G-specific terminator, the second reaction may contain a T-specific terminator, the third reaction may contain an A-specific terminator, and a fourth reaction may contain a C-specific terminator. Preferred terminator nucleotides include dideoxyribonucleoside triphosphates (ddNTPs) such as ddATP, ddTTP, ddGTP, ddITP and ddCTP. Analogs of dideoxyribonucleoside triphosphates may also be used and are well known in the art.

[0376] When forming a DNA molecule, ddNTPs lack a hydroxyl residue at the 3′ position of the ribose ring and thus, although they can be incorporated by DNA polymerases into the growing DNA chain, the absence of the 3′-hydroxy residue prevents formation of the next phosphodiester bond resulting in termination of extension of the DNA molecule. Thus, when a small amount of one ddNTP is included in a sequencing reaction mixture, there is competition between extension of the chain and base-specific termination resulting in a population of synthesized DNA molecules which are shorter in length than the DNA template to be sequenced. By using four different ddNTPs in one or more enzymatic reactions, populations of the synthesized DNA molecules can be separated by size so that at least a part of the nucleotide sequence of the original DNA molecule can be determined. DNA sequencing by dideoxy-nucleotides is well known and is described by Sambrook, et al., In: Molecular Cloning, a Laboratory Manual, Cold Spring Harbor Laboratory Press, Cold Spring Harbor, N.Y. (1989). Sequencing apparatuses based on dideoxy termination are commercially available. Other sequencing protocols, e.g., using fluorescent dyes, are known in the art and are also suitable for use with the present invention. As will be readily recognized, the polypeptides and mutants thereof of the present invention may be used in such sequencing reactions.

[0377] As is well known, detectably labeled nucleotides are typically included in sequencing reactions. Any number of labeled nucleotides can be used in sequencing (or labeling) reactions, including, but not limited to, radioactive isotopes, fluorescent labels, chemiluminescent labels, bioluminescent labels, and enzyme labels. Wild type and mutant polypeptides of the present invention may be useful for incorporating [α-S] nucleotides ([α-S]dATP, [α-S]dTTP, [α-S]dCTP and [α-S]dGTP) during sequencing (or labeling) reactions. Thus, the polypeptides of the present invention are particularly suited for sequencing or labeling DNA molecules with [α-³⁵S]dNTPs.

[0378] Polymerase chain reaction (PCR), a well known DNA amplification technique, is a process by which DNA polymerase and deoxyribonucleoside triphosphates are used to amplify a target DNA template. In PCR reactions, two primers, one complementary to the 3′ termini (or near the 3′-terminus) of the first strand of the DNA molecule to be amplified, and a second primer complementary to the 3′ termini (or near the 3′-terminus) of the second strand of the DNA molecule to be amplified, are hybridized to their respective DNA strands. After hybridization, DNA polymerase, in the presence of deoxyribonucleoside triphosphates, allows synthesis of a third DNA molecule complementary to the first strand and a fourth DNA molecule complementary to the second strand of the DNA molecule to be amplified. This synthesis results in two double stranded DNA molecules. Such double stranded DNA molecules may then be used to provide DNA templates for synthesis of additional DNA molecules by providing a DNA polymerase, primers, and deoxyribonucleoside triphosphates. As is well known, the additional synthesis is carried out by “cycling” the original reaction (with excess primers and deoxyribonucleoside triphosphates) allowing multiple denaturing and synthesis steps. Typically, denaturing of double stranded DNA molecules to form single stranded DNA templates is accomplished by high temperatures. DNA polymerases of the present invention may be heat stable DNA polymerases at higher temperatures if appropriate mutations are introduced, and thus will survive such thermal cycling during DNA amplification reactions and would then be suited for PCR reactions, particularly where high temperatures are used to denature the DNA molecules during amplification.

7. Antibodies that Specifically Bind the Polypeptides of the Invention

[0379] The present invention concerns the production and use of molecules (polypeptides and antibodies) that are capable of “specific binding” to one another. As used herein, a molecule is said to be capable of “specific binding” to another molecule, if such binding is dependent upon the respective structures of the molecules. The known capacity of an antibody to bind to an antigen is an example of “specific binding.” Such interactions are in contrast to non-specific binding between classes of compounds, irrespective of their chemical structure (such as the binding of proteins to nitrocellulose, etc.). Most preferably, the antibodies of the present invention exhibit “highly specific binding,” such that they will be incapable or substantially incapable of binding to closely related polypeptides (e.g., the polymerases of SEQ ID NOS:27-34). Indeed, preferred antibodies of the present invention exhibit the capacity to bind to a polypeptide of SEQ ID NOS:14-25 or a polypeptide encoded by a deposited clone, but are substantially incapable of binding the polymerases of SEQ ID NOS:27-34; such antibodies are capable of highly specific binding to a polypeptide of SEQ ID NOS:14-25 or a polypeptide encoded by a deposited clone, as that phrase is used herein. In preferred embodiments, antibodies of the invention do not include antibodies that bind to the polymerases of SEQ ID NOS:27-34.

[0380] However, it is immediately apparent to one of ordinary skill that even antibodies that bind to other proteins, i.e., which are cross-reactive because they recognize an epitope (antigenic region) shared between a polypeptide of the invention and another polypeptide, are still useful for “hot start” of methods of the invention. The present invention further relates to antibodies and T-cell antigen receptors (TCR) which specifically bind the polypeptides of the present invention. Antibodies may be polyclonal and/or monoclonal. They may be prepared against an entire polypeptide or against a fragment of the polypeptide.

[0381] The present invention concerns the production and use of molecules (polypeptides and antibodies) that are capable of “specific binding” to one another. As used herein, a molecule is said to be capable of “specific binding” to another molecule, if such binding is dependent upon the respective structures of the molecules. The known capacity of an antibody to bind to an antigen is an example of “specific binding.” Such interactions are in contrast to non-specific binding between classes of compounds, irrespective of their chemical structure (such as the binding of proteins to nitrocellulose, etc.). Most preferably, the antibodies of the present invention exhibit “highly specific binding,” such that they will be incapable or substantially incapable of binding to closely related polypeptides (e.g., the polymerases of SEQ ID NOS:27-34). Indeed, preferred antibodies of the present invention exhibit the capacity to bind to a polypeptide of SEQ ID NOS:14-25 or a polypeptide encoded by a deposited clone, but are substantially incapable of binding the polymerases of SEQ ID NOS:27-34; such antibodies are capable of highly specific binding to a polypeptide of SEQ ID NOS:14-25 or a polypeptide encoded by a deposited clone, as that phrase is used herein. In preferred embodiments, antibodies of the invention do not include antibodies that bind to the polymerases of SEQ ID NOS:27-34.

[0382] However, it is immediately apparent to one of ordinary skill that even antibodies that bind to other proteins, i.e., which are cross-reactive because they recognize an epitope (antigenic region) shared between a polypeptide of the invention and another polypeptide, are still useful for “hot start” of methods of the invention.

[0383] The antibodies of the present invention include IgG (including IgG1, IgG2, IgG3, and IgG4), IgA (including IgA1 and IgA2), IgD, IgE, IgM, and IgY. As used herein, the term “antibody” (Ab) is meant to include whole antibodies, including single-chain whole antibodies, and antigen-binding fragments thereof. In some embodiments, antigen-binding fragments may be mammalian antigen-binding antibody fragments that include, but are not limited to, Fab, Fab′ and F(ab′)2, Fd, single-chain Fvs (scFv), single-chain antibodies, disulfide-linked Fvs (sdFv) and fragments comprising either a VL or VH domain.

[0384] Antibodies of the invention may be prepared from any animal origin including birds and mammals. Preferably, the antibodies prepared from mammals, (e.g., human, murine, rabbit, goat, guinea pig, camel, or horse). Other preferred sources may be avian (e.g., chicken).

[0385] Antibodies may be used for the detection of the polypeptides in an immunoassay, such as ELISA, Western blot, radioimmunoassay, enzyme immunoassay, and may be used in immunocytochemistry. In some embodiments, an anti-polypeptide antibody may be in solution and the polypeptide to be recognized may be in solution (e.g., an immunopreciptitation) or may be on or attached to a solid surface (e.g., a Western blot). In other embodiments, the antibody may be attached to a solid surface and the polypeptide may be in solution (e.g., affinity chromatography).

[0386] Antibodies to the polypeptides of the invention may be used to determine the presence, absence or amount of one or more of the polypeptides in a sample. The amount of specifically bound polypeptide may be determined using an antibody to which is attached a label or other marker, such as a radioactive, a fluorescent, or an enzymatic label. Alternatively, a labeled secondary antibody (e.g., an antibody that recognizes the antibody that is specific to the polypeptide) may be used to detect a polypeptide-antibody complex between the specific antibody and the polypeptide.

[0387] Antibodies of the invention may be used to modulate one or more activities of the polypeptides of the invention. For example, a polypeptide of the invention may be contacted with an antibody under conditions such that the antibody binds to the polypeptide. A polypeptide bound by antibody may have the same or different activities as the same polypeptide unbound. In some embodiments, a polypeptide of the invention bound by an antibody of the invention may have a reduced, substantially reduced or eliminated enzymatic activity while bound. For example, a bound polypeptide may display no detectable RNA-dependent and/or DNA-dependent DNA polymerase activity. Preferably, the activity is recovered when the antibody is no longer bound. Thus, in the previous example, RNA-dependent and/or DNA-dependent DNA polymerase activity may be recovered when the polypeptide is no longer bound by the antibody. In some embodiments, antibodies of the present invention may bind to a polypeptide of the invention under some conditions (e.g., temperature, ionic strength, etc.) and may not bind under other conditions (e.g., at an elevated temperature).

[0388] One or more of the polypeptides of the invention may be used as immunogens to prepare polyclonal an/or monoclonal antibodies capable of binding the polypeptides using techniques well known in the art (Harlow & Lane, Antibodies: A Laboratory Manual, Cold Spring Harbor Laboratory, Cold Spring Harbor, N.Y., 1988). In brief, antibodies are prepared by immunization of suitable subjects (e.g., mice, rats, rabbits, goats, etc.) with all or a part of the polypeptides of the invention. If the polypeptide or fragment thereof is sufficiently immunogenic, it may be used to immunize the subject. If necessary or desired to increase immunogenicity, the polypeptide or fragment may be conjugated to a suitable carrier molecule (e.g., BSA, KLH, and the like). Polypeptides of the invention or fragments thereof may be conjugated to carriers using techniques well known in the art. For example, they may be directly conjugated to a carrier using, for example, carbodiimide reagents. Other suitable linking reagents are commercially available from, for example, Pierce Chemical Co., Rockford, Ill.

[0389] Suitably prepared polypeptides of the invention or fragments thereof may be administered by injection over a suitable time period. They may be administered with or without the use of an adjuvant (e.g., Freunds). They may be administered one or more times until antibody titers reach a desired level.

[0390] In some embodiments, it may be desirable to produce monoclonal antibodies to the polypeptides of the invention or fragments thereof. Monoclonal antibodies can be prepared from the immune cells of animals (e.g., mice, rats, etc.) immunized with all or a portion of one or more polypeptide of the invention using conventional procedures, such as those described by Kohler and Milstein, Nature, 256, pp. 495-497 (1975). Hybridoma cell lines may be prepared by isolating antibody secreting cells of the host animal from lymphoid tissue (such as the spleen) and fusing them with mouse myeloma cells (for example, SP2/0-Ag14 murine myeloma cells) in the presence of polyethylene glycol. The fused cells may be diluted into selective media and plated in multiwell tissue culture dishes. The hybridoma cells which secrete the desired antibodies can then be identified testing the supernatants for antibodies of the desired specificity using standard techniques (e.g., ELISA, etc.). The resultant hybridoma cells can be grown in static culture, hollow fiber bioreactors or used to produce ascitic tumors in mice in order to produce the monoclonal antibodies. Thus, the present invention provides monoclonal antibodies specific to the polypeptides of the invention, as well as cell lines producing such monoclonal antibodies.

[0391] In some embodiments, it may be desirable to use a fragment of an antibody that is capable of binding a polypeptide of the invention or fragment thereof. For example, Fab, Fab′, of F(ab′)₂ fragments may be produced using techniques well known in the art.

[0392] In some embodiments, the present invention contemplates a composition comprising a polypeptide of the invention and an antibody to the polypeptide of the invention. In such a composition, the antibody may be bound to the polypeptide under one set of conditions (e.g., temperature, ionic strength, etc.) and may dissociate from the polypeptide under other conditions (e.g., at an increased temperature).

### 8. Reverse Transcriptase Enzymes for Use in the Invention

[0393] Enzymes for use in compositions, methods and kits of the invention include any enzyme having reverse transcriptase activity. Such enzymes include, but are not limited to, retroviral reverse transcriptase, retrotransposon reverse transcriptase, hepatitis B reverse transcriptase, cauliflower mosaic virus reverse transcriptase, bacterial reverse transcriptase, Tth DNA polymerase, Taq DNA polymerase (Saiki, R. K., et al., Science 239:487-491 (1988); U.S. Pat. Nos. 4,889,818 and 4,965,188), Tne DNA polymerase (PCT Publication No. WO 96/10640), Tma DNA polymerase (U.S. Pat. No. 5,374,553) and mutants, fragments, variants or derivatives thereof (see, e.g., commonly owned U.S. Pat. Nos. 5,948,614 and 6,015,668, which are incorporated by reference herein in their entireties). Preferably, reverse transcriptases for use in the invention include retroviral reverse transcriptases such as M-MLV reverse transcriptase, AMV reverse transcriptase, RSV reverse transcriptase, RAV reverse transcriptase, MAV reverse transcriptase, and generally ASLV reverse transcriptases. As will be understood by one of ordinary skill in the art, modified reverse transcriptases may be obtained by recombinant or genetic engineering techniques that are routine and well-known in the art. Mutant reverse transcriptases can, for example, be obtained by mutating the gene or genes encoding the reverse transcriptase of interest by site-directed or random mutagenesis. Such mutations may include point mutations, deletion mutations and insertional mutations. For example, one or more point mutations (e.g., substitution of one or more amino acids with one or more different amino acids) may be used to construct mutant reverse transcriptases for use in the present invention.

[0394] Preferred enzymes for use in the invention include those that are reduced, substantially reduced, or lacking in RNase H activity. Such enzymes that are reduced or substantially reduced in RNase H activity may be obtained by mutating, for example, the RNase H domain within the reverse transcriptase of interest, for example, by introducing one or more (e.g., one, two, three, four, five, ten, twelve, fifteen, twenty, thirty, etc.) point mutations, one or more (e.g., one, two, three, four, five, ten, twelve, fifteen, twenty, thirty, etc.) deletion mutations, and/or one or more (e.g., one, two, three, four, five, ten, twelve, fifteen, twenty, thirty, etc.) insertion mutations as described above. In some embodiments, the reverse transcriptase of the invention does not contain a modification or mutation in the RNase H domain and preferably does not contain a modification which reduces RNase H activity. In one aspect, the reverse transcriptase of the invention has 90%, 95%, or 100% of the RNase H activity compared to the corresponding wildtype reverse transcriptase.

### 9. Kits

[0395] The wild type and mutant polypeptides of the invention are suited for the preparation of a kit. Kits comprising wild type or mutant polypeptides may be configured for use in any procedure known to those skilled in the art. Suitable kits may be prepared for, for example, cDNA synthesis and/or amplification, detectably labeling DNA molecules, and DNA sequencing. See U.S. Pat. Nos. 4,962,020, 5,173,411, 4,795,699, 5,498,523, 5,405,776 and 5,244,797. Such kits may comprise a carrier that may be compartmentalized to receive in close confinement one or more containers such as vials, test tubes, wells, solid supports, chips and the like. Preferably at least one of such containers contains components or a mixture of components needed to perform DNA sequencing, DNA labeling, DNA amplification, or cDNA synthesis.

[0396] A kit for sequencing DNA may comprise a number of containers each of which may contain one or more components. A first container may, for example, contain a substantially purified sample of a polypeptide of the invention, for example, a DNA polymerase from a thermophilic eubacterium, fragment or mutant thereof. A second container may contain one or a number of types of nucleotides needed to synthesize a DNA molecule complementary to a nucleic acid template. A third container may contain one or a number of different types of dideoxynucleoside triphosphates, optionally labeled with one or more detectable groups. A fourth container may contain pyrophosphatase. In addition to the above containers, additional containers may be included in the kit that contain other components for carrying out a desired procedure, for example, one or a number of DNA primers (e.g., oligo(dT) primers), optionally such primers may be labeled.

[0397] A kit used for amplifying DNA may comprise, for example, a first container containing a substantially or essentially pure preparation of mutant or wild type polypeptide of the invention, for example, a DNA polymerase from a thermophilic eubacterium, and one or a number of additional containers that contain a single type of nucleotide or mixtures of nucleotides. Various primers may or may not be included in a kit for amplifying DNA. In some embodiments, the polypeptides of the invention may be used in a mixture with one or more polypeptides having one or more enzymatic activities (e.g., DNA-dependent DNA polymerases, RNA-dependent DNA polymerases, exonucleases, pyrophosphatases, etc.). Thus, in these mixtures, the portion of the polypeptide of the invention in the mixture may provide less than 50% of the enzymatic activity in the mixture, for example 45%, 35%, 33%, 30%, 25%, 20%, 15%, 10%, 7%, 5%, 2%, 1%, 0.5%, 0.1% of the total DNA-dependent DNA polymerase activity, RNA-dependent DNA polymerase activity, and/or exonuclease activity in the mixture.

[0398] Kits for cDNA synthesis may comprise a first container containing the wild type or mutant DNA polymerase of the invention, a second container may contain one up to four dNTPs and a third container may contain an oligo(dT) primer. See U.S. Pat. Nos. 5,405,776 and 5,244,797. Since the polypeptides of the invention, for example, the polypeptides of SEQ ID NOS:14-25, are also capable of preparing dsDNA, a fourth container may contain an appropriate primer complementary to the first strand cDNA. Kits of the invention may optionally comprise a container containing one or more DNA polymerase enzymes, for example, thermostable DNA polymerase enzymes such as Taq polymerase and/or reverse transcriptases (e.g., retroviral reverse transcriptases) and the like.

[0399] Of course, it is also possible to combine one or more of these reagents in a single tube or other containers. A detailed description of such formulations at working concentrations is described in the International patent application entitled “Stable Compositions for Nucleic Acid Amplification and Sequencing” filed on Aug. 14, 1996, WO 98/06736 which is expressly incorporated by reference herein in its entirety.

[0400] When desired, the kit of the present invention may include one or more containers that contain detectably labeled nucleotides that may be used during the synthesis or sequencing of a DNA molecule. One or a number of labels may be used to detect such nucleotides. Illustrative labels include, but are not limited to, radioactive isotopes, fluorescent labels, chemiluminescent labels, nuclear tags bioluminescent labels and enzyme labels.

### 10. Advantages of the Polypeptides of the Invention.

[0401] As discussed above, the polypeptides of the present invention provide a vast improvement in assays combining reverse transcription and amplification. The need to adjust buffer reaction conditions during the progression of the assay from reverse transcription to amplification is eliminated whether the same or a different enzyme is used for either part of the assay.

[0402] Having now generally described the invention, the same will be more readily understood through reference to the following Examples which are provided by way of illustration, and are not intended to be limiting of the present invention, unless specified.

### Example 1

### Cloning of Polypeptides of the Invention

[0403] DNA polymerase from Clostridium stercorarium cloned into the expression vector pET26B (Novagen Inc., Madison, Wis.) in the BL21SI cell line Invitrogen Corporation, Carlsbad, Calif.), obtained from Macquarie University was purified.

[0404] Conserved motifs found in known bacterial PolI DNA polymerase sequences were identified and degenerate PCR primers were designed for PCR amplification of an internal portion of polI genes from all bacterial divisions. We describe here a method that has allowed the rapid identification and isolation of 13 polI genes from a diverse selection of thermophilic bacteria and report on the biochemical characteristics of nine of the recombinant enzymes. Several enzymes showed significant Reverse Transcriptase activity in the presence of Mg²⁺.

[0405] Thermostable DNA polymerase from Thermus aquaticus (Taq) made the polymerase chain reaction (PCR) feasible, and introduced a powerful technology that complemented recombinant DNA studies and aided in the diagnosis of inherited and infectious diseases (Innis et al., 1990, In PCR Protocols: A Guide to Methods and Applications. Academic Press, San Diego). Taq DNA polymerase also has reverse transcriptase activity (Jones and Foulkes, Nucleic Acids Res. 17, 8387-8388, 1989). The reverse transcriptase activity of a recombinant DNA polymerase from Thermus thermophilus (rTth, (Myers and Gelfand, Biochem. 30, 7661-7666, 1991) has been reported to be one hundred-fold greater than that of Taq DNA polymerase. The Taq and rTth enzymes have significant amino acid sequence similarity, and it is not clear why their abilities to utilize RNA templates are so different. Reverse transcription by thermophilic DNA polymerases has advantages over mesophilic retroviral reverse transcriptases (RTs) such as Moloney murine leukemia virus (M-MLV) and avian myeloblastosis virus (AMV) RT which are commonly used for cDNA synthesis, because the higher reaction temperatures with thermophilic polymerases help destabilize RNA secondary structures which pose problems for mesophilic RTs (DeStefano et al, J. Biol. Chem. 266, 7423-7431, 1991; Harrison et al, Nucleic Acids Res. 26, 3433-3442, 1998; Wu et al, J. Virol. 70, 7132-7142, 1996). The uses and advantages of using thermophilic DNA polymerases for reverse transcription and reverse transcription-coupled PCR amplifications (RT-PCR) have been described (Myers and Gelfand, 1991). However, one of the disadvantages of using rTth DNA polymerase for copying RNA is the requirement for the use of Mn²⁺, rather than Mg², as the divalent metal ion. The presence of Mn²⁺ results in a higher error rates during cDNA synthesis (Cadwell and Joyce, PCR Methods and Applications 2, 28-33, 1992) and in reduced yields of DNA product during PCR amplification (Leung et al, Technique 1, 11-15, 1989). Special measures must be taken during the PCR step of RT-PCR to remove the influence of Mn²⁺ introduced during the reverse transcription step (Myer and Gelfand, 1991).

[0406] Accordingly, we have carried out a survey of a number of thermophilic bacteria to identify DNA polymerases that could be used to copy RNA efficiently at elevated temperatures, exclusively in the presence of Mg²⁺. We have used degenerate oligonucleotide-based PCR (Rose et al., Nucleic Acids Res. 26, 1637-1644, 1998) combined with Genomic Walking PCR (Morris et al, Appl. Environ. Microbiol. 61, 2262-2269, 1998), to obtain the full-length gene sequences of 13 thermophilic polI genes. The degenerate primers were designed to hybridize to DNA coding for two conserved regions identified in an alignment of 24 bacterial PolI sequences. Three forward and three reverse primers were designed to amplify a PCR product of approximately 570 bp. The cloning of the genes, and the purification and preliminary characterization of the gene products are described here. We have identified several thermophilic DNA polymerases that copy RNA efficiently in the presence of Mg²⁺.

### Materials and Methods

[0407] Microorganisms. Clostridium stercorarium (Cst); Clostridium thermosulfurogenes (Cth); Caldibacillus cellulovorans CompA.2 (CA2); Caldicellulosiruptor sp. strain Tok13B.1 (Tok13B); Caldicellulosiruptor saccharolyticus sp. Tok7B. 1 (Tok7B); Caldicellulosiruptor sp. strain Rt69B.1 (RT69B); Bacillus caldolyticus EA1.3 (B.EA1); Thermus sp. Rt41A (RT41A) and Dictyoglomus thermophilum strain Rt46B.1 (Dth) were kindly supplied by Professor Hugh Morgan, Thermophile Research Unit, Waikato University, Hamilton, New Zealand.

[0408] Samples of E. coli BL21(DE3) transformed with a plasmid encoding the indicated polymerase has been deposited with the Agricultural Research Service Culture Collection (NRRL), 1815 North University Street, Peoria, Ill., 61604, USA in accordance with the Budapest Treaty. Entries 11-15 were deposited in E. coli BL21 (SI).

| | | | Strain Desig |
|---|---|---|---|
| | Origin of Polymerase | Abbr. | NRRL |
| 1 | Dictyoglomus thermophilum | Dicty | NRRL B-30617 |
| 2 | Bacillus caldolyticus EA1 | BEA1 | NRRL B-30618 |
| 3 | Thermoanaerobacter AZ3B.1 | AZ3B.1 | NRRL B-30619 |
| 4 | Caldicellulosiruptor Tok13B.1 | Tok13B.1 | NRRL B-30620 |
| 5 | Caldicellulosiruptor | Csac | NRRL B-30621 |
| | saccharolyticus | | |
| 6 | Thermus isolate Rt41A.1 | Rt41A.1 | NRRL B-30622 |
| 7 | Caldicellulosiruptor Tok7B.1 | Tok7B.1 | NRRL B-30623 |
| 8 | Caldicellulosiruptor Rt69B.1 | Rt69B.1 | NRRL B-30624 |
| 9 | Tepidomonas | Tepido | NRRL B-30625 |
| 10 | Spirochaete | Spiro | NRRL B-30626 |
| 11 | Caldibacillus cellulovorans | CompA.2 | NRRL B-30576 |
| | CompA.2 | | |
| 12 | Clostridium thermosulfurogenes | Cth | NRRL B-30577 |
| 13 | Clostridium thermosulfurogenes | Cth NtHis | NRRL B-30579 |
| 14 | Clostridium stercorarium | Cst | NRRL B-30578 |
| 15 | Clostridium stercorarium | Cst-His | NRRL B-30580 |
| | (N-terminal 6-His tag) | | |

[0409] Enzymes. Thermus aquaticus (Taq) DNA polymerase was from Invitrogen Corporation, Carlsbad, Calif. Recombinant Thermus thermophilus (rTth) DNA polymerase was purchased from Applied Biosystems (Foster City, Calif.).

[0410] Thermotoga neapolitana (Tne) DNA polymerase mutated to eliminate 3′ to 5′ and 5′ to 3′ exonuclease activity was cloned, engineered and purified as described in U.S. Pat. No. 6,306,588. SuperScript II reverse transcriptase (SS II RT) was from Invitrogen Corporation, Carlsbad, Calif.

[0411] RNA and DNA. Chloramphenicol acetyl transferase (CAT) cRNA (−900 nt) with a (rA)₄₀ 3′-tail was synthesized by T7 RNA polymerase run-off transcription from linearized plasmid DNA (D'Alessio and Gerard, Nucleic Acids Res. 16, 1999-2014, 1988). Deoxyoligonucleotides were from Invitrogen Corporation, Carlsbad, Calif. cDNA synthesis from CAT cRNA was primed with a DNA 24mer complementary to CAT cRNA that annealed between nucleotides 679 and 692 with its 5′ end 146 nt distant from the first base at the 5′ end of the CAT cRNA (rA)₄₀ tail. (rA)₂₅₀ and (dA)₂₇₀ were from Amersham-Pharmacia (Piscataway, N.J.).

[0412] SDS-PAGE. Purified DNA polymerases were analyzed by SDS-PAGE. Approximately 1 μg of purified protein was loaded onto a 4-20% Tris-glycine gel (Novex, Invitrogen Corporation, Carlsbad, Calif.). The gel was run according to the manufacturer's recommendation and was stained using Gel-code Blue (Pierce, Rockford, Ill.). The Benchmark Protein Ladder was used as a standard (Invitrogen Corporation, Carlsbad, Calif.).

[0413] Removal of DNA from commercial polymerase preparations. Commercial preparations of recombinant Taq polymerase were found to contain trace amounts of DNA encoding the Taq polymerase gene (Carroll, et al., J. Clin. Microbiol. 37, 1999). To digest and remove the contaminating DNA, 2.5 units of the restriction enzyme Sau3AI were added to each 50 μl PCR reaction and the incubated at 37° C. for 30 minutes. The mixture was then heated to 95° C. for 2 minutes to denature the Sau3AI before adding approximately 1 ng of genomic template DNA.

[0414] PCR. PCRs were performed using Platinum Taq (Invitrogen Corporation, Carlsbad, Calif.) or Platinum Pfx (Invitrogen Corporation, Carlsbad, Calif.) according to the manufacturers recommendations. All PCRs were performed using a GeneAmp 2400 (Applied Biosystems), using 30 to 35 cycles and 50 to 70° C. annealing, unless stated otherwise. Genomic walking PCR to obtain full-length gene sequences was carried out as previously described (Morris, et al., 1995; Morris, et al., Appl Environ Microbiol 64(5):1759-65, 1998; Reeves, et al., Appl Environ Microbiol 66(4):1532-7, 2000). When required, PCR products were purified using a Concert gel extraction kit (Invitrogen Corporation, Carlsbad, Calif.).

[0415] When using degenerate primers in the PCR, a step-down method was used where the annealing temperature was lowered from 60° C. to 45° C. by 1° C. per cycle, followed by 35 cycles with a 55° C. annealing temperature.

[0416] Genomic walking to obtain full-length polymerase genes. Genomic walking linker libraries were prepared by digesting 2 μg of genomic DNA to completion in 20 μl, using 20 units of each of the following restriction enzymes: AatII, BamHI, EcoRI, EcoRV, HaeIII, HindIII, HpaI, KpnI, NcoI, PstI, PvuII, RsaI, SacI, SalI, SmaI, SphI, SspI, StuI or XbaI (from MBI Fermentas, Amherst, N.Y., or Roche Diagnostics, Sydney, Australia). The NcoI digested DNA was heat treated to 65° C. for 20 minutes to inactivate the restriction enzyme, as the recognition site for this enzyme is regenerated upon ligation to the linker. Half of each digest was ligated to the appropriate genomic walking linker (GW-linker, 1 μM concentration) using T4 ligase (MBI Fermentas) overnight at 10° C. in 20 μl. Portions of each digest/ligation were diluted to 10⁻¹ in TE buffer for use as PCR template. Gene-specific primers were designed to anneal approximately 50 bp in from the end of known sequence. Two series of the PCR were carried out in 50 μl volumes using either the forward or reverse gene specific primer, the appropriate linker specific primer and 1 μl of one of the diluted linker library template. The PCR program used included a 65-70° C. annealing temperature and a 2 minute extension step, allowing products of up to 2 kb to be amplified: 95° C., 15 minutes, 35 (95° C. 30 seconds, 70° C. 30 seconds, 72° C. 2 minutes) 72° C. 5 minutes. During this study, 13 DNA polymerases genes were isolated using this method, with sizes ranging from 2.5 kb to 2.8 kb, of which nine have been further characterized and are described herein.

[0417] Once the complete DNA sequence of each polI gene had been obtained, oligonucleotide primers were designed for specific amplification of each full-length gene. Restriction sites were incorporation into each primer to allow directional in-frame ligation of PCR product into the expression vector pET26B (Novagen Inc., Madison, Wis.). Each gene was PCR amplified using high fidelity Pfx DNA polymerase and purified from agarose gel following electrophoresis. The DNA was extracted from the gel and digested with the appropriate restriction enzymes to remove the ends of the primers, producing overhangs for ligation. The linear pET26B vector was treated with 2 U of Shrimp Alkaline Phosphatase (SAP, Roche) for 10 minutes at 37° C. to remove the 5′ phosphate and then heated to 65° C. for 15 min to inactivate the SAP. The DNA Polymerase gene (30 ng) was ligated into the linear vector and used to transform E. coli DH5α cells with selection on LB agar plates containing 30 μg/ml Kanamycin.

[0418] DNA sequencing, Computer analysis and GenBank Accession numbers. Plasmids and PCR products were sequenced using Perkin Elmer Big Dye Terminator chemistry and run on a Perkin Elmer ABI Prism 377 DNA sequencer.

[0419] Computer analysis of sequence data was carried out using the GCG software package (Devereux, 1984).

[0420] Subcloning of genes for Cst and Cth DNA polymerases. In order to improve expression and simplify purification of Cst and Cth DNA polymerase, the genes were subcloned downstream of a T7 promoter and an amino-terminal His₆ tag sequence was introduced using Gateway cloning technology (Invitrogen Corporation, Carlsbad, Calif.). The sequence of the DNA oligonucleotide used at the 5′ end of the Cst gene was: 5′-GGGGACAACTTTGTACAAAAAAGTTGTCGATCCAAAAATAATCCTT ATAGAC 3′ (SEQ ID NO:37). The sequence of the DNA oligonucleotide used at the 5′ end of the Cth gene was: 5′-GGGGACAACTTTGTACAAAAAAGTTGTCGCGAAATTT TTGATCATAGATGGT-3′ (SEQ ID NO:38). The sequence of the DNA oligonucleotide used at the 3′ end of each gene was the same: 5′-GGGGACAACTTTGTACAAGAAAGTTGCTCAGGAGGCTT CATACCAGTTTTT 3′ (SEQ ID NO:39). Purified pET26B plasmid DNA (Novagen Inc., Madison, Wis.) bearing the gene for Cst or Cth DNA polymerase was amplified by PCR utilizing the primers listed above and Platinum Taq HiFi DNA polymerase (Invitrogen Corporation, Carlsbad, Calif.). PCR products purified by agarose gel electrophoresis were cloned into Gateway vector pDON21 and transferred by recombination into vector pDEST17. This resulted in the introduction of a His₆ tag at the amino terminus of the Cst and Cth DNA polymerases and the positioning of a T7 promoter upstream of the genes. Each final recombinant plasmid was transformed into the E. coli expression host BL21-AI (Invitrogen Corporation, Carlsbad, Calif.).

[0421] Subcloning of genes for Tok13B, Tok7B, and Rt69B. Subcloning of the genes for Tok13B, Tok7B, and Rt69B DNA polymerase was carried out to remove the pelB leader sequence derived from pET26B. This reduced proteolytic degradation of the DNA polymerases from these genes observed in E. coli when the pelB leader was present. Each DNA polymerase gene was removed from pET26B by restriction digestion of the plasmid DNA with NcoI, which cut at the 5′ end of the gene, and BamHI, which cut downstream of the translation stop codon at the 3′ end of the gene. The NcoI-BamHI fragment was ligated into the NcoI and BamHI sites of expression vector pET14B (Novagen Inc., Madison, Wis.). The recombinant plasmids were transformed into the E. coli expression host BL21-AI (Invitrogen Corporation, Carlsbad, Calif.).

[0422] Purification of CA2, B.EA1, Rt41A, Dth, Tok13B, Tok7B, and Rt69B DNA polymerase. E. coli cells (BL21SI, Invitrogen Corporation, Carlsbad, Calif.) bearing the plasmid pET26B with the gene for CA2, B.EA1, Rt41A, or Dth DNA polymerase were grown in 2.8-1 Fembach flasks in LB broth containing no salt and 50 μg/mlkanamycin at 37° C. After the culture reached an A₅₉₀ of 1.2, expression of DNA polymerase was induced with 0.3 M NaCl for 3 hr. Cells were harvested by centrifugation and stored at −70° C. E. coli cells (BL21AI) bearing the plasmid pET14B with the gene for Tok13B, Tok7B, or RT69B DNA polymerase were grown in 2.8-1 Fembach flasks in LB broth containing 50 μg/ml ampicillin at 37° C. After the culture reached an A₅₉₀ of 1.0, expression of DNA polymerase was induced by the addition of 0.2% arabinose for 3 hr. Cells were harvested by centrifugation and stored at −70° C.

[0423] All purification steps were carried out at 4° C. or on ice unless stated otherwise. Frozen cells (7 gm) were thawed and suspended in sonication buffer (50 mM Tris-HCl, pH 7.5, 1 mM EDTA, 8% (v/v) glycerol, 5 mM β-mercaptoethanol, and 50 μg/ml PMSF) at a 1:3 ratio (w/v) of buffer. The cell suspension was sonicated until greater than 70% of the total cells were lysed. A 10% (v/v) solution of NP-40 and Tween 20 was added to the sonicated sample to a final concentration of 0.05% of each. The sonicated sample was heated at 55° C. (CA2 and B.EA1 DNA polymerase), 60° C. (Tok13B, Tok7B, and RT69B) or 75° C. (Dth and RT41A DNA polymerase) for 15 min then cooled on ice for 30 min. NaCl (5 M) was added to a final concentration of 0.25 M and polymin P was added to a final concentration of 0.2%. The sample was centrifuged at 20,000×g for 20 min to remove the precipitate. Solid ammonium sulfate was dissolved in the supernatant (0.326 gm/ml) and the suspension was stirred overnight. The insoluble protein was collected by centrifugation and resuspended in 5 ml of low salt buffer [25 mM Tris-HCl (pH 8.0), 50 mM NaCl, 0.5 mM EDTA, 5% (v/v) glycerol, 2 mM β-mercaptoethanol and 0.05% (v/v) each of NP-40 and Tween 20. The sample was dialyzed against 200 ml of the low salt buffer and centrifuged to remove insoluble material. The protein was fractionated by column chromatography on a 5-ml EMD sulfate (EM Sciences, address ?) column in low salt buffer eluted with a linear gradient of 50 mM to 500 mM NaCl. The fractions containing DNA polymerase were determined by SDS-PAGE analysis and assay for DNA-directed DNA polymerase activity. These were pooled and dialyzed overnight against the low salt buffer. The dialyzed protein was fractionated by column chromatography on a MonoQ HR 5/5 column (Amersham Pharmacia) run in low salt buffer and eluted using a linear gradient of 50 mM to 250 mM NaCl. Fractions containing the thermostable DNA polymerase were pooled and dialyzed overnight against storage buffer [20 mM Tris-HCl (pH 8.0), 40 mM KCl, 0.1 mM EDTA, 50% (v/v) glycerol, 1 mM DTT, 0.04% (v/v) each of NP-40 and Tween 20]. Purified DNA polymerase was stored at −20° C.

[0424] Purification of Cst-His and Cth-His DNA polymerases. E. coli cells (BL21AI) bearing the plasmid pDEST17 with the gene for Cst-His or Cth-His DNA polymerase were grown in 2.8-1 Fembach flasks in LB broth containing 50 μg/ml ampicillin at 37° C. After the culture reached an A₅₉₀ of 1.0, expression of DNA polymerase was induced by the addition of 0.2% arabinose for 3 hr. Cells were harvested by centrifugation and stored at −70° C.

[0425] All operations were at 4° C. unless otherwise specified. Frozen cells (7 gm) were thawed and suspended at a 1:2 ratio (w/v) in 50 mM Tris-HCl (pH 7.8), 10% (v/v) glycerol, and 2 mM MgCl.sub.2. Cells were disrupted by sonication and Benzonase® (E. Merck, address ?) was added at a ratio of 25 Upper mL of slurry. After 30 mM, NaCl was added to a final concentration of 1 M. The suspension was centrifuged at 13,000×g for 30 mM. The crude extract was fractionated by column chromatography on a 5-mL HiTrap™ chelating column charged with Ni²⁺ and washed in 25 mM Tris-HCl (pH 7.8), 1 M NaCl, 5 mM imidazole, and 10% (v/v) glycerol (buffer N). After loading the sample, the column was washed in buffer N containing 20 mM imidazole and eluted with a linear gradient from 20 mM to 450 mM imidazole. Fractions were assayed for DNA-directed DNA polymerase activity and the peak fractions were pooled. EDTA was added to the pooled fractions to a final concentration of 1 mM and the pool was dialyzed against 25 mM Tris-HCl (pH 8.0), 50 mM NaCl, 0.5 mM EDTA, 5% (v/v) glycerol, and 1 mM β-mercaptoethanol (buffer H). The dialyzed pool was fractionated on a 1- or 5-mL HiTrap Heparin column (Amersham Pharmacia) equilibrated in buffer H. After loading the sample, the column was washed with buffer H and eluted with a linear gradient of 50 mM to 800 mM NaCl. The fractions were assay for DNA polymerase activity and the peak fractions were pooled. The pooled fractions were dialyzed against 20 mM Tris-HCl (pH 8.0), 40 mM KCl, 0.1 mM EDTA, 50% (v/v) glycerol, and 1 mM DTT. The final sample was stored at −20° C.

[0426] DNA polymerase activity assays. DNA-directed DNA polymerase unit activity—Reaction mixtures (50 μl) contained 25 mM TAPS (pH 9.3), 2.0 mM MgCl₂, 50 mM KCl, 1.0 mM DTT, 0.2 mM each of dATP, dTTP, dGTP, and [α-³²P]dCTP (250 cpm/pmole), 500 μg/ml activated salmon testes DNA, and 2 to 4 pg (0.02 to 0.2 pmoles) DNA polymerase. After incubation at 55 or 72° C. for 10 mM, the reaction was terminated by addition of 10 μl of 0.5 M EDTA. Incorporation of radioactivity into acid-insoluble DNA product was determined. One unit of DNA-directed DNA polymerase activity is the amount of enzyme required to incorporate 10 nmoles of dNTPs into acid insoluble product in 30 min.

[0427] RNA-directed DNA polymerase unit activity. Reaction mixtures (25 μl) contained 10 mM Tris-HCl (pH 8.3), 25 mM KCl, 5 mM MgCl₂, 0.5 mM each of dATP, dTTP, dGTP, and [α-³²P]dCTP (200 cpm/pmole), 1 .mu.g (3.2 pmoles) CAT cRNA, and 0.6 μg (80 pmoles) DNA 24mer primer. The range of the amount of DNA polymerase used in the assay varied. For CA2, Cst-His and B.EA1 DNA polymerases, 0.25 to 4 DNA-directed DNA polymerase units were used and the reaction was incubated at 55° C. for 5 min. For Cth-His DNA polymerase, 5 to 40 DNA-directed DNA polymerase units were incubated at 55° C. for 5 min. In the case of Tok13B, Tok7B, RT69B, Dth, and RT41A DNA polymerases, the range was 5 to 40 DNA-directed DNA polymerase units incubated at 72° C. for 5 min. The reaction was terminated by addition of 5 μl of 0.5 M EDTA. Incorporation of radioactivity into acid-insoluble DNA products was determined. One unit of RNA-directed DNA polymerase activity is the amount of enzyme required to incorporate 10 nmoles of dNTPs into acid insoluble product in 30 min.

[0428] Reverse transcriptase functional activity. Reaction mixtures (20 μl) contained 10 mM Tris-HCl (pH 8.3), 25 mM KCl, 5 mM MgCl₂, 0.5 mM each of dATP, dTTP, dGTP, and [α-³²P]dCTP (200 cpm/pmole), 1 μg CAT cRNA, and 0.6 μg DNA 24mer primer. The reaction was set up in the presence and absence of 1.5 M betaine. The amount of DNA polymerase activity (DNA-directed DNA polymerase units) added to the reaction was: 1 unit of CA2, 5 units of Cst-His, 20 units of Cth-His, or 10 units of B.EA1, Tok13B, Tok7B, RT69B, Dth, RT41A, Tne, rTth, or Taq DNA polymerase. SUPERSCRIPT™ II RT (200 units) was incubated as a control at 42° C. and the other enzymes were incubated at 60° C. for 30 min. A portion of the reaction mixture was precipitated with TCA to determine total yield of cDNA synthesized, and the remaining cDNA product was size fractionated on an alkaline 2% agarose gel. The gel was dried and exposed to X-ray film.

[0429] Thermal inactivation profiles of DNA polymerases. Purified DNA polymerases were analyzed for thermostability at temperatures between 55 and 95° C. A reaction mixture (50 μl) containing 10 mM Tris-HCl (pH 8.3), 25 mM KCl, 5 mM MgCl₂, and 2.5 units of DNA-directed DNA polymerase activity was incubated at various temperatures for 10 min. The tubes were placed on ice and 5 μl of the sample was tested for residual DNA polymerase activity using the DNA-directed DNA polymerase unit activity assay. After incubation at 55° C. (DNA polymerases CA2, Cst-His, B.EA1 and Cth-His) or 72° C. (DNA polymerases Tok13B, Tok7B, RT69B, Dth and RT41A) for 10 min, the reaction was terminated by addition of 5 μl of 0.5 M EDTA. Incorporation of radioactivity into acid-insoluble DNA products was determined.

[0430] Steady-state kinetic measurements. The steady-state kinetic parameters Kₘ(dTTP) and k_{CAT} were determined as described (Polesky et al., J. Biol. Chem. 265, 14579-14591,1990) using (rA)₂₅₀•(dT)₃₀ or (rA)₂₅₀•(dT)₄₀ and (dA)₂₇₀•(dT)₄₀. A range of four to five [³²P]dTTP concentrations, which bracketed the Kₘ(dTTP) value, was used for Kₘ(dTTP) determinations. Reaction mixtures (50 μl) contained 10 mM Tris-HCl (pH 8.3), 25 mM KCl, 5 mM MgCl₂, 100 to 1,000 μM [α-³²P]dTTP, 1 μM (rA)₂₅₀ or (dA)₂₇₀, 3 μM (dT)₃₀ or (dT)₄₀, and 5 to 50 nM DNA polymerase. In some cases, k_{CAT} was determined with (dC)ₙ•(dG)₃₅ (Astalke et al., J. Biol. Chem. 270, 1945-1954, 1995) in reaction mixtures (50 μl) containing 20 mM Tris-HCl (pH 8.4), 50 mM KCl, 2 mM MgCl₂, 100 to 200 μM [α-³²P]dGTP, and 5 nM DNA polymerase.

### RESULTS AND DISCUSSION

[0431] Cloning of DNA polymerase genes: Degenerate Oligonucleotide Design. The amino acid sequences from 24 bacterial Pol I DNA polymerases were aligned and two highly conserved regions were identified within the 5′-3′ DNA polymerase domain of all enzymes (FIG. 1.) Consensus-degenerate hybrid oligonucleotide primers (CODEHOP, Rose et al., 1998) were designed to hybridize to DNA coding for the conserved regions. The DNA sequences of the polymerases identified are SEQ ID NOS: 2, 3, 4, 5, 6, 7, 8, 9, 10, 11, 12 and 13, and the corresponding amino acid sequences are SEQ ID NOS:14, 15, 16, 17, 18, 19, 20, 21, 22, 23, 24 and 25. Three forward and three reverse primers were designed to amplify a PCR product of approximately 570 bp (see FIG. 1.) The PolGCF1/F2 and PolGCR primers were found to work best with organisms with a high % G+C content. The PolGCF1 and PolGCF2 primers are identical apart from the sequence encoding the serine codon positioned within the motif. The primers PoIATF and R were based upon the sequences of the PolGCF1/F2 and PolGCR primers but with a lower % G+C within the 5′-nondegenerate end of each primer. Decreasing the % G+C content of the non-degenerate ends was found to improve the correct amplification of polI genes from organisms with a low % G+C content.

[0432] The degenerate primers were then designed for use in a step-down PCR protocol with a decrease in annealing temperature by 1° C. per cycle, starting from 60° C. down to 45° C. This was followed by 35 cycles of amplification with an annealing temperature of 55° C. The degenerate primers described in FIG. 1 were used to amplify internal portions of polI genes from the following bacteria: Caldicellulosiruptor saccharolyticus, Caldicellulosiruptor saccharolyticus strains, Tok7B.1, Rt69B.3 and Tok13B.1; Thermus thermophilus strain Rt41.A; Dictyoglomus thermophilum strain Rt46B. 1; Clostridium stercorarium; Clostridium (Thermoanaerobacterium) thermosulfurigenes; Thermoanaerobacter sp. AZ3B.1; Bacillus caldolyticus strain EA1; and Caldibacillus cellulovorans CompA.2. The degenerate primer combination that amplified the internal portion of each polymerase gene is shown in Table 33. In terms of correct amplification of the internal polymerase gene region, there was a direct correlation between the % G+C content of template genomic DNA and the % G+C content of the non-degenerate 5′ portion of the CODEHOP primers. The PolATF/R primer combinations were required for correct amplification of polI from low % G+C genomic DNA, while the PolGCF1/F2/R primers worked most efficiently with high % G+C genomic DNA.

[0433] Purification. Proteins were expressed and purified as described and analyzed by SDS-PAGE. The results are shown in FIG. 2. The Cst-His, CA2, Dth, and RT41A polymerases were approximately 90% homogneous, the approximately B.EA1 and Cth-His polymerases were approximately 80% homogeneous, and the Tok13B, Tok7B, and RT69B were approximately 70% homogeneous.

[0434] Thermal Stability. There appear to be three classes of polymerase based on thermal stability. As seen in Table 38, a first class comprising Cth-His, CompA.2, Cst-His, and B. EA1 are highly active at 60° C. and may maintain their activity to 65° C. but appear to be inactive at temperatures of about 70° C. and higher. A second class comprising Tok13B, Tok7B, and RT69B, appear to be maximally active at temperatures of about 70° C. to about 75° C. and to maintain their activity to about 80 degrees but to have lower activity at temperatures higher than about 80° C. A third class of polymerase comprising Dth and RT41A appear to be maximally active at temperatures from about 75° C. to about 90° C. and to maintain detectable activity at temperatures as high as 95° C.

[0435] Reverse Transcriptase Activity. With reference to FIG. 3 and Tables 39 and 40, the present invention identifies three classes of polymerase with regard to RNA-dependent DNA polymerase activity. The first class exemplified by Taq, RT41A and Dth have little or no detectable reverse transcriptase activity. The members of the second class, exemplified by recombinant Tth, Tok7B, Cth-His, RT69B, Tok13B, and Tne, have a demonstrable reverse transcriptase activity but at a low level. Polymerases of this class may have a specific activity level for RNA-dependent DNA polymerase activity of from about 20 to about 350 units/mg of protein. A third class of polymerase enzymes identified by the present invention may have a specific activity for RNA-dependent DNA polymerase activity of greater than about 500 units/mg. In some embodiments, the present invention provides polymerases having a specific activity for RT activity of greater than 1,000 units/mg, greater than about 1,500 units/mg, greater than 2,000 units/mg, greater than about 2,500 units/mg, greater than about 3,000 units/mg, greater than about 3,500 units/mg, greater than bout 4,000 units/mg, greater than about 4,500 units/mg, greater than about 5,000 units/mg, greater than about 7,500 units/mg or greater than about 10,000 units/mg.

[0436] The RT specific activity of the polymerases of the invention may be influenced by the reaction conditions, for example, the inclusion of additives such as betaine may influence the observed RT activity. With reference to FIG. 3, the first strand reaction of various polymerases was compare with and without the addition of betaine to the reaction mixture. Some enzymes, (e.g., rTth and Tne) appear to require the presence of betaine in order to produce a full length product.

[0437] Careful design of degenerate primers for the initial PCR of the consensus polI sequence allowed the amplification and sequencing of an internal gene fragment which allowed the design of gene specific primers suitable for genomic walking in the 5′ and 3′ directions so that the entire polI gene could be isolated from a variety of bacteria with widely differing % G+C contents, but it was necessary to design a suite of primers to achieve successful amplifications. The high conservation of the motifs against which the degenerate primers were designed means that theoretically, these primers should amplify the polI genes from the majority of bacteria across all bacterial divisions. The degenerate PCR method was so sensitive that initial difficulties were encountered due to the presence of trace amounts of the Taq polymerase gene in commercial enzyme preparations. We found it was necessary to pre-treat Taq enzyme with a temperature-sensitive restriction enzyme to remove the contaminating Taq polI DNA. This method has the advantage over isolation of polI genes from genomic expression libraries as no demands are made for expression in the host E. coli, which may cause weakly expressed PolA enzymes to be overlooked. Accordingly, the genes can be translated in appropriate expression vectors under optimal conditions for the production of the particular enzyme.

### Example 2

### Growth and Expression

[0438] The constructs were analyzed for expression of the DNA polymerase. Overnight cultures were grown (2 ml) in LB no salt (LBON) containing kanamycin (50 μg/ml) at 37° C. To 40 ml of LBON+Kan, 1 ml of the overnight culture was added and the culture was grown at 37° C. until it reached an O.D of ˜1.0 (A₅₉₀). The culture was split into two 20 ml aliquots and the first aliquot (uninduced) was kept at 37° C. To the other aliquot, 5 M NaCl was added to a final concentration of 0.3 M and the culture was incubated at 37° C. After 3 hours the cultures were centrifuged at 4° C. in a tabletop centrifuge at 3500 rpm for 20 minutes. The supernatant was poured off and the cell pellet was stored at −70° C. until analyzed.

[0439] The expressed protein was analyzed by SDS-PAGE. The cell pellet was suspended in 1 ml of sonication buffer (10 mM Tris pH 8.0, 1 mM Na₂EDTA, 10 mM β-mercaptoethanol (β-ME)) and was sonicated (550 Sonic Dismembrator (Heat Systems), ½ inch tip, at a setting of 8 with 10 sec pulse for a total of 100 seconds). The sonicated sample was clarified by centrifugation. The supernatant (crude lysate) was used for the analysis of the soluble proteins. Samples (amount equivalent to 0.1 A₅₉₀ units) were loaded on a 4-20% gradient Tris-glycine gel. Samples were run under reduced condition using Tris-glycine SDS buffer.

### Example 3

### Measuring DNA Polymerase Activity

[0440] The crude lysate was analyzed for thermostable polymerase activity. An aliquot of the crude lysate was placed either in a 55° C. or a 75° C. water bath and heated for 15 minutes. Each sample was cooled on ice, centrifuged to bring down precipitated proteins, and each supernatant was analyzed for thermostable DNA-dependent DNA polymerase activity. The activity assay is a 25 μl reaction mixture containing 25 mM TAPS, pH 9.3, 2.0 mM MgCl₂, 50 mM KCl, 1.0 mM DTT, 0.2 mM each dNTP, 12.5 μg nicked salmon testes DNA, and 1 μCi ³H-TTP. After incubation at 72° C. for 10 minutes, the reaction was terminated by addition of 5 μl of 0.5 M EDTA. Incorporation of radioactivity into acid-insoluble products was determined.

[0441] Thermostable DNA-dependent DNA polymerase activity was seen in the crude lysate as well as in the 55° C. heat denatured samples of all three polymerases. However the 75° C. heat denatured samples of C. stercorarium and C. thermosulfurogenes polymerases lost greater than 95% of their activity, while the Caldibacillus cellulovorans CompA.2 polymerase lost greater than 90% of its activity.

### Example 4

### Expression and Purification of Thermostable DNA Polymerase

[0442] Cells were grown on a large scale in shake flasks. For each clone, two 20 ml cultures of LBON+Kan were inoculated using a glycerol seed. The culture was then grown overnight at 37° C. Fifteen ml of overnight culture was added to 750 ml of LBON+Kan mixture, and incubated at 37° C. Following cell growth (A₅₉₀˜1.2) the cultures were induced with NaCl (0.3M final concentration) and were grown for three more hours. The cells were harvested by centrifugation and stored at −70° C.

[0443] All steps were carried out at 4° C. or on ice unless stated otherwise. The cells containing the recombinant plasmid (about 7 grams) were thawed and suspended in the sonication buffer (1:3 ratio of cells to buffer in 50 mM Tris, pH 7.5, 1 mM Na₂EDTA, 8% glycerol, 5 mM β-ME), and 50 μg/ml PMSF). The cell suspension was sonicated (550 Sonic Dismembrator, ½ inch tip, at a setting of 8 with 10 sec pulse for a total of 100 seconds) until greater than 70% of the total cell fraction was lysed (determined by A.sub.590 measurement). A 10% solution of NP-40 and Tween® 20 (polyethylene(20)sorbitan monolaurate) was added to the sonicated sample to a final concentration of 0.05%. The sonicated sample was heated at 55° C. for 15 minutes and then cooled on ice for 30 minutes. A solution of 5M NaCl was added to a final concentration of 0.25M and the sample was stirred. This was followed by the dropwise addition of a 5% solution of polyethylenimine (PEI) to a final concentration of 0.2%, with constant stifling. The suspension was stirred for an additional 30 minutes. The sample was then centrifuged at 13,000 rpm at 4° C. in an SS 34 rotor for 20 minutes to remove precipitated nucleic acids. Solid ammonium sulfate was added to the supernatant (0.326 gm/ml) and the suspension was stirred overnight. The pellet was collected by centrifugation and re-suspended in 5 ml of low salt buffer containing 25 mM Tris, pH8.0, 50 mM NaCl, 0.5 mM Na₂EDTA, 5% glycerol, 2 mM β-ME and 0.05% each NP-40 and Tween® 20. This is also the buffer used in the wash and the gradient.

[0444] The sample was dialyzed against 200 ml of the low salt buffer. Following centrifugation to remove any insoluble materials, the protein was loaded on a 5 ml EMD sulfate (EM Sciences) column and was eluted by a linear gradient of 50 mM to 500 mM NaCl in low salt buffer. The fractions containing the thermostable DNA polymerase were determined by SDS-PAGE and DNA polymerase activity assay (see below). These selected fractions were pooled and dialyzed overnight against the low salt buffer. The dialyzed sample was loaded on a MonoQ HR 5/5 column (Amersham/Pharmacia) and the protein was eluted using a linear gradient of NaCl from 50 mM to 250 mM. The fractions containing the thermostable DNA polymerase were identified by SDS-PAGE and DNA polymerase activity assay. These were pooled and dialyzed overnight against dialysis buffer containing 20 mM Tris, pH 8.0, 40 mM KCl, 0.1 mM Na₂EDTA, 50% glycerol, 1 mM DTT, 0.04% NP-40 and 0.04% Tween® 20.

### Example 5

### Unit Assay for Measuring Thermostable DNA Polymerase Activity

[0445] The activity assay is a 50 μl reaction mixture containing 25 mM TAPS, pH 9.3, 2.0 mM MgCl₂, 50 mM KCl, 1.0 mM DTT, 0.2 mM each dNTP, 25 μg nicked salmon testes DNA, and 1 μCi [α-³²P]-dCTP. After incubation at 72° C. for 10 minutes, the reaction was terminated by addition of 10 μl of 0.5 M EDTA. Incorporation of radioactivity into acid-insoluble products was determined.

### Example 6

### Reverse Transcriptase (RT) Activity in the Presence of Manganese (Mn.sup.+2)

[0446] Purified polypeptides of the invention were assayed for RT activity. SUPERSCRIPT™ II (Invitrogen, Carlsbad, Calif.) and rTth DNA polymerase (Perkin Elmer, Wellesley, Mass.) were also used as controls. Five units (DNA polymerase unit) of the polypeptide of the invention was added to a 20 μl reaction containing 10 mM Tris, pH 8.3, 90 mM KCl, 1 mM MnCl₂, 0.2 mM of each dNTP, 0.05% each of NP-40 and Tween® 20, 1 μg of total CAT-RNA, 0.6 μg of a gene specific primer (GSP1) and 2 μCi of [α-³²P] dCTP. The reaction for each polypeptide was incubated at one of the temperatures: 55° C., 60° C., 65° C. or 70° C. for 30 minutes. The reaction was terminated by addition of 5 μl of 0.5M NaEDTA. Incorporation of radioactivity into acid-insoluble products was determined. Clostridium stercorarium showed good incorporation of radioactivity at all the temperatures.

[0447] The same reaction was repeated at 60° C. with samples of Clostridium stercorarium polymerase, Clostridium thermosulfurogenes polymerase, Caldibacillus cellulovorans CompA.2 polymerase, SUPERSCRIPT™ II and rTth DNA polymerase and analyzed for cDNA synthesis by alkaline agarose gel electrophoresis. Clostridium stercorarium, Clostridium thermosulfurogenes, Caldibacillus cellulovorans CompA.2, SUPERSCRIPT™ II and rTth were all able to synthesize the 700 bp cDNA.

### Example 7

### Reverse Transcriptase (RT) Activity in the Presence of Magnesium (Mg⁺²)

[0448] Reactions were set up at three different concentrations of Mg⁺² and dNTP. They were 1 mM Mg⁺²/0.2 mM dNTP (five fold excess of Mg⁺²), 3 mM Mg⁺²/0.5 mM dNTP (six fold excess of Mg⁺²), and 7.5 mM Mg⁺²/1 mM dNTP (seven and one-half fold excess of Mg⁺²). The rest of the components were the same as for the RT activity assay in the presence of manganese. cDNA synthesis as measured by incorporation of radioactivity was seen with Clostridium stercorarium and SUPERSCRIPT™ II with the six fold excess Mg⁺² reaction being the best.

[0449] The reaction was repeated at 60° C. with samples of Clostridium stercorarium polymerase, Clostridium thermosulfurogenes polymerase, and SUPERSCRIPT™ II and analyzed for cDNA synthesis by alkaline agarose gel electrophoresis. In this trial, only Clostridium thermosulfurogenes and SUPERSCRIPT™ II were able to synthesize the fall length cDNA of 700 bp. However Clostridium stercorarium showed the synthesis of smaller cDNA products (≈100 to 300 bp).

[0450] Caldibacillus cellulovorans CompA.2 polymerase was assayed as described above using SUPERSCRIPT™ II and rTth as controls. The reaction components were the same as for the RT activity in the presence of manganese except for two components. The reaction had 3 mM Mg⁺² instead of 1 mM MnCl₂ and the dNTP concentration was 0.5 mM. Incorporation of radioactivity into acid-insoluble products was determined and the sample was analyzed for cDNA synthesis by alkaline agarose gel electrophoresis. Both Caldibacillus cellulovorans CompA.2 and SUPERSCRIPT™ II were able to synthesize the full length cDNA of≈700 bp. No radioactive incorporation or cDNA synthesis was observed with rTth.

### Example 8

### Reverse Transcriptase (RT) Activity in the Presence of Magnesium (Mg⁺²) and Betaine

[0451] The reaction mix was the same as above except for betaine was titrated into the reaction mixture (no betaine, 0.1 M, 0.5 M, 1.0 M and 1.5 M final concentration). cDNA synthesis was analyzed by alkaline agarose gel electrophoresis. With Clostridium stercorarium, the ˜700 bp cDNA product was synthesized in reactions containing 1.0M and 1.5M betaine. In the absence of betaine ˜200 bp fragment was seen and in the presence of 0.5M betaine ˜400 bp fragment was synthesized. With Clostridium thermosulfurogenes the full length≈700 bp cDNA was synthesized in reactions containing no betaine and 0.1M betaine. The higher concentrations of betaine seemed to inhibit full length cDNA synthesis with most of the products being less than≈500 bp. In the presence of 5% DMSO, Clostridium stercorarium was observed to synthesize ˜400 bp-500 bp fragments.

### Example 9

### Construction of Sub-Clones

[0452] The clones were generated by using the Gateway™ cloning technology (Invitrogen, Carlsbad, Calif.). Clones with either a native amino terminal sequence or a histidine tagged amino terminal sequence were created. The oligonucleotide used to generate the amino terminal of each clone is different whereas the carboxy terminus oligonucleotide is the same. The sequences of the oligonucleotides used to generate the Clostridium stercorarium clones were as follows:

Native amino terminal
(SEQ ID NO: 40)
5′-GGGGACAACTTTGTACAAAAAAGTTGTCAGGAGGTTAAC
CATGGATCCAAAAATAATCCTTATAGAC-3′
Histidine tagged amino terminal
(SEQ ID NO: 41)
5′-GGGGACAACTTTGTACAAAAAAGTTGTCGATCCAAAAAT
AATCCTTATAGAC-3′
Carboxy terminal
(SEQ ID NO: 39)
5′-GGGGACAACTTTGTACAAGAAAGTTGCTCAGGAGGC
TTCATACCAGTTTTT-3′

[0453] The sequences of the oligonucleotides used to generate the Clostridium thermosulfurogenes clones were as follows:

Native amino terminal
(SEQ ID NO: 41)
5′-GGGGACAACTTTGTACAAAAAAGTTGTCAGGAGGTTAAC
CATGGCGAAATTTTTGATCATAGATGG-3′
Histidine tagged amino terminal
(SEQ ID NO: 38)
5′-GGGGACAACTTTGTACAAAAAAGTTGTCGCGAAATTTTTG
ATCATAGATGGT-3′
Carboxy terminal
(SEQ ID NO: 42)
5′-GGGGACAACTTTGTACAAGAAAGTTGCTTATTTTGCATCA
TACCAGTTTTT-3′

[0454] Plasmid DNA (the polymerase cloned in the pET26B vector) was isolated from the original clones. This was used as the template for a PCR reaction using either the native or His tagged N-terminal primer with the carboxy terminal primer. Each 100 μl reaction contained 1× HiFi PCR reaction buffer, 0.2 mM dNTPs, 2 mM MgSO₄, 5 units of PLATINUM® Taq HiFi, 0.2 μM each primer and 5 μl of template DNA. PCR cycling was 2-min initial denaturation at 94° C. followed by 25 cycles of 30 sec. at 94° C., 30 sec. at 57° C., and 2.4 minutes at 68° C.

[0455] The PCR products were analyzed on an agarose gel and the products were purified. The product was cloned into the pDONR201 vector by following the BP reaction protocol listed in the Gateway™ manual from Invitrogen Corporation, Carlsbad, Calif. Twenty microliters of the BP reaction was used to conduct an LR reaction by following the one tube protocol in the Gateway manual. In the LR reaction the vector pDEST 14 was used for generating the native clone and the vector pDEST17 was used in generating the amino terminus His-tag clones. One microliter of the LR reaction was transformed into Max-efficiency DH10B cells and the cells were plated on LB plates containing ampicillin. After incubation at 37° C. the colonies were analyzed for the presence of the recombinant clone by restriction enzyme digest. The recombinant plasmid was then transformed into the expression host BL21-BAD.

[0456] Cells were grown at 30° C. overnight. These were used for inoculating larger cultures. The large scale cultures were grown at 37° C. until they reached on O.D of≈1.0 (A₅₉₀) and then were induced by adding arabinose to a final concentration of 0.2%. The cells were allowed to grow for an additional three hours. Cells were harvested by centrifugation and stored at −70° C.

[0457] Polymerase was purified from the native amino terminal clones as described above. Polymerase was purified from the histidine tagged clones using nickel affinity chromatography.

### Example 10

### Determination of Optimum Mg⁺² Concentration for RT Activity

[0458] Samples of Caldibacillus cellulovorans CompA.2 polymerase and histidine-tagged Clostridium stercorarium and Clostridium thermosulfurogenes polymerases were analyzed to determine the optimal Mg⁺² concentration for RT activity for each enzyme.

[0459] Two units (DNA polymerase unit at 55° C.) of each enzyme was analyzed in a 20 μl reaction containing 10 mM Tris, pH 8.3, 90 mM KCl, 0.5 mM each dNTP, 2 μg of total CAT-RNA, 0.6 μg of a gene specific primer (GSP1), and 2 μCi of α-³²P dCTP. In addition, the reactions of the Caldibacillus cellulovorans CompA.2 and the Clostridium stercorarium polymerases contained 1.5 M betaine. The final concentration of Mg⁺² was titrated from 1 mM to 30 mM (specifically 1 mM, 3 mM, 5 mM, 7.5 mM, 10 mM, 15 mM, 20 mM, 25 mM, 30 mM). Samples were incubated at 60° C. for 15 min. The reactions were terminated by addition of 5 μl of 0.5 M EDTA.

[0460] Incorporation of radioactivity into acid-insoluble products was determined. Five millimolar Mg⁺² was seen to be the optimal amount.

### Example 11

### Determination of Optimum KCl Concentration for RT Activity

[0461] Samples of Caldibacillus cellulovorans CompA.2 polymerase and histidine-tagged Clostridium stercorarium and Clostridium thermosulfurogenes polymerases were analyzed to determine the optimal KCl concentration for RT activity for each enzyme.

[0462] Two units (DNA polymerase unit at 55° C.) of each enzyme was analyzed in a 20 μl reaction containing 10 mM Tris, pH 8.3, 5 mM MgCl₂, 0.5 mM of each dNTP, 2 μg of total CAT-RNA, 0.6 μg of a gene specific primer (GSP1), and 2 μCi of [α-³²P]dCTP. In addition, the reactions of the Caldibacillus cellulovorans CompA.2 and the Clostridium stercorarium polymerases contained 1.5 M betaine. The final concentration of KCl was titrated from 0 mM to 125 mM (specifically 0 mM, 25 mM, 50 mM, 75 mM, 100 mM, and 125 mM). Samples were incubated at 60° C. for 15 min. The reactions were terminated by addition of 5 μl of 0.5 M EDTA. Incorporation of radioactivity into acid-insoluble products was determined. A KCl concentration of 25 mM was seen to be the optimal amount. Activity was considerably lower at the higher KCl concentrations.

[0463] With reference to FIG. 4, in buffer with a lower salt concentration (e.g., 25 mM KCl), Mg-dependent RT activities of the polymerases increased at least 2 fold from those in high salt buffer (e.g., 90 mM KCl), while a viral reverse transcriptase enzyme (e.g., SUPERSCRIPT™ II) did not show salt dependency. RT activity was measured by incorporation of nucleotides using a CAT mRNA template primed with a gene specific primer (GSP) at 60° C. for 15 min. (or 30 min. for Clostridium thermosulfurogenes to compensate for slow reaction).

[0464] FIG. 5 shows the results of a comparison of the reverse transcriptase activity of varying amounts of the polymerases of the invention in the presence and absence of Betaine in low salt buffer. RT activity was measured by incorporation of nucleotides using a CAT mRNA template primed with GSP or 2.4 kb RNA template with oligo(dT) as primer, at 60° C. for 15 min (or 30 min. for Clostridium thermosulfurogenes to compensate for slow reaction).

[0465] FIG. 6 is an autoradiograph of reverse transcriptase activity of several polymerases of the invention in the presence and absence of Betaine in low salt buffer. Reverse transcriptase activity of the DNA polymerase from Clostridium stercorarium becomes Betaine-dependent in low salt buffer (e.g., 25 mM KCl) at enzyme concentrations higher than 4 U/r×n. Reverse transcriptase activity was measured by incorporation of nucleotides using a CAT mRNA template primed with a GSP at 60° C. for 15 min (or 30 min. for Clostridium thermosulfurogenes to compensate for slow reaction). The polymerase from Caldibacillus cellulovorans CompA.2 has higher specificity in presence of 1.5 M Betaine.

[0466] FIG. 7 is an autoradiograph showing reverse transcriptase activity of several polymerases of the invention in the presence and absence of Betaine. Reverse transcripatase activity was measured by incorporation of nucleotides using a CAT mRNA template primed with GSP or 2.4 kb RNA template with oligo(dT) as primer, at 60° C. for 15 min (or 30 min. for Clostridium thermosulfurogenes to compensate for slow reaction). This result shows that a lower RT activity of some polymerases may attribute to initiation step where they show a lower affinity to DNA oligo-primed RNA templates.

### Example 12

### Determination of Optimum pH for RT Activity

[0467] Samples of Caldibacillus cellulovorans CompA.2 polymerase and histidine-tagged Clostridium stercorarium and Clostridium thermosulfurogenes polymerases were analyzed to determine the optimal pH for RT activity for each enzyme.

[0468] Two units (DNA polymerase unit at 55° C.) of each enzyme was analyzed in a 20 μl reaction containing 10 mM Tris, pH 8.3, 5 mM MgCl₂, 25 mM KCl, 0.5 mM of each dNTP, 2 μg of total CAT-RNA, 0.6 μg of a gene specific primer (GSP1), and 2 μCi of [α-³²P]dCTP. In addition, the reactions of the Caldibacillus cellulovorans CompA.2 and the Clostridium stercorarium polymerases contained 1.5 M betaine. Tris buffers at pH 7.2, pH 7.5, pH 8.0, pH 8.3, and pH 8.8 were used at a final concentration of 10 mM.

[0469] Samples were incubated at 60° C. for 15 min The reactions were terminated by addition of 5 μl of 0.5 M EDTA. Incorporation of radioactivity into acid-insoluble products was determined. A slight increase in activity was seen from pH 7.2 through pH 8.8. pH 8.3 was taken to be optimal. Polymerases of the invention may be used at a pH of from about 7.0 to about 9.0, from about 7.2 to about 9.0, from about 7.5 to about 9.0, from about 7.8 to about 9.0, from about 8.0 to about 9.0, from about 8.2 to about 9.0, from about 8.3 to about 9.0, from about 8.4 to about 9.0, from about 8.5 to about 9.0, from about 8.6 to about 9.0, from about 8.7 to about 9.0, from about 8.8 to about 9.0, from about 8.9 to about 9.0, from about 8.0 to about 8.9, from about 8.0 to about 8.8, from about 8.0 to about 8.7, from about 8.0 to about 8.6, from about 8.0 to about 8.5, from about 8.0 to about 8.4, from about 8.0 to about 8.3, from about 8.0 to about 8.2, from about 8.0 to about 8.1, from about 8.2 to about 8.6, from about 8.2 to about 8.5, from about 8.2 to about 8.4, or from about 8.2 to about 8.3.

### Example 13

### Determination of Optimum Amount of Enzyme for RT Activity

[0470] Samples of Caldibacillus cellulovorans CompA.2 polymerase and histidine-tagged Clostridium stercorarium and Clostridium thermosulfurogenes polymerases were analyzed to determine the optimal amount of enzyme for RT activity for each enzyme.

[0471] The reactions for Caldibacillus cellulovorans CompA.2 polymerase and histidine-tagged Clostridium stercorarium were set up in the presence and absence of 1.5 M betaine, the Clostridium thermosulfurogenes reaction did not include betaine. The 20 μl reactions contained 10 mM Tris-HCl pH 8.3, 25 mM KCl, 5 mM MgCl₂, 0.5 mM of each dNTP, 1 μg of total CAT-RNA, 0.6 μg of a gene specific primer (GSP1), and 2 μCi of [α-³²P]-dCTP. The range of enzyme used was 1 unit, 2 units, 4 units, 6 units, 8 units, and 10 units (DNA polymerase unit at 55° C.) for the Caldibacillus cellulovorans CompA.2 polymerase and the histidine-tagged Clostridium stercorarium polymerase and 10 units, 20 units, 30 units, 40 units, 50 units, and 100 units for the Clostridium thermosulfurogenes polymerase. Samples were incubated at 60° C. for 60 min. The reactions were terminated by addition of 5 μl of 0.5 M EDTA. Incorporation of radioactivity into acid-insoluble products was determined.

[0472] Alkaline agarose gel analysis of the cDNA products showed that both in the presence and absence of betaine, even 1 unit of the enzyme was sufficient to give full length product (700 bp) with either the Caldibacillus cellulovorans CompA.2 polymerase or the histidine-tagged Clostridium stercorarium polymerase. In the absence of betaine, 4 units of the histidine-tagged Clostridium stercorarium polymerase was sufficient to produce full length product. The inclusion of 20 units of the Clostridium thermosulfurogenes polymerase was sufficient to produce full length products.

### Example 14

### cDNA Synthesis of 2.4 kb RNA

[0473] One and two units of Caldibacillus cellulovorans CompA.2 polymerase, six units Clostridium stercorarium polymerase and thirty and sixty units of Clostridium thermosulfurogenes polymerase were used to reverse transcribe a 2.4 kb RNA. The reactions for Caldibacillus cellulovorans CompA.2 polymerase and histidine-tagged Clostridium stercorarium were set up in the presence and absence of 1.5 M betaine, the Clostridium thermosulfurogenes reaction did not include betaine. The 20 μl reactions contained 10 mM Tris-HCl pH 8.3, 25 mM KCl, 5 mM MgCl₂, 0.5 mM dNTP, 1 μg of 2.4 kb RNA, 50 pmoles of oligo (dT) 20 and 2 μCi of [α-³²P]-dCTP. Samples were incubated at 50° C. for 5 min followed by incubation at 60° C. for 60 minutes. The reactions were terminated by addition of 5 μl of 0.5 M EDTA. Incorporation of radioactivity into acid-insoluble products was determined. Alkaline agarose gel analysis of the cDNA products showed that with 2 units of the Caldibacillus cellulovorans CompA.2 enzyme and six units Clostridium stercorarium polymerase, in the presence of betaine, full-length product was obtained. The Clostridium thermosulfurogenes polymerase did not produce full length product under these conditions.

### Example 15

### Use of Enzyme in RT-PCR

[0474] Clostridium thermosulfurogenes DNA polymerase, Clostridium stercorarium DNA polymerase and Caldibacillus cellulovorans CompA.2 DNA polymerase (5 units of each enzyme) were used in conjunction with PLATINUM® Taq DNA polymerase in one step RT-PCR. In addition to the components indicated above, each 50 μl reaction volume contained: 1×PCR buffer (10 mM Tris-HCl pH 8.3, 90 mM KCl), 1.2 mM MgCl₂, 0.2 mM each dNTP, 100 ng of total CAT RNA, 10 pmole CAT forward primer (CGA CCG TTC AGC TGG ATA TTA C (SEQ ID NO:43)), 10 pmole of CAT reverse primer (TTG TAA TTC ATT AAG CAT TCT GCC (SEQ ID NO:44)), and 2.5 units of PLATINUM® Taq DNA polymerase. The reactions were incubated at 60° C. for 30 min followed by 2 min at 95° C., 40 cycles of 95° C. for 15 sec., 55° C. for 30 sec., 72° C. for 45 sec., followed by 72° C. for 2 minutes. The product was resolved on a 1% agarose gel stained with ethidium bromide. The expected 520 bp fragment was observed with all three enzymes.

[0475] The Clostridium stercorarium DNA polymerase was used in conjunction with PLATINUM® Taq DNA polymerase in one step RT-PCR. The following components were assembled in a 50 μl reaction volume: 1×PCR buffer (10 mM Tris-HCl pH 8.3, 90 mM KCl), 1.2 mM MgCl₂, 0.2 mM each dNTP, 100 ng of total CAT RNA, 10 pmole CAT forward primer (CGA CCG TTC AGC TGG ATA TTA C (SEQ ID NO:43)), 10 pmole of CAT reverse primer (TTG TAA TTC ATT AAG CAT TCT GCC (SEQ ID NO:44)), 1.5 mM betaine, 2.5 units of PLATINUM® Taq DNA polymerase and 5 units of Clostridium stercorarium DNA polymerase. The reaction was incubated at 60° C. for 30 min followed by 2 min at 95° C., 40 cycles of 95° C. for 15 sec., 55° C. for 30 sec., 72° C. for 45 sec., followed by 72° C. for 2 minutes. The product was resolved on a 1% agarose gel stained with ethidium bromide. The expected 520 bp fragment was observed.

[0476] The Caldibacillus cellulovorans CompA.2 DNA polymerase was used in conjunction with PLATINUM® Taq DNA polymerase in one step RT-PCR. The following components were assembled in a 50 μl reaction volume: 1×PCR buffer (10 mM Tris-HCl pH 8.3, 90 mM KCl), 1.2 mM MgCl₂, 0.2 mM each dNTP, 100 ng of total CAT RNA, 10 pmole CAT forward primer (CGA CCG TTC AGC TGG ATA TTA C (SEQ ID NO:43)), 10 pmole of CAT reverse primer (TTG TAA TTC ATT AAG CAT TCT GCC (SEQ ID NO:44)), 2.5 units of PLATINUM® Taq DNA polymerase and 5 units of Caldibacillus cellulovorans CompA.2 DNA polymerase. The reaction was incubated at 60° C. for 30 min followed by 2 min at 95° C., 40 cycles of 95° C. for 15 sec., 55° C. for 30 sec., 72° C. for 45 sec., followed by 72° C. for 2 minutes. The product was resolved on a 1% agarose gel stained with ethidium bromide. The expected 520 bp fragment was observed.

### Example 16

### Kinetic Analysis of DNA-Dependent and RNA-Dependent Polymerase Activity

[0477] The catalytic rate constant k_{cat} and the Michaelis constant K_{M} were determined for both the DNA-dependent and RNA-dependent polymerase activities for the polypeptides of the invention and these parameters were compared to those of Tne DNA polymerase enzyme and SUPERSCRIPT™ II reverse transcriptase. The results of this analysis are summarized in Table 34. The assays were conducted in the presence of 1.5 mM MgCl₂ at 55° C. for all enzymes except the Caldibacillus cellulovorans CompA.2 enzyme where 2 mM MgCl₂ and 45° C. were used.

### Example 17

### Analysis of Reverse Transcriptase Activity and Thermal Stability for Selected Eubacterial Thermostable DNA Polymerases

[0478] The reverse transcriptase activity and thermal stability of a number of eubacterial DNA polymerase enzymes was determined and the results are summarized in Table 35. RT activity was determined with either Mn²⁺ or Mg²⁺.

[0479] The column headed Mn²⁺ shows the efficiency of synthesis of ³²P labeled full-length cDNA from CAT mRNA at 60° C. in the absence of additives under sub-optimal conditions.

[0480] The column headed Mg²⁺ shows the efficiency of synthesis of ³²P labeled full-length cDNA from CAT mRNA at 60° C. in the absence of additives under optimal conditions. The numbers in parentheses are the units required under optimal conditions to produce full-length CAT cDNA (700 bp) in the presence of Mg++.

### Example 20

### Construction of N-Terminal and/or C-Terminal Deletion Mutants

[0481] The following general approach may be used to clone a N-terminal or C-terminal deletion mutant. Generally, two oligonucleotide primers of about 15-25 nucleotides are derived from the desired 5′ and 3′ positions of a polynucleotide of any one of SEQ ID NOS: 2-13. The 5′ and 3′ positions of the primers are determined based on the desired polynucleotide fragment. An initiation and stop codon are added to the 5′ and 3′ primers respectively, if necessary, to express the polypeptide fragment encoded by the polynucleotide fragment. Preferred polynucleotide fragments are those encoding the N-terminal and C-terminal deletion mutants and those encoding the 10, 11, 12, 13, 14, 15, 16, 17, 18, 19, 20, 21, 22, 23, 24, 25, 26, 27, 28, 29, 30, 31, 32, 33, and 34 amino acid fragments disclosed above.

[0482] Additional nucleotides containing restriction sites to facilitate cloning of the polynucleotide fragment in a desired vector may also be added to the 5′ and 3′ primer sequences. The polynucleotide fragment is amplified from genomic DNA or from the deposited clone using the appropriate PCR oligonucleotide primers and conditions discussed herein or known in the art. The polypeptide fragments encoded by the polynucleotide fragments of the present invention may be expressed and purified in the same general manner as the full length polypeptides, although routine modifications may be necessary due to the differences in chemical and physical properties between a particular fragment and full length polypeptide.

### Example 21

### Protein Fusions

[0483] Polypeptides of the invention may be fused to other proteins. These fusion proteins can be used for a variety of applications. For example, fusion to His-tag, HA-tag, protein A, IgG domains, and maltose binding protein facilitates purification. (See Example 5; see also EP A 394,827; Traunecker, et al., Nature 331:84-86 (1988).) Similarly, fusion to IgG-1, IgG-3, and albumin increases stability. Fusion proteins can also create chimeric molecules having more than one function. Finally, fusion proteins can increase solubility and/or stability of the fused protein compared to the non-fused protein. All of the types of fusion proteins described above can be made by modifying the following protocol, which outlines the fusion of a polypeptide to an IgG molecule.

[0484] Briefly, the Fc portion of the IgG molecule can be PCR amplified, using primers that span the 5′ and 3′ ends of the sequence described below. These primers also should have convenient restriction enzyme sites that will facilitate cloning into an expression vector, preferably a mammalian expression vector.

[0485] For example, if pC4 (Accession No. 209646) is used, the human Fc portion can be ligated into the BamHI cloning site. Note that the 3′ BamHI site should be destroyed. Next, the vector containing the Fc portion is re-restricted with BamHI, linearizing the vector, and polynucleotide of the invention, amplified by PCR and isolated, is ligated into this BamHI site. Note that the polynucleotide is cloned without a stop codon, otherwise a fusion protein will not be produced.

[0486] The vector can also be modified to include a heterologous signal sequence. (See, e.g., WO 96/34891.)

[0487] Additionally, one or more components, motifs, sections, parts, domains, fragments, etc., of the polypeptides of the invention may be recombined with one or more components, motifs, sections, parts, domains, fragments, etc. of one or more heterologous molecules. In preferred embodiments, the heterologous molecules are clamps.

[0488] Having now fully described the present invention in some detail by way of illustration and example for purposes of clarity of understanding, it will be obvious to one of ordinary skill in the art that the same can be performed by modifying or changing the invention within a wide and equivalent range of conditions, formulations and other parameters without affecting the scope of the invention or any specific embodiment thereof, and that such modifications or changes are intended to be encompassed within the scope of the appended claims.

[0489] All publications, patents and patent applications mentioned in this specification are indicative of the level of skill of those skilled in the art to which this invention pertains, and are herein incorporated by reference to the same extent as if each individual publication, patent or patent application was specifically and individually indicated to be incorporated by reference.

TABLE 33

| | PolA | | | | |
|---|---|---|---|---|---|
| | Length | | CODEHOP Primers Used | Restrictions | |
| | (amino | % G + C | to Amplify Internal | Sites Used | PolA DNA |
| Source Organism | acids) | Content | Sequence | for Cloning | SEQ ID NO |
| Dictyoglomus | 856 | 33% | PolATF-PolATR | BamHI-SalI | SEQ ID NO: 10 |
| thermophilum | | | (SEQ ID NOs: 118, 120) | | |
| Caldicellulosiruptor | 849 | 33.3% | PolATF-PolATR | NcoI-BamHI | SEQ ID NO: 11 |
| saccharalyticus | | | (SEQ ID NOs: 118, 120) | | |
| Caldicellulosiruptor | 849 | 34.2% | PolATF-PolATR | NcoI-BamHI | SEQ ID NO: 6 |
| Tok7B.1 | | | (SEQ ID NOs: 118, 120) | | |
| Caldicellulosiruptor | 849 | 34.4% | PolATF-PolATR | NcoI-BamHI | SEQ ID NO: 7 |
| Rt69B.3 | | | (SEQ ID NOs: 118, 120) | | |
| Caldicellulosiruptor | 849 | 34.5% | PolATF-PolATR | NcoI-BamHI | SEQ ID NO: 5 |
| Tok13B.1 | | | (SEQ ID NOs: 118, 120) | | |
| Clostridium | 867 | 35% | PolATF-PolATR | NcoI-BamHI | SEQ ID NO: 3 |
| thermosulfurogenes | | | (SEQ ID NOs: 118, 120) | | |
| Clostridium | 898 | 44% | PolATF-PolATR | NcoI-BamHI | SEQ ID NO: 2 |
| stercorarium | | | (SEQ ID NOs: 118, 120) | | |
| Bacillus caldolyticus | 878 | 46.5% | PolGCF1-PolGCR | NcoI-BamHI | SEQ ID NO: 8 |
| EA1 | | | (SEQ ID NOs: 116, 119) | | |
| Caldibacillus | 904 | 64% | PolGCF1-PolGCR | NcoI-BamHI | SEQ ID NO: 4 |
| cellulovarans | | | (SEQ ID NOs: 116, 119) | | |
| CompA.2 | | | | | |
| Thermophilic | 898 | 65% | PolGCF1-PolGCR | EcoRI-SalI | SEQ ID NO: 12 |
| Spirochaete | | | (SEQ ID NOs: 116, 119) | | |
| Tepidomonas sp. | 928 | 68% | PolGCF1-PolGCR | EcoRI-SalI | SEQ ID NO: 13 |
| | | | (SEQ ID NOs: 116, 119) | | |
| Thermus Rt 41A | 833 | 68.3% | PolGCF1-PolGCR | EcoRI-SalI | SEQ ID NO: 9 |
| | | | (SEQ ID NOs: 116, 119) | | |

TABLE 34
Kinetic analysis of the DNA and RNA-dependent
polymerase activities of various polymerases

| | Kcat s−1 | Km (μM) | | Kcat s−1 | Km (μM) | |
|---|---|---|---|---|---|---|
| | DNA | DNA | Kcat/Km | RNA | RNA | Kcat/Km |
| Protein | (dGTP) | (dGTP) | Efficiency | (dTTP) | (dTTP) | Efficiency |
| Tne | 17.5 | 17.2 | 1 | 0.094 | 37 | 0.0025 |
| Cst-His | 11.5 | 0.5 | 23 | 19.2 | 76 | 0.25 |
| Cth-His | 57 | 17.1 | 3.4 | 0.94 | 68 | 0.014 |
| CompA.2 | 200* | | | 5 | 17 | 0.3 |
| Peak2A | | | | | | |
| SSII | 15.4 | 2.4 | 6.4 | 14.5 | 17 | 0.85 |

*Assay done in the presence of 1.5 mM MgCl₂ at 55° C. The others were assayed in the presence of 2 mM MgCl₂ at 45° C.

TABLE 35
Correlation of Reverse Transcriptase Activity, Thermal Stability and Conserved Amino Acid Sequence
of a Select Group of Eubacterial Thermophilic DNA Polymerases

| | RT Activity | | Thermal Stability | | | | Amino Acid Motif |
|---|---|---|---|---|---|---|---|
| Origin | Mn^{++a} | Mg^{++b} | 60° C. | 70° C. | 80° C. | 90° C. | ry x₈ F x₃ SFaer |
| Thermus aquaticus | −− | −− | +++ | +++ | +++ | +++ | ryvpdlearvKsvrEAaer |
| | | | | | | | (SEQ ID NO: 46) |
| Thermus RT 41A | −− | −− | +++ | +++ | +++ | ++ | ryvpdlasrvRsvrEAaer |
| | | | | | | | (SEQ ID NO: 47) |
| Thermatoga neopolitina | + | ++ | +++ | +++ | +++ | +++ | rdipqlmardKntqSEger |
| | | (10)^{c} | | | | | (SEQ ID NO: 48) |
| Thermus thermophilus | ++ | ++ | +++ | +++ | +++ | +++ | ryvpdlnarvKsvrEAaer |
| | | (10) | | | | | (SEQ ID NO: 49) |
| Dictyoglomus thermophilum | + | −− | +++ | +++ | +++ | ++ | ryipeiksinKqvrNAyer |
| | | | | | | | (SEQ ID NO: 50) |
| Caldocellulosiruptor | + | −− | ++ | −− | −− | −− | ryikdikstnKnlrNYaer |
| saccharolyticus | | | | | | | (SEQ ID NO: 51) |
| Caldocellulosiruptor | ++ | ++ | +++ | +++ | ++ | −− | ryikdikstnKnlrNYaer |
| Tok13B.1 | | (10) | | | | | (SEQ ID NO: 52) |
| Caldocellulosiruptor | ++ | ++ | +++ | +++ | ++ | −− | ryikdikstnKnlrNYaer |
| Tok7B | | (10) | | | | | (SEQ ID NO: 53) |
| Caldocellulosiruptor RT69B | ++ | ++ | +++ | +++ | ++ | −− | ryikdikstnKnlrNYaer |
| | | (10) | | | | | (SEQ ID NO: 54) |
| Bacillus caldolyticus EA1 | +++ | +++ | +++ | ++ | −− | −− | rylpditsrnFnvrSFaer |
| | | (10) | | | | | (SEQ ID NO: 55) |
| Clostridium | +++ | +++ | +++ | +/− | −− | −− | ryipeinsknFhqrSFgkr |
| thermosulfurogenes | | (20) | | | | | (SEQ ID NO: 56) |
| Clostridium stercorarium | +++ | +++ | +++ | + | −− | −− | rylpelasknFhqrSFgkr |
| | | (4) | | | | | (SEQ ID NO: 57) |
| Caldibacillus cellulovarans | +++ | +++ | +++ | + | −− | −− | rylpdinasnYnlrSFaer |
| CompA.2 | | (1) | | | | | (SEQ ID NO: 58) |

^{a}Efficiency of synthesis of ³²P-labeled full-length cDNA from CAT mRNA at 60° C. in the absence of additives under sub-optimal conditions.
^{b}Efficiency of synthesis of ³²P-labeled full-length cDNA from CAT mRNA at 60° C. in the absence of additives under optimal conditions.
^{c}The numbers in parentheses are the units required under optimal conditions to produce full-length CAT cDNA (700 bp) in the presence of Mg⁺⁺

TABLE 37
Representative sequences of Q-helices

| Pol AA | | Starting | |
|---|---|---|---|
| SEQ ID NO | Organism | AA # | RY X₈ F X₃ SFaer |
| SEQ ID NO: 14 | Clostridium stercorarium | 815 | RYlpelasknFhqrSFgkr |
| | | | (SEQ ID NO: 57) |
| SEQ ID NO: 15 | Clostridium thermosulfurogene | 784 | RYipeinsknFhqrSFgkr |
| | | | (SEQ ID NO: 56) |
| SEQ ID NO: 16 | Caldibacillus cellulovorans | 820 | RYlpdinasnYnlrSFaer |
| | | | (SEQ ID NO: 58) |
| SEQ ID NO: 17 | Caldicellulosiruptor TOK13B.1 | 766 | RYikdikstnKnlrNYaer |
| | | | (SEQ ID NO: 52) |
| SEQ ID NO: 18 | Caldicellulosiruptor Tok7B.1 | 766 | RYikdikstnKnlrNYaer |
| | | | (SEQ ID NO: 53) |
| SEQ ID NO: 19 | Caldicellulosiruptor Rt69B.1 | 766 | RYikdikstnKnlrNYaer |
| | | | (SEQ ID NO: 54) |
| SEQ ID NO: 20 | Bacillus caldolyticus EA1 | 795 | RYlpditsrnFnvrSFaer |
| | | | SEQ ID NO: 55 |
| SEQ ID NO: 21 | Thermus Rt41A | 759 | RYvpdlasrvRsvrEAaer |
| | | | (SEQ ID NO: 47) |
| SEQ ID NO: 22 | Dictyoglomus thermophilum | 779 | RYipeiksinKqvrNAyer |
| | | | (SEQ ID NO: 50) |
| SEQ ID NO: 23 | Caldicellulusiruptor | 766 | RYikdikstnKnlrNYaer |
| | saccharalyticus | | (SEQ ID NO: 51) |
| SEQ ID NO: 24 | Spirochaete | 823 | RplpyitsrnKtqkTGaer |
| | | | (SEQ ID NO: 60) |
| SEQ ID NO: 25 | Tepidomonas | 854 | RLvlpeiqspNgprRAaaer |
| | | | (SEQ ID NO: 61) |
| SEQ ID NO: 27 | Thermus aquaticus | 728 | RYvpdlearvKsvrEAaer |
| | | | (SEQ ID NO: 46) |
| SEQ ID NO: 29 | Thermus thermophilus | 730 | RyvpdlnarvKsvrEAaer |
| | | | (SEQ ID NO: 49) |
| SEQ ID NO: 30 | Thermoanaerobacter AZ3B.1 | 751 | RYipeinsrnFtqrSQaer |
| | | | (SEQ ID NO: 62) |
| SEQ ID NO: 32 | Bacillus stearothermophilus | 771 | RYlpditsrnFnvrSFaer |
| | | | (SEQ ID NO: 63) |
| SEQ ID NO: 33 | Bacillus caldotenax | 772 | RYlpditsrnFnvrSFaer |
| | | | (SEQ ID NO: 64) |
| SEQ ID NO: 34 | Escherichia coli | 823 | lylpdikssnGarrAAaer |
| | | | (SEQ ID NO: 65) |

TABLE 38
Thermal inactivation profiles of purified DNA polymerases^{a}

| | Percent activity^{b} remaining after heating | | | | | | | | |
|---|---|---|---|---|---|---|---|---|---|
| | for 10 min at the temperatures (° C.) below | | | | | | | | |
| Enzyme | 55 | 60 | 65 | 70 | 75 | 80 | 85 | 90 | 95 |
| Cth-His | 90 | 60 | 1 | 0 | —^{c} | — | — | — | — |
| CA2 | 109 | 101 | 47 | 0 | — | — | — | — | — |
| Cst-His | 95 | 94 | 81 | 0 | — | — | — | — | — |
| B.EA1 | 94 | 94 | 65 | 7 | 0 | — | — | — | — |
| Tok13B | — | — | 100 | 65 | 33 | 8 | 0 | — | — |
| Tok7B | — | — | — | 105 | 87 | 12 | 0 | — | — |
| RT69B | — | — | 100 | 84 | 69 | 37 | 0 | — | — |
| Dth | — | — | — | — | 100 | 93 | 88 | 21 | 1 |
| RT41A | — | — | — | — | 100 | 87 | 92 | 87 | 12 |

^{a}The results of a single experiment are shown. Similar results were obtained in at least two other experiments.
^{b}DNA polymerases were heated and activity was determined using the DNA-directed DNA polymerase unit activity assay as described in Materials and Methods. A reference sample of each DNA polymerase was kept on wet ice and assayed to establish 100% activity.
^{c}— is not determined.

TABLE 39
DNA polymerase specific activities of purified DNA polymerases
with a DNA-DNA and RNA-RNA template-primer^{a}

| | | Specific Activity (Units/mg) | | |
|---|---|---|---|---|
| | Temperature | | | Ratio |
| Enzyme | (° C.)^{b} | DNA-DNA^{c} | RNA-DNA^{d} | (RNA/DNA) |
| Taq | 72 | 80,000 | <1 | — |
| RT41A | 72 | 84,500 | <1 | — |
| Dth | 72 | 37,800 | <1 | — |
| RTth | 72 | 150,000^{e} | 130 | 0.001 |
| Tok7B | 72 | 33,800 | 60 | 0.002 |
| Cth-His | 55 | 12,700 | 30 | 0.002 |
| RT69B | 72 | 16,800 | 50 | 0.003 |
| Tok13B | 72 | 34,800 | 160 | 0.005 |
| Tne | 72 | 31,300 | 325 | 0.01 |
| B.EA1 | 55 | 45,800 | 4,400 | 0.10 |
| Cst-His | 55 | 19,500 | 2,100 | 0.11 |
| CA2 | 55 | 20,000 | 4,900 | 0.25 |

^{a}The results of a single experiment are shown. Similar results were obtained in at least one other experiment.
^{b}Assays were carried out at optimal temperatures.
^{c}Activity with DNA-DNA was determined with activated salmon testes DNA (Materials and Methods)
^{d}Activity with RNA-DNA was determined with CAT cRNA•DNA 20-mer (Materials and Methods)
^{e}Taken from Abramson (1995).

TABLE 40
Catalytic constants of purified DNA polymerases
with DNA-DNA and RNA-DNA template-primer^{a}

| | | k_{CAT} (sec⁻¹) | | |
|---|---|---|---|---|
| | Temperature | | | Ratio |
| Enzyme | (° C.)^{b} | DNA-DNA^{c} | RNA-DNA^{d} | (RNA/DNA) |
| RT41A | 72 | 187 ± 7 | <1 | — |
| Dth | 72 | 39 ± 15 | <1 | — |
| Tne | 72 | 130 ± 32 | 0.2 ± 0.04 | 0.002 |
| RT69B | 72 | 20 ± 5 | 0.6 ± 0.36 | 0.03 |
| Tok13B | 72 | 43 ± 9 | 1.2 ± 0.5 | 0.03 |
| Cth-His | 55 | 28 ± 1 | 16 ± 1 | 0.57 |
| B.EA1 | 55 | 73 ± 16 | 43 ± 7 | 0.59 |
| CA2 | 55 | 82 ± 9 | 48 ± 9 | 0.59 |
| Cst-His | 55 | 40 ± 13 | 88 ± 5 | 2.2 |
| SS II RT | 37 | 16 ± 2 | 45 ± 18 | 2.8 |

^{a}The mean ± standard deviation of two to four determinations is shown.
^{b}Assays were carried out at optimal temperatures.
^{c}Catalytic constants were determined with (dA)₂₇₀•(dT)₄₀ with the exception that for Tne DNA polymerase and SS II RT (dC)ₙ•(dG)₃₅ was used (Materials and Methods).
^{d}Catalytic constants were determined with (rA)₂₅₀•(dT)₃₀ at 55° C. or (rA)₂₅₀•(dT)₄₀ at 72° C.

TABLE 41
Conservative Amino Acid Substitutions

| | |
|---|---|
| Aromatic | Phenylalanine |
| | Tryptophan |
| | Tyrosine |
| Hydrophobic | Leucine |
| | Isoleucine |
| | Valine |
| Polar | Glutamine |
| | Asparagine |
| Basic | Arginine |
| | Lysine |
| | Histidine |
| Acidic | Aspartic Acid |
| | Glutamic Acid |
| Small | Alanine |
| | Serine |
| | Threonine |
| | Methionine |
| | Glycine |

1-222. (canceled)

123. An isolated nucleic acid comprising a nucleotide sequence encoding a polypeptide comprising an amino acid sequence that is at least 80% identical to at least forty contiguous amino acids in any one of SEQ ID NOS: 14-25, wherein the polypeptide has a nucleotide polymerase activity.

124. The nucleic acid according to claim 123, wherein the polypeptide encoded by the nucleic acid has both a DNA-dependent and an RNA-dependent nucleotide polymerase activity.

125. An isolated nucleic acid comprising a nucleotide sequence that hybridizes under stringent conditions to a nucleic acid comprising a sequence complementary to a sequence of any one of SEQ ID NOS: 2-13, and encodes a polypeptide having a nucleotide polymerase activity.

126. The nucleic acid according to claim 125, wherein the hybridization is performed under the following conditions: 42° C. in 50% formamide, a first wash at 65° C. in 2×SSC and 1% SDS, and a second wash at 65° C. in 0.1×SSC.

127. The nucleic acid according to claim 126, wherein the polypeptide encoded by the nucleic acid has both a DNA-dependent and an RNA-dependent nucleotide polymerase activity.

128. A polypeptide comprising an amino acid sequence that is at least 80% identical to at least forty contiguous amino acids in any one of SEQ ID NOS: 14-25 and mutants, fragments and fragments of mutants thereof wherein the polypeptide, mutant, fragment or fragment of mutant has a nucleotide polymerase activity.

129. The polypeptide according to claim 128, wherein the polypeptide has both a DNA-dependent and an RNA-dependent nucleotide polymerase activity.

130. A method of amplifying a double-stranded DNA molecule comprising:
(a) providing a first and second primer, wherein the first primer is complementary to a sequence of the first strand of the DNA molecule and the second primer is complementary to a sequence of the second strand of the DNA molecule;
(b) hybridizing the first primer to the first strand and the second primer to the second strand in the presence of a polypeptide according to claim 6, under conditions such that a third strand of the DNA molecule complementary to the first strand and a fourth strand of the DNA molecule complementary to the second strand are synthesized;
(c) denaturing the first and third strand, the second and fourth strands; and
(d) repeating steps (a) to (c) one or more times.

131. The method according to claim 130, wherein the polypeptide has at least one mutation selected from the group consisting of (1) a mutation that reduces, substantially reduces or eliminates 5′-3′ exonuclease activity of the DNA polymerase, (2) a mutation that results in the DNA polymerase becoming non-discriminating against dideoxynucleotides, and (3) a mutation that increases thermostability of an activity of the polypeptide.

132. A kit for amplifying a DNA molecule, comprising a first container containing a polypeptide according to claim 128.

133. The kit according to claim 132, further comprising a second container containing one or more deoxyribonucleoside triphosphates.

134. A kit according to claim 132, wherein the polypeptide has at least one mutation selected from the group consisting of (1) a mutation that reduces, substantially reduces or eliminates 5′-3′ exonuclease activity of the DNA polymerase, (2) a mutation that results in the DNA polymerase becoming non-discriminating against dideoxynucleotides, and (3) a mutation that increases thermostability of an activity of the polypeptide.

135. The kit according to claim 132, wherein the deoxyribonucleoside triphosphates are selected from the group consisting of: DATP, dCTP, dGTP, dTTP, dITP, 7-deaza-dGTP, dUTP, [α-S]dATP, [α-S]dTTP, [α-S]dGTP, and [α-S]dCTP.

136. The kit according to claim 132, wherein the kit further comprises a container containing a pyrophosphatase.

137. A method for synthesizing a DNA molecule comprising:
(a) hybridizing a primer to a first nucleic acid molecule to form a complex; and
(b) incubating the complex in the presence of a polypeptide according to claim 6, and one or more deoxyribonucleoside triphosphates under conditions sufficient to synthesize a second DNA molecule complementary to all or a portion of the first nucleic acid molecule.

138. The method according to claim 137, wherein the primer and/or one or more of the deoxyribonucleoside triphosphates are fluorescently labeled.

139. A method according to claim 137, wherein the polypeptide has at least one mutation selected from the group consisting of (1) a mutation that reduces, substantially reduces or eliminates 5′-3′ exonuclease activity of the DNA polymerase, (2) a mutation that results in the DNA polymerase becoming non-discriminating against dideoxynucleotides, and (3) a mutation that increases thermostability of an activity of the polypeptide.

140. The method according to claim 137, wherein the deoxyribonucleoside triphosphates are selected from the group consisting of: DATP, dCTP, dGTP, dTTP, dITP, 7-deaza-dGTP, dUTP, [α-S]dATP, [α-S]dTTP, [α-S]dGTP, and [α-S]dCTP.

141. A method for reverse transcribing RNA into complementary DNA (cDNA) and amplifying the cDNA, comprising:
(a) hybridizing a first primer to the RNA molecule in the presence of a polypeptide according to claim 6 to form a reaction mixture;
(b) incubating the reaction mixture under conditions such that a cDNA molecule complementary to the target RNA is synthesized;
(c) treating the reaction mixture to provide single stranded cDNA;
(d) hybridizing a second primer to the cDNA molecule in the presence of the DNA polymerase of the invention, under conditions such that an extension product is synthesized to provide a double-stranded cDNA molecule; and
(e) amplifying the double-stranded cDNA molecule of (d) by a polymerase chain reaction.

142. A nucleic acid polymerase having an RNA-dependent DNA polymerase activity, wherein the activity occurs in the presence of magnesium, manganese or a mixture of magnesium and manganese.

143. The nucleic acid polymerase according to claim 142, wherein the polymerase further has a DNA-dependent DNA polymerase activity, the DNA-dependent DNA polymerase activity occurring under the same manganese/magnesium ratios as the RNA-dependent DNA polymerase activity.

144. A nucleic acid polymerase having a DNA-dependent DNA polymerase activity, wherein the activity occurs in the presence of magnesium, manganese or a mixture of magnesium and manganese.

145. A nucleic acid polymerase according to claim 142, wherein the magnesium is present at a concentration of from about 0.1 to 5.0 mM.

146. The nucleic acid polymerase of claim 142, wherein the manganese is present at a concentration of about 0 to about 2 mM.

147. The nucleic acid polymerase according to claim 144, wherein the activity occurs in the absence of manganese.

148. The nucleic acid polymerase according to claim 145, wherein the activity occurs in the absence of manganese.

149. A polypeptide having an RNA-dependent DNA polymerase specific activity and a DNA-dependent DNA polymerase specific activity, wherein the ratio of RNA-dependent DNA polymerase specific activity to DNA-dependent DNA polymerase specific activity is greater than about 0.01.

150. The polypeptide according to claim 149, wherein the ratio is greater than about 0.2.

151. The polypeptide according to claim 149, wherein the RNA-dependent specific activity is greater than about 500 units/mg polypeptide.

152. The polypeptide according to claim 149, wherein the DNA-dependent DNA polymerase specific activity is greater than about 10,000 units/mg polypeptide.

153. The polypeptide according to claim 149, wherein the RNA-dependent DNA polymerase activity is greater than about 2,000 units/mg polypeptide.

The application's sequence listing, which the Patent Office published only in electronic form, follows.

SEQUENCE LISTING (3642 sequences)

SEQ ID NO: 1 - protein, 19 aa, Artificial Sequence
  Description of Artificial Sequence: Synthetic Q Helix consensus sequence peptide
  MOD_RES (3)..(10): Any amino acid
  MOD_RES (12)..(14): Any amino acid
RYXXXXXXXXYXXXSFAER

SEQ ID NO: 2 - DNA, 2772 bp, Artificial Sequence
  Description of Artificial Sequence: Synthetic Clostridium stercorarium DNA Polymerase DNA sequence from pET26B vector, clone #7
atgaaatacctgctgccgaccgctgctgctggtctgctgctcctcgctgcccagccggcgatggccatggatccaaaaataatccttatagacggaaacagtattttaaaccgcggtttttatgccctgtcggggcgatccatgctgactacgtccacaggtctgtataccaatgcggttttcgcttttgtaaatatattgaacaaatatatcgaagaggaaaaccctgattatattgccgttgctttcgatcttagggcaaaaactttccggcacggtctatatgagggatacaaagcgcagcggaaaggcatgcccgatgaacttgcaatgcagatacccctcgcgaaggaagtactgagggcgatgaatattgccataatagagcatgaaggttatgaagccgacgatataatcggcagcctttcgttaaaggccgaaaaagagaattttgacgtaataatccttacgggggacagggattctttccagctgatcagcgacagggtgaaagttatcctgccttcgacgaaagccggaaaaacagagaccaacgtatatgataaacaggccatcattgacaaatacggagttttaccccatcagcttattgacgttaaaggcttaatgggagattcgtcagataatatacccggcgttccgggagtgggtgagaaaacggcgttaagccttatttcagcctacggtacactggaaggtgtttacgagcatattgatgaaataaaacagcctaagctgaaagcatcgctgattgaatataaggatcaggcgtttttaagccgtaagctgggtactattgtaagaaatctggagctgtgtgcttcgctggaggatctgaaaagaaaagaaataaaccgcaaagagcttttgaatgttttcagaaaactcgaatttgaaagtatcatatcaaaaatgaatcttgcttccgctgaggtgacagaattacctcccgcgccggaagagcttaaaataacccatatttcagcggcagaggatcttaagaaatggattgcttacctgcttaaccagaaaaacatttccgtccttcaactgattgaccgggaggattcatacagttcccgtctttcagggctggctttgtgcaccggggatgaggttttttatatcgagaccgggactgcactccccgagaatttgattgcaacagagctgaaagaactgtggcagaatgaaaatattcacaaaatcggacacaatataaaagaatttataacctggctgctgaaacacgatgttgaactgaacggcctttatttcgacactatgattgccgaatacctgatagattccataagaaacggctatcctatagcaagcctttctcacaaatacctgaatcgcagcgttccgtcgctggacgaacttttgggcaagggaaagggagcaaaaaagtactctgaaattccgcccgaaaggctgaaagattacagcgcttataacgtcaaagccatttttgacatatggccgatgcagaaaaaagttcttcaggaaaaccggcaggaggagctttttaatgacatagagcttcctcttataaccgtacttgccagtatggaataccacggtttcaaagttgacgccgcaaaacttcacgaatacggcgaagttcttctgtcacgcataaaagacctggaaaaggtaatttacatgctggccggtgaagaattcaacatcaattcaacgaagcagcttggtaccatattattcgaaaaactgaagcttcccgttgtaaaaagtacaaagaccggatactccaccgacgtcgaggttcttgaagagctttattacaagcatgatataataccatgcataatagaataccgccagcttacaaaactttacaccacctacgccgaaggtcttgaaaaagtgataaatcctgtaaccggtaaaattcattcaagttttaaccagacggttacggctacaggccgcatcagcagtaccgaaccaaatttacagaatatcccagtcagacacgaaatgggaagggaaatacggaaagcttttattccgtcgtcggaaaacgctgtttttgttgatgccgattattcacagatagagcttcgcgtgcttgcccatataacaggcgatgaagccctgataaatgctttcgttaagggggaagatattcatacggccacggcgtcgctggtatttgacgtagctcccgaagatgtgacgccggaactgcgcagaaaggcaaaagccgtaaatttcggcatagtgtacgggatcagtgattacgggctggcacgggatttgggaattacccggaaggaagcaaagcggtatatagacgactattttgccaaataccccaaagtaaaaacctatgtggatgaaattgtgcgggtcggccaggaacaggggtatgtggaaactctgttccacagaagaagataccttcccgagcttgcatctaaaaattttcaccagcgttctttcggaaaaagggttgcaatgaatacgcccatacagggcactgcagccgatattattaaaattgcgatggtgaaggtatacaaggctttgaaagaatccggccttaaatccaggcttatcctccaggtccatgacgaacttgttattgagacttttgaagacgaactggagactgtcaaggaacttgtcaaaaagtgcatggaagaggccgttgaattgagtgtgccgcttgttgtcgacgtttcaatcgggaaaaactggtatgaagcctcctgatatggatcc

SEQ ID NO: 3 - DNA, 2678 bp, Artificial Sequence
  Description of Artificial Sequence: Synthetic Clostridium thermosulfurogenes DNA Polymerase, sequence from pET2 6B vector, clone #2
atgaaatacctgctgccgaccgctgctgctggtctgctgctcctcgctgcccagccggcgatggccatggcgaaatttttgatcatagatggtaatagcttgatgtacagggcgtattttgccctgcctgatttgatgaacagcgaaggaatgcatacaaatgccatatacggtttttcaatgatgcttcttaaattgctggaggaggagaaaccagactacatagcaatagctttcgataaaaaggcttctacatttaggcacaaggagtacagtgcttataaaggaacccgccagtcgatgccagaagagctgatagaacaggtggatattttaaaagatgtgataaatgcatttaacataaagaccatcgagatagagggatttgaagcagatgatatcattggtacagtatcaaaaattgcttccgaaagtgggatggatgtgcttatcgtcacaggcgacagagatgcgcttcagcttgtgtcggcaaatgtaaaagtaaaaatatgtaaaaaaggcataacgcagatggatgagtacgatgaaaaggcggtctttgaaaagtatgaagtgacgccgcttcaattcatagacttgaaagggcttatgggagacaaatcagacaacattccaggagtgcccaatataggggagaagacggccataaagcttgttaaagaatttggatcaattgaaaatttactgatgaatacagataagttaaaagggaaaataaaagaaaatgtagaaaacaatgcagaattagctgttttaagcaaacggcttgctacgattgagagaaatgttcctattgatattgatttgaatgaatacgcggttaaaaattacgatgtcaataagcttacagagctatttgaaaaattggaattttcaagcctcatctcagatttaaaagatgatagtcgtgatacaaaggatattaaagaatggcctgtaagagattttacatacgttaaaaatgttttaggaaagtttgatgttttgtcattgtatccattcatatatgatggaaagataaaagcagtatcatttgcttgcggtgacggatcgttttttgtagagattgatgattatgacaattttaaattgcttaataatgataagcttacgttgataggacacgatctgaaagattttttagtaaacatttcatactgcggtattgaacttaattgtaagattttagatacggccataatgacttatcttttaaatccgtctgagtcgaattacgacataagtcgcgtattgaaaaaatacttgaaagaggatttgcaaaacatagatgatatagtaggcaagggcaggaataaaaagagctacgatgacattgacaaaaagcttttagtcgattatatgtgttcagccgcatcaaacttatctaagttaaaagataagctcatgtcatttataaaagagatggagatggaagatcttttaaaaaatgtggaaattccgcttattgaagtgctaaaatctatggaggtgtacggctttacattagataaagatgtacttagaagtatttctaaagaaatagatgaaaagacagataagattgtaaaagatatttacgatgctgctggatacgaatttaatattaactctacaaagcagttatcagaatttttgtttgataaactgaatttgccagcaataaaaaagactaaaacagggtattcgactgacatggaagtccttgcagaacttataccgtacaatgacatagtaggagaaataatagaatatagacagcttatgaagcttaaatctacgtacatagatggcttcattcccatcatggatgaaaataatagggtccactctacgtttaaacaaacagttgctgctacagggagaattagctcaacagagcctaatctgcagaacatacctgtaagagaagaatttggcaggaggataagaaaggcatttgtatcaagttatgaagatgggcttataatatctgctgattattctcagattgagctaagggttcttgcacatctttcagaggatgaaaaacttattgagtcatttttgaacaacgaagatatacatttaaggacggcatcggaggtttttaaggtttcgaaagaagaagtgacaagtgaaatgagaaggcgggcgaaagctgtcaactttggtattgtatatggtataagcgattacggcttatctaaagacttaaagatttcgcgaaaagaagcgaaagaatacatagacaattattttgacaggtacaagggcgtcaaaaattacatcgactcaattgtcaaatttgcaaaggaaaatgggtatgttacgactatcttaaataggagaagatacataccggaaatcaattcaaaaaattttaaccaaagatcttttggcgagagaatggcaatgaatacacctattcaaggtagcgctgcggatataataaagatgtcgatggttaaagtatacaatgaattaaaggaaagaggattgaaatcaagacttattcttcaggtgcacgatgagcttataattgacacacatcctgatgaagttgaaatagtcaaggagcttctaaaatcaataatggaaaatatcataaagttgaaagttcctttagttgtagatatagggcaagggaaaaactggtatgatgcaaaataaaaggatcc

SEQ ID NO: 4 - DNA, 1740 bp, Artificial Sequence
  Description of Artificial Sequence: Synthetic Caldibacillus cellulovorans CompA.2 DNA Polymerase sequence from pET26B vector, clone #1/#1
atgaaatacctgctgccgaccgctgctgctggtctgctgctcctcgctgcccagccggcgatggccatgggcaaactgattctggtcgacggaaacagcgtcgccaaccgggcgttttacgccgtccggctgctcagcacgcgcggcggcctgcacacaaacgcggtgtacggattcgccaacatgttgctcaagctgatcgaggaggaacggccgacgcattttctcgtcgcgttcgacgcgggcaaggcgacgttccgtcatcgcgaatacgaggcctacaaggcgggtcgcctgcagacgccgcccgagctgtccgagcagtttccgtacatccgggagctcgtccgggcgttcggcgtcgcgtccggcgagctggaggaatacgaggcggacgacatgatcggtacgctggcgaaacgggcggaggccgagggcgtcgacacgctggtcgtcaccggcgaccgcgatttgctccagctcgtatcggaccgcgtgaccgtcgcgctgacgcgcaagggcatcacggaaacggagcggtacgacccggcgcgcatccgcgaggaatacggcttcgatcccgaccgcatccgcgacctcaaagggctgatgggcgacgcgtctgacaatcttcccggcgttcccggcgtcggtgagaaaaccgcactgaaactgctcaggcagtacggttcgctggagagcgtcctggaacacgcgtcggaaatcgccggaaagctcggtgaaaatctgcgggcgcacgccgacgccgcccgattgagcaagcggctggcgacgatcgactgcgcggtaccgttgcagtcgggatgggactggctgcgcctcggcgaaccggaccgcgccgcgctcgcctcgctgttgcggcagctcgaattcaagtcgctgttgaaacggctcggactcgacggcacgtccgccgatgccgacgtcgacggcgtccgttcctccgcgcggccggcggacgagaaacggccgagggccgtcgccgtcgctgaggagggcgtcgacgtccgctgtccggatcgcccggaagaagtcgaagaagcgctgtcgcggctggaagccgcccagtcggtcgtcgtcgaggtgacgggcgacaacccgcacgacggcgaagtgcgcggcgtcgcatggtgggacggacatacggcgtatttcattccgtttgaacggctggtgcagtccgacatgcggccgctggccgactggctcgccgacgcgcgtcggccgaagcgtacgcacgactcccatcgcgctgaagtggcgctgttctggcacggccttgcgtttcgcggcacgtcgttctgcacgcatatcgccgcctatttgctcgaccccacggaatcgcgccatacgctggcggacctgtcgcgccgctacggtctgccgccggtaccggaagccgaggacgtttacggcaagggcgcgaagttcaaggttcccgatcgcgacacgctggcgcgttacgtcggccgcaaggccgccctagtcgcgcggctcgttccgctgctcgaggcggatttggcggcctgcggcatgcgttcgcttttttacgacctggagctgccgctttcatccgaactcgccgtcatggagacggtcggcgtccgcgtcgacgcggcggcgctcgccgcctacggcgaggaattgcgcgaggcggcggcgaaagtcgagcgggagatttacgagctggccgggacgacgttcaacatcggatcgacg

SEQ ID NO: 5 - DNA, 2623 bp, Artificial Sequence
  Description of Artificial Sequence: Synthetic Caldicellulosiruptor TOK13B DNA polymerase
atgaaatacctgctgccgaccgctgctgctggtctgctgctcctcgctgcccagccggcgatggccatggaatttgttatttttgatgggaatagtattctgtatagagctttttttgccttgccacagcttactacctcaacaggcatacctacaaatgctatatatggttttttgaatgtgctgttaaaatacttagattctgaaaaaccggattatgtagcagtagcttttgacaaaaaaggcagagctgtccgaaaaagtgaatatgaagaatacaaggctaacagaaaaccgatgccagattctcttcaggttcagataccttacgtaagagaaatacttgctgctctgaacattcctgtactgaaatgtgaagggtatgaagctgatgacgttataggcacacttgtaaatagatttaaagcccaggatttagagattgtgataataaccggagacagagatacacttcagttacttgataaaaatgtaattgtcaaaatagtcacaacaaggtttgacaggacaactgaagatttgtatgctgtagaaaatgtaaaagaaaaatatggtgtttttgcgcatcaggttgttgactataaagcattagtaggtgatgcgtcagacaatataccaggtgttaagggaattggagataaaactgccataaagctgttagaagagtaccagactctggagaatatatatcagaatctaaataacattaaaggagcgctaaaagagaagttggaatcaggaaaagacatggcatttttatcaaaaagactggctactatcatatgcgatttaccaattgaggtgaatcttgaagaattaaaaaccaaagaatgggacaaagaaagactttatcagattttacttcaacttgagtttaaaagctttattaaaagactgggcttttcagaagagattaactatgcaaggcagaactttcagctacctgaatttagtattaaagaacttcgtgatgtttcagcaatagggggcaaagaaatctatctattgtactcagatgaagaaggacttttttatatttatgaccatcaaacctcaaccatttttacaacttctgataaggaagctattaaagatcttttaacactccaaagcattcaaaaggttgtatatgatttaaaaaatatactccataaggtggactttgatgaagctaatcagataaaaaattgtaatgatgttatgttggcttcatatgttttggacagtacacgcagttcgtacgatttggaaacattgtttatttcttatctcaacactgatatagctgcaatcaaagagaatagatgggctggtgctacagttttattaagaaatctttgggatgaactttcaaaactcattgatttaaactcggcccaatacgtttatgagagcatagagatgcctcttgttcccattttatatgaaatggagaaaatcggttttaaggttgacaaaaacactttgcaggagtatacaaaagagattgagagcaagcttttaaagttggaatcacagatttatcaaatagccggtgaatggtttaacataaactcgccaaaacaactctcatatatattattcgaaaaactgaagcttccggttgttaaaaagaccaaaacaggatattcaacagatgccgaggtattagaagagctgtatgataaacatgacataataccgcttattctggattatagaatgtatacgaaaatactgacaacttactgtcagggactggttcaggcaataaatcctgcaactggaagaattcataccaactttattcagacaggtacggcaactggaagacttgcaagtgcagagcccaatctgcaaaatattcctgtaaaatatgatgagggaaagctaataagaaaggcatttgttccagatgaaggttatgtgttgatagatgctgattattctcagattgagcttagaatacttgcacatatctctgaggatgaacgactgataaatgcttttaaaaataaccttgatattcattcacagacggcggcagagatctttggtgtggatataagtcaggttacaccaattatgcgaagccaggcaaaagcagttaactttggaattgtatatggtatatctgattatggactttcacgggatataaagatttcaagaaaagaagcagccgagtttattaatcgttattttgaaaagtatcccagagtaaaagaatatttggacaatgtcgtcaagtttgcccgtgaaaacggatttgttttgacaatatttaacaggaaaaggtatatcaaggatataaagtctactaataaaaacctgagaaactatgcagagagaatagcaatgaattcacctatccagggaagtgctgcagatattatgaaaatagcaatgataagagtttataaaaagctaaaagaaaacaatttaaaatcaagaattattctgcaggtccatgacgaacttttgattgaatcaccctatgaagagaaagagatagtaaaggaaatagtaaaatcggagatggaaaatgcggttttattgaaagttcctttggtagttgaagtgaaagaaggttcaaattggtatgaaacaaagtaaaggatcc

SEQ ID NO: 6 - DNA, 2623 bp, Artificial Sequence
  Description of Artificial Sequence: Synthetic Caldicellulosiruptor Tok7B.1 DNA Polymerase sequence from pET26B vector, clone #1
atgaaatacctgctgccgaccgctgctgctggtctgctgctcctcgctgcccagccggcgatggccatggaatttgttatttttgatgggaatagtattctgtatagagctttttttgccttgccacagcttactacctcaacaggcatacctacaaatgctatatatggttttttgaatgtactgctaaaatacttggattctgaaaaaccggattatgtaacagtggcttttgacaaaaaaggcagagctgtccgaaaaagtgaatatgaagaatacaaggctaacagaaaaccaatgccggattctcttcaggttcagataccctacgtaagagaaatacttgctgctctgaacattcctgtactggaatgtgaggggtatgaagctgatgacgttataggcacacttgtaaatagatttaaggccctagatttagagattgtaataataaccggagacagagatacacttcagttacttgataaaaatgtaattgtcaaaatagtcacaacaaggtttgacaggacaactgaagatttgtatactgtagaaaatgtaaaagaaaaatatggtgtttttgcgcatcaggttgttgactataaagcattagtaggtgatgcgtcagacaatataccaggtgttaagggaattggagataaaactgctataaagctgttagaagagtaccagactctggagaatatatatcagaatctaaataatattaaaggagcgctaaaagagaagttggaatcaggaaaagacatggcatttttatcaaaaagactggctactatcatatgtgatttaccaattgaagtgaatcttgaagaattaaaaaccaaagaatgggacaaagaaagactttatcagattttacttcaacttgagtttaaaagctttattaaaagactgggtttttcagaagagattaactatgcaaggcagaactttcagctacctgaatttagtattaaagaacttcgtaatgtttcagcaataggaggcaaagaaatctatctattgtactcagatgaagaaggacttttttatatttatgaccatcaaacctcaaccatttttacaacttctgataagaaagctattaaagatcttttaacactccaaagcattcaaaaggttgtatatgatttaaaaaatatactccataaggtggactttgatgaagctaatcagataaaaaattgtaatgatgttatgctggcttcatatgttttggacagtacacgcagttcgtacgatctggaaacattgtttatttcttatctcaacacagatatagctgcaatcaaagagaatagatgggctggtgctacagttttattaagaaatctttgggatgaactttcaaaactcattgatctaaactcggcacaatacgtttatgaaagcatagagatgcctcttgttcccattttatatgaaatggagaaaatcggttttaaggttgacaaaaacactttgcaggagtatacaaaagagattgagagcaagcttttaaagttggaatcacagatttatcaaatagccggtgaatggtttaacataaactcgccaaaacaactctcatatatattattcgaaaaactgaagcttccggttgttaaaaagaccaaaacaggatattcaacagatgccgaggtattagaagagctgtatgataaacatgacataataccgcttattctggattataggatgtataccaaaatacttacaacttactgtcagggactggttcaggcaatcaatcctgcaactggaagaattcataccaactttattcagacaggtacggcaactggaagacttgcaagtgcagagcccaatctgcaaaatattcctgtaaaatatgatgagggaaaactaataagaaaggcatttgttccagatgaaggttatgtgttgatagatgctgattattctcagattgagcttagaatacttgcacatatttctgaggatgaacgactgataaatgcttttaaaaataaccttgatattcattcacagacggcggcagagatctttggtgtggatataagtcaggttacaccaattatgcgaagccaggcaaaagcagttaactttggaattgtatatggtatatctgattatggactttcacgggatataaagatttcaagaaaagaagcagccgagtttattaatcgttattttgaaaagtatcccagagtaaaagaatatttggacaatgtcgtcaggtttgcccgtgaaaatgggtttgttttgacaatatttaacaggaaaaggtatatcaaggatataaagtctaccaataaaaatctgagaaactatgcagagagaatagcaatgaattcacctatccagggaagtgctgcagatattatgaaaatagcaatgataagagtttataaaaagctaaaagaaaacaatttaaaatcaagaattattctgcaggtccatgacgaacttttgattgaatcaccctatgaagagaaagagatagtaaaggaaatagtaaaatcggagatggaaaatgcggttttattgaaagttcctttggtagttgaagtgaaagaaggttcaaattggtatgaaacaaagtaaaggatcc

SEQ ID NO: 7 - DNA, 2623 bp, Artificial Sequence
  Description of Artificial Sequence: Synthetic Caldicellulosiruptor Rt69B.3 DNA Polymerase sequence from pET26B vector, clone #1
atgaaatacctgctgccgaccgctgctgctggtctgctgctcctcgctgcccagccggcgatggccatggaatttgttatttttgatggtaatagtattctctatagagctttttttgccttgccacagcttactacctcaacaggcatacctacaaatgctatatatggttttttgaatgtgctgttaaaatacttagattctgaaaaaccggattacgtagcagtggcttttgacaaaaaaggtagagctgtccgaaaaagtgaatatgaagaatacaaggctaacagaaaaccaatgccagattctcttcaggttcagataccttacgtaagagaaatacttgctgctatgaacattcctgtactggaatgtgaagggtatgaagctgatgacgttataggcacacttgtaaatagatttaaagcccgggatttagagattgtgataataaccggagacagagatacacttcagttacttgataaaaatgtaattgtcaaaatagtcacaacaaggtttgacaggacaactgaagatttgtatactgtagaaaatgtaaaagaaaaatatggtgtttttgcgcatcaggttgttgactataaagcgttagtaggtgatgcgtcagacaatataccaggtgttaagggaattggagataaaactgctataaagctgttagaagagtaccagactctggagaatatatatcagaatctaaataacattaaaggagcgctaaaagagaagttggaatcaggaaaagacatggcatttttatcaaaaagactggctactatcatatgcgatttgccaattgaggtgaatcttgaagaattaaaaaccaaagaatgggacaaagaaagactttatcagattttacttcaacttgagtttaaaagctttattaaaagactgggcttttcagaagagattaactatgcaaggcagaactttcagctacctgaatttagtattaaagaacttcgtgatgtttcagaaatagaaggcaaagaaatctatctattgtactcagatgaagaaggacttttttgtatttatgaccatcaaacctcaaccatttttacaactcctgataaggaagctattaaacatcttttaacactacaaagcattcaaaaggttgtatatgatttaaaaaatatactccataaggtggactttgatgaaactaatcagataaaaaattgtgatgatgttatgttggcttcatatgttttggacagtacacgcagttcgtacgatttggaaacattgtttatttcttatctcaacactgatatagctgcaatcaaagagaatagatgggctggtgctactgttttattaagaaatctttgggatgaactttccaaactcattgatttaaactcggcccaatacgtttatgaaagcatagagatgcctcttgttcccattttatatgaaatggagaaaatcggttttaaggttgacaaaaacactttgcaggagtatacaaaagagattgagagcaagcttttaaagttggaatcacagatttatcaaatagccggtgaatggtttaacataaactcgccaaaacaactctcatatatattattcgaaaaactgaagcttccggttgttaaaaagaccaaaacaggatattcaacagatgccgaggtattggaagagctgtatgataaacatgacataataccgcttattctggattatagaatgtatacgaaaatactgacaacttactgtcaggggctggttcaggcaatcaatcctgtaactggaaggattcataccaactttattcagacaggtacggcaactggaagacttgcaagtgcagagcccaatctgcaaaatattcctgtaaaatatgatgagggaaagctaataagaaaggcatttgttccagatgaaggttatatgttgatagatgctgattattctcagattgaacttagaatacttgcacatatctctgaggatgaacgactgataaatgcttttaaaaataaccttgatattcattcacagacggcggcagagatctttggtgtggatataagtcaggttacaccaattatgcgaagccaggcaaaagcagttaactttggaattgtatatggtatatctgattatggactttcacgggatataaagatttcaagaaaagaagcagccgagtttattaatcgttattttgaaaagtatccaaaggtaaaagaatatttggacaatgttgtcaagtttgcccgtgaaaatgggtttgttttgacaatatttaacagaaaaagatatatcaaggatataaaatctaccaataaaaacctgagaaactatgcagagagaatagcaatgaattcacctatccagggaagtgctgcagatattatgaaaatagcaatgataagagtttataaaaagctaaaagaaaacaatttaaaatcaagaattattctgcaggtccatgacgaacttttgattgaatcaccctatgaagagaaagagatagtaaaggaaatagtaaaatcggagatggaaaatgcggttttgttgaaagttcctttggtagttgaagtgaaagaaggttcaaattggtatgaaacaaagtaaaggatcc

SEQ ID NO: 8 - DNA, 2712 bp, Artificial Sequence
  Description of Artificial Sequence: Synthetic Bacillus caldolyticus EA1 DNA polymerase
atgaaatacctgctgccgaccgctgctgctggtctgctgctcctcgctgcccagccggcgatggccatgggattgaaaaaaaagcttgttttaatcgacggcagcagcgtggcgtaccgcgcctttttcgccttgccgcttttgcataacgacaaaggcatccatacgaacgccgtctacgggtttacgatgatgttgaataaaattttggcggaagaagagccaactcatatgcttgtcgcgtttgacgccgggaaaacgacgttccggcatgaagcgtttcaagagtataaaggtgggcgccagcagacgccaccggagctgtcggagcagtttccgctgttgcgcgagctgctgagggcgtatcgcatccccgcctatgaactcgagaactacgaagcggacgatattatcggaacgcttgccgcccgcgctgagcaggaagggtttgaggtgaaagtcatttccggcgaccgcgatctgacccagctcgcctccccccatgtgacggtggacattacgaaaaaagggattaccgatatcgaaccgtacacgccggaggcggtccgcgaaaaatacggcttaactccggaacaaatcgttgatttgaaaggattgatgggcgacaaatcggacaacattcccggagtgccgggcatcggggaaaagacggcggtcaagctgctcaagcaattcggcacggtcgaaaacgtgcttgcctccattgacgagatcaaaggcgaaaagttgaaagaaacgctgcgccaacaccgggagatggcgctgttaagcaaaaagctcgccgccattcgccgcgacgccccggtcgagctctcgcttgatgacatcgtctatcaaggggaagaccgggagaaagtggtcgctttatttaaagagcttgggtttcaatcgtttttagagaaaatggaatcgccgtcatcagaagaggaaaaaccgcttgccaagatggcatttacgcttgctgaccgcgtgacggaggagatgcttgccgacaaggcggcgcttgtcgttgaagtggtcgaggaaaattatcatgatgcgccgatcgtcggcatcgctgtggtcaacgaacatggacggtttttcctgcgcccggagacggcgcttgccgatccgcagtttgtcgcctggcttggtgatgaaacgaagaaaaaaagcatgtttgactcaaagcgcgcggcagtcgccttgaaatggaaaggaattgagctatgcggcgtttcctttgatttattgctggccgcctatttgcttgatccggcgcaaggtgttgatgatgtggctgccgcagcaaaaatgaagcaatacgaagcggtgcgctcggatgaagcggtgtatggcaaaggggcgaagcgggccgtgccggatgagccagtgctcgccgagcatctcgtccgcaaggcggcggcgatttgggcgctcgaacgtccgtttttggatgagctgcgccgcaacgaacaagatcggttgctcgtcgagctcgagcagccgttgtcttcgattttggcggaaatggaatttgccggagtgaaagtggatacgaagcggctcgaacagatgggcgaagagctcgccgagcagctgcgcacggtcgagcagcgcatttatgagctcgccggccaagaattcaacatcaattcaccgaaacagctcggcgtcattttatttgaaaaactgcagctgcccgtcttgaaaaaaacgaaaaccggctactccacttcggcggatgtgcttgaaaaacttgcgccttatcacgagatcgtggaaaacattttgcattaccgccagcttggcaagttgcagtcgacgtatattgaaggattgctgaaagtcgtgcgacccgatacaaagaaggtgcatacgattttcaatcaggcgttgacgcaaaccggacggctcagctcgacggagccgaacttgcaaaacattccgattcggcttgaggaaggacggaaaatccgccaagcgttcgtgccgtcggagtctgattggctcattttcgctgccgactactcgcaaattgagttgcgcgtcctcgcccatattgcggaagatgacaatttaatggaagcgttccgccgcgatttggatatccatacgaaaacagcgatggacattttccaagtgagcgaggacgaagtgacgcccaacatgcgccgtcaggcgaaggcggtcaactttgggatcgtttacgggatcagtgattacggcttggcgcaaaacttaaatatttcacgcaaagaggccgctgaattcatcgagcgctacttcgaaagcttccctggcgtgaagcggtatatggaaaacattgtgcaagaagcaaaacagaaagggtatgtgacgacgctgctgcatcggcgccgctatttgccggatatcacgagccgcaacttcaacgtccgcagctttgctgaacggatggcgatgaacacgccgattcaagggagcgccgctgacattattaaaaaggcgatgatcgatctgaacgctagactgaaggaagagcggctgcaagcgcgccttttgctacaggtgcatgacgagctcattttggaggcgccgaaagaagagatggagcggctgtgccggctcgttccggaagtgatggagcaagcggtcacacttcgcgtgccgctcaaagtcgattaccattatggctcgacgtggtatgacgcgaaataaaaaggatcc

SEQ ID NO: 9 - DNA, 2605 bp, Artificial Sequence
  Description of Artificial Sequence: Synthetic Thermus Rt41A DNA Polymerase sequence from pET26B vector, clone # 3/#1
atgaaatacctgctgccgaccgctgctgctggtctgctgctcctcgctgcccagccggcgatggccatggatatcggaattaattcggatccgaattccccactttttgacctggaggaaccccccaagcgggtgcttctggtggacggccaccacctggcctaccgcaccttctacgccctgagcctcaccacctcccggggggagccggtgcagatggtctacggcttcgcccggagcctcctcaaggccttgaaggaggacgggcaggcggtggtcgtggtctttgacgccaaggccccctccttccgccacgaggcctacgaggcctacaaggcgggccgggcccccaccccggaggacttcccccgccagctcgccttggtcaagcggctggtggaccttctgggcctggtccgcctcgaggccccgggttacgaggcggacgacgtcctgggcaccctggccaagaaggccgaaagggaggggatggaggtgcgcatcctcacgggagaccgggacttcttccagctcctctccgagaaggtctcggtcctcctgccggacgggaccctggtcaccccaaaggacgtccaggagaagtacggggtgccgccggagcgctgggtggacttccgcgccctcacgggggaccgctcggacaacatccccggggtggcggggataggggagaagaccgcccttcgactcctcgcggagtgggggagcgtggagaacctcctgaagaacctggaccgggtgaagccggactcggtccggcgcaagatagaggcgcaccttgaggacctccgcctctccttggacctggcccgcatccgcaccgacctccccttggaggtggactttaaggccctgcgccgcaggacccccgacctggagggcctgagggcctttttggaggagctggagttcggaagcctccttcatgagttcggcctcctgggaggggagaagccccgggaggaggccccctggcccccgcccgaaggggccttcgtaggcttcctcctctcccgcaaggagcccatgtgggcggagcttctggccctggcggccgccgcagagggccgggtccaccgggcaacaagcccggttgaggccctggccgacctcaaggaggcccgggggttcctggccaaggacctggccgttttggccctgcgggagggggtggccctggaccccacggacgaccccctcctggtggcctacctcctggacccggccaacaccaaccccgagggggtggcccggcgctacgggggcgagttcacggaggacgcagcggagagggccctcctctccgagaggctcttccagaacctctttccccggctttccgagaagctcctctggctctaccaggaggtggagcggcccctctcccgggtcttggcccacatggaggcccggggggtgaggctggacgtcccccttctggaggccctctcctttgagctggagaaggagatggagcgcctggagggggaggtcttccgcttggccggccaccccttcaacctcaactcccgcgaccagctggaaagggtcctctttgacgagctgggccttaccccggtgggtcggacggagaagacgggcaagcgctccaccgcccagggggccctggaggccctccggggggcccaccccatcgtggagctcatcctccagtaccgggagctttccaagctcaaaagcacctacctggaccccctgccccggctcgtccacccgcggacgggccggcttcacacccgcttcaaccagacggccacggccacgggaaggctttccagctccgaccccaacctgcagaacatccccgtgcgcacccccttggggcagcgcatccgcaaggccttcgtggccgaggaggggtggctccttttggcggcggactactcccagatcgagcttcgggtcctggcccacctctcgggggacgagaacctgaagcgggtcttccgggaggggaaggacatccataccgaaaccgccgcctggatgttcggcttagaccccgctctagtggatccaaagatgcgccgggcggccaagacggtcaacttcggcgtcctctacgggatgtccgcccacaggctctcccaggagctcggcatagactacaaggaggcggaggcctttattgagcgctacttccagagcttccccaaggtgcgggcctggatagaaaggaccctggaggagggccggacgcggggctacgtggagaccctgttcggcaggaggcgctatgtgcccgacctggcctcccgggtccgctcggtgcgggaggcggcggagcggatggccttcaacatgcccgtgcagggcaccgccgccgacctgatgaagatcgccatggtcaagctcttccccaggctaaagcccctgggggcccacctcctcctccaggtgcacgacgagctggtcctggaggtgcccgaggaccgggccgaggaggccaaggccctggtcaaggaggtcatggagaacacctaccccttggacgtgcccctcgaggtggaggtgggcgtgggtcgggactggctggaggcgaagggggattgaagcggtcgac

SEQ ID NO: 10 - DNA, 2673 bp, Artificial Sequence
  Description of Artificial Sequence: Synthetic Dictyoglomus thermophilum DNA Polymerase sequence from pET26B vec tor, clone #23
atgaaatacctgctgccgaccgctgctgctggtctgctgctcctcgctgcccagccggcgatggccatggatatcggaattaattcggatccgaaatctctgtgggatctttttcaagaaaataccgagaaagagtccaaaaggaagattctgattattgatggctcaagcctcatatacagggtttattacgcccttccccctttaaagacaaaaaatggtgaattaactaatgctctttatggcttcataagaatacttttaaaggccgtagaagattttaatcctgatcttgtaggcgttgcctttgatagacctgaacctacttttaggcatgtgatttataaagagtataaggctaagagaccacctatgaaggatgatttgaaagcgcagataccatggataagagaatttctaaggttaaatgatatacctctattggaagagcctggctatgaagcggatgatataatagctactatagtgaataaatataaggatgatttaaaatatattctctctggagatttagatcttttgcaattagtctcggacaaaacctttctaatacatcctcaaaagggaattactgagtttactatttatgatccaaaagctgtaaaggataggtttggagtagagccctataagattcccttatacaaagtattagtaggggacgaatctgataatattccaggagtaaatggaataggtcctaaaaaggcctcaaagattcttgagaaaatttcaagtgtagatgaatttaaaagtaaaataaaagttttggatagtgatttaagggagcttattgagaaaaattggaatattattgaaagaaatttagaacttgttactttaaaaaatatagataaggatcttattcttaaacccttcgagattaaaagagatgaaaaagtaatagattttttgaagagatatgaacttaagagtattcttcaaaagttatttcctgatcttcaagaggaagaaaatatagagattaaagatgtcgaagagatcaattttaatgaggtagaaaaagaaggctactttgcctttaaatgtcttggagatagggcttttgagggtatttctctttccttcaaggagggggaaggatattttatatctccttttgatttcaataatgagataagaaagaagattgaaaatataatttcttcagagaatgttaaaaaaattggctcttatattcaaagagatttacattttttaaactgtaaaataaagggcgatgtatttgatgttagtctcgcatcttatcttttgaaccctgaaagacaaaatcactctcttgatattttgataggagagtatctaaataaaacctcttttattcctcaaaaatacgctggttatctttttccgttaaagtctattcttgaggagaggataaagaatgaagggttagaatttgtactttataacatagagattccattaatccctgtactttactccatggagaagtgggggataaaggtagataaggaatatttaaaacagctttctgatgaattctgcgagagaattaaaaaattggaagaagagatatatgaacttgcaggaaccagatttaatctcaattctccaaaacaactttctgaagttttatttgagaggttaaaacttccttctggtaagaaaggaaaaacaggatattctacgtcgtcttctgtgcttcaaaacttaataaatgctcatcctatagtgagaaaaatcctccaatatagagaactctataaattgaagagtacttatgtggatgctattcctaatctggttaatccacaaacaggtagagttcatacaaaatttaatcctacaggtacagctacaggaagaataagtagtagtgaacctaatcttcagaatattcctataaaaagtgaagaaggtagaaagataagaagagccttcgtgtcagaagatggatattttcttgtatctcttgattattctcagatagagctaaggattatggctcatctttctcaggagcctaaattaatatctgccttccaaaaaggagaggatattcatagaagaacagcatcggagatttttggagtgccagaggaagaagttgatgatcttttaaggtcaagggcaaaggccgttaattttggaattatttatggtatctcttcttttggactttctgagactgtaagtattacaccagaagaggcagagaaatttatagactcgtattttaagcactatccaagagtgaagctttttatagataagactattcatgaggcaagagaaaaactgtacgttaaaaccttatttggcagaaaaagatatattcctgagattaagagcataaataaacaggtaaggaatgcctatgaaaggatagcaataaatgcgccaattcagggaacagctgctgatattataaaacttgccatgatagaaatttacaaggagattgaaaataaaaatctcaagtcaagaatactccttcaaattcatgatgagcttattcttgaagtgccagaggaggagatggaatttactcctttaatggcaaaggaaaaaatggaaaaggtggtagaactttcggttcctcttgtagttgaaatctcggtaggtaaaaatcttgctgaattaaaatgagctataagattggtcgac

SEQ ID NO: 11 - DNA, 2623 bp, Artificial Sequence
  Description of Artificial Sequence: Synthetic Caldicellulosiruptor saccharalyticus DNA polymerase
atgaaatacctgctgccgaccgctgctgctggtctgctgctcctcgctgcccagccggcgatggccatggaattggtcatttttgatgggaatagtattctttatagggccttttttgccttaccagaattgacaacgtccagtaatattcctacaaacgctatatatggttttttaaatgtacttttaaaatacttagattcagaaaggccagattatgtagcagtagcgtttgacaaaagaggcagagctgctcgaaaaagtgaatatgaagagtacaaagccaatcgaaagccaatgccagattctctacaaatacagataccttatgtgagagaaataattagcgctcttaacattcctatattggaatatgaaggatatgaagctgatgacgttataggcacacttgtaaatagactcaaaaaccagaatttagagattgtgataataactggagacagagatacccttcagctacttgataaaaatgtaattgtcaagatagtcacaacgaggtttgacaagacaactgaagatttgtatactgttgaaaatgtaaaagaaaaatatggtgtctttgcgcatcaagttgttgactacaaagctttagtgggcgatgcatcagacaacatccctggtgttaagggaattgggggcaaaacggctataaagcttttagaagaataccagaccttagagaatatataccaaaatctaaaaaacatcaaagactctctacgagaaaagttagaagcaggtaaagatatggcgtttttgtcaaaaaagttggcaactattatatgcgatttaccaattgaagtaactcttgaagagttaaaaagaagagaatgggataagaaaaaactgtatcaaattttacttcagcttgagtttaaaagtttcataaaaagacttggtttttcagaggagattgaggagataaaacaagccgttcagcttccaaaatttaatatgaaaaaactatgtgatatctctgagataaagggcaaagaaatttatttgttatgctcaggtgatgaaggacttttttacatctatgatcaactcagttccgctgtctttacaacagctgacaaaggaattgttgaaaagctactaaaggaccaaggtattcaaaaggttgtgtatgatttaaaaaatatactccatagagtagattttggtgatacttaccagctaaaaaattgtaatgatgtcatgttagcttcatatgttttagacagtacacgtagttcatacgacttagaaacattatttatttcttatctcaacactgatatagctataataaaagagaatagatgggctggtgctacaattttattaagaaatctttgggacgagctttcgaagctcattgatttgaactcatgccaatacgtctatgaaaatatagaaattcctcttgttcctattttatatgagatggaaaaaatcggttttaaagttaacaaaaacaccttgcaggagtatacaaaagagattgagagcaagcttttaaagttagaaacacagatttatcagatagcaggtgagtggtttaacataaactcacctaaacaactctcatatgtgttgttcgaaaaactaaaacttccagttgtaaaaaagactaaaacaggatattcaacagatgccgaggtgttagaagagctatatgacaaacatgagatagtacctcttatcttggattatagaatgtatacgaaaatactgacaacttactgtcaaggccttatgcaagcaataaattctgtaactggaagagtacattctaattttattcaaacaggtacagcaactggaagacttgcaagtgcagagtctaatttacaaaatatccctgtaaaatatgatgagggaaggttaataagaaaagcatttattccagaggaaggctacgtcctgatagatgctgactattctcagattgaacttaggatacttgctcatatttctgaagatgaaagactaataaatgcttttaagaataaccttgacattcattcacagacagcagcagagatttttggtgtagatgtaagccaagttaccccaactatgcgaagtcaagcaaaggctgttaactttggaatcatatatggaatttctgactatgggctttcaaaggatataaagatatcaagaaaagaagcagccgagtttattaatcgctattttgaaaagtatccaaaggtaaaagagtatttagataatgttgttaaatttgcacgtgaaaacgggtttgttttaacactatttaacagaaaaaggtatattaaggatataaaatctactaataaaaaccttagaaactacgcagaaagaatagcaatgaattcacctatccagggcagtgcagcagacatcatgaagatagcaatgataagggtttatagaaggttaaaggaggagaatttaaaatcaagaattattttacaagttcacgatgagcttttgattgaatcaccatatgaagaaaaagaaatagtaaaagaaatagtgaaaactgagatggaaaatgctgtctcattaaaagttcctttggtagttgaagtgaaagaaggtttaaattggtatgaaacaaagtaaaggatcc

SEQ ID NO: 12 - DNA, 2796 bp, Artificial Sequence
  Description of Artificial Sequence: Synthetic Spirochaete DNA polymerase
atgaaatacctgctgccgaccgctgctgctggtctgctgctcctcgctgcccagccggcgatggccatggatatcggaattaattcggatccgaattcaccgctcttcctcatagatgcctacggcctcatctatcgcgcctacttcgccctcatccgggcccccatgcggaccaaggacgggcgcaacacgtccgcgatctacggtttcttccgtatgcttttcaggttcgtgaaggagtacgatccggtctactgcggagtggtgctcgattccctcacgcccaccttcagggagaagaccttcgaggcctacaaggccaccaggcagaagacgccggaggatctccacccgcagatcccggtgatcgaggagatcctcgaggccttggggttcgccaccgtccggatgaacgggttcgaggcggacgacgtgatgggtacgctcgccgccatggcccaggcggaggggcgtccgtgtttcgtggtatcgggcgacaaggacctcgcccagctggtcacgaagggcgtaaaaatcgtccggatggacaaggacgatttcgtggtgctcgacgaggagggggtgaaggagaagtggggggtgcgggccgatcagatcgtggacttcctggccctggtgggggatgcatccgacaacatcccgggtgtggaggggatcggtgagaagacggcccagcgactcctcgccgagtatgggtcgctcgagggagtctatgcccacctcgacgagctctccccttcgctgaggagaaagctcgaggagggaagggagcgggccttcctgagcagggatctcgccacgatacggacggatctcgatctctccctcacgataggggatctcaggcgcagggaacccgaggtacagcgggcgagggagctcttcctggcctacgacatacggagcctggctcaggaggtgggggggagtccttccgtgggggagaagccgaccctcgaggtggagggtccctccagggcgggtgtctcctacgaggtggtcaccgaccgggcctccctctcccgatgggtggaggaggccctggagaggggggcggtggccgtggacaccgagaccgatgggctcgaccccctcacgtgccgtctcgtgggtgtctcgttcgcggtggacgaggggcgggcgtgctacgtgccgctcgcggccccggatgtgcggccgcttcccgccgacgtggtacgcgaggtcctctcaccgctcctcgtgtccaccgaggtggtgaaggtcgggcagaatctgaagttcgattaccacgtgctcaggcggtggggcgtccgtccggaggggccgttcttcgacaccatggtggcggcatggctgttggagtcggatgccgggcgctacaacctcgacaggctcgcggagaagtatctggggtggcgcaccatccattacaaggacgtggtggagaagggggcctcgttcgagacggtgccggtggcggaggcaggggtgtacgcggccgaggatgcggacatcgccttgcggctctcccgggtcttgaaggagcgtctcgaggccgaggggctcgggcgggtcttctacgagatggagatgccgctcctctccatcctcgctcggatggaggagtgggggatcgggctcgacggggaggccctgtcggccttcggcagggagctcgaggaacgcatctctaccatagagaaggagatattcgagctcgtcgggcacgagttcaacgtgggttccaccaagcagctccaggaggtgttgttcgtggagcgggggctgccgccggtgaagaagaccaagaccggtttttccacggacacgagcgtgttggaggagctggccgctcgggatccggtggcggcgaaggtgctggagtaccgaagtctcaccaagttgaagaacacctatgtggacgtgcttcccgggctcgtgaacccggggacgggtcggcttcacacgtggttcagccaggtggggacggccacgggtcggctctcgagcaaggatcccaacctccagaacatcccgatcaagaccgaggagggccgccggatcagggaggcgttcgtgccgcagcggggctggtggttcctgagcgcggactactcccagatcgagctggtgatcctggcccatctttcggaggatccggctctctgcagggccttcagggagggcgaggacgtacaccgggctacggggagtctcctcttcggggtaccgcccgaggcggtgacgcccgagcagcggaggatcgccaagacgatcaactttggcgtgatctacgggatgtcggccttccggctctcgagggagctcggtatcccgcgtaaggaggccgaacggttcatcgatgcgtacttcaccacgtatgcgggggtgagggcgttcatcgaacggacgatcgccgaggcggaggagaaggggtacgtgaccaccctcttcgggaggaagcggccgcttccctacatcacgagccggaacaagacgcagaagacaggagcggagcggatcgcggtgaacacgccgatccaggggtcgggagcggatatcatcaagctggcgatgatcgatctggacgcccagatgcgcaggatggggctcgcctcccggatgatcctccaggtgcacgacgagctcatcttcgaggtgcctcccgaggagcttgaggtgatgaagcggctggtgagggagcggatggagggggtggtgcggctctcggtgccgctccgggtggagatgggtgtggggaggaactggggagaggcccactagggggtcgac

SEQ ID NO: 13 - DNA, 2890 bp, Artificial Sequence
  Description of Artificial Sequence: Synthetic Tepidomonas DNA polymerase
atgaaatacctgctgccgaccgctgctgctggtctgctgctcctcgctgcccagccggcgatggccatggatatcggaattaattcggatccgaattccatgcacaatagcgccatgaccgatcgcaatcccgatgcgccgctgctggtgctggttgacggctccagctacctataccgggcctaccacgccatgcccgacctgcgggctgtgccctctgacccgcaaagcgcccccaccggcgccattcgcggcatgatcaacatgctgcaggccctgctgaaggagtacccgaccgagcacatggcggtcgttttcgatgccgccggcgcgacgttccgggaagccctgtacccacagtacaaggcgcaccgcgctcccatgccggacgacctgcgcgtgcagatcgagccgatcgacgaggtgatccggctgctgggcctgccggtgctgcgcgtacccgatgtcgaagccgacgatgtcatcgggacgctggccaaaaccgccgctgcacaagggtggcgggtcgtgatttccagtggtgacaaggacctgagccagctcgtcgatgagcgcatcaccatcatcgacaccatgagcggcaaggtccgcgacatcgcgggtgtacaggccgagtttggcgtgccaccggcgctgatggttgattaccagaccctggtgggcgacgcggtggacaacgtgccgggtgtggacaaggtcggcccgaaaaccgcggccaagtggctgcaagcctacggttccctgcaagccatcgtcgagcacgcgcacgagatcaagggagtggcgggcgagaatctgcgccgcgcgctcgactggctgccgctggcgcgccagttgctgaccatccggaccgactgcgacctcgatggtcacgtgccaggcctgccggcgctggacgcgctgcgccggcgtgcgcccgacgtaccagcgctgcgcgacttttaccagcgctacggttttcgtggcctgctgcgcgcgctcgacgacggttcatctgagacggcacccaccgcggcgtccggccagggcgagctgctcgccgatgcgccggcgcagccccccttgcgctacgagaccgtgcgcgactggcataccctcgacggctggctgcagcgcttgcgctcggcgccgctcgtggcgctggacacggaaaccacgtccctggacgaaatggccgcgcggctggtcgggatttccttcagcgtcgcgcccggcgaggctgcctacctgccgctggcgcacgaggacccgggcaccgccggccagctgcccctggacgaggtgctggcgcgcctgcgcccctggctggaagaccccgcggcggccaagtgcgggcagcacatcaaatacgaccagcacgtgctggccaaccatggcatcctggtgcagggctacgtgcacgacaccatgctgcaaagctatgtgctggaggtgcaccgcccgcacaatctggaaagcctggccgagcgccacctcggccgcagcgccatgcgctacgaggacctgtgcggcaagggagctgcgcaaatcccctttgcccgtgtgcccatcgaacgggctgccccctacgcctgcgaggacgccgagcaatgcctggcggtgcaccaggtgctgtggccgcaactgcaggcgcagccggcgctgcagcgcatctacgagctggaagtggcggtcagcggggtgctctggcgcatggagcgccacggcgtgctgatcgacgccgccgagctgcagcggcaaagccaggcactgggcgagcgcatccgcgcgctcgaggccgaggcgcacgcgctggcgggcatgcccttcaacctcggctcgcccaaacaaatcgctgaagtcttctacgaccgcctgaaattgccggtgctcaaaaaaaccgccaccggcgcccccagcaccgacgaagaggtactggaaaaactcgccgaggattaccccttgccggcacgcgtgctggagcaccgcagccttgtcaagctcaagagcacctacaccgacaaattgcccacgatgatcaaccccgccaccggccgcgtgcacacgcattttgcccaggcggtggcggtgacggggcgtctggccagtgccgagcccaacctgcagaatatccccatccgcacgcccgaggggcgtcgcatccgtgccgccttcatcgcgccccctggccatgtgattgccagcgccgactactcgcaaatcgagctgcgcatcatggcccacctcagccaggatccggcgctgctgcgtgcctttgagcagggcctggacgtgcaccgcgccaccgcggccgaggtgtttggcgtgtcgcccgagcacgtgacgccggagcagcgccgctacgccaaaaccatcaatttcgggctgatttacgggatgagcccgtacgggctggccaaggccctgggcattgacgccagtgcagccaaaagctacattgagcgctactttgagcgctttgcgggggtgcgtgcctacatggagcagacgcgggcgcaggccagggcgcgcggctacgtggagaccgtgttcgggcgtcggctggtgctgccggaaatccagtcgcccaatgggccccgccgcgcggcggccgagcgcgcggccatcaacgcgcccatgcagggtaccgccgccgacctgatcaagatgagcatggtggccgtgcagcgcgcgctggacgagcagcagcgccgcacccgcatggtgctgcaggtgcacgacgaactggtgttcgaagtgcccaacgaggaagtcgattgggtgcgcaccgaggtgccgcgcctgatggcggccgtggcgacgctgcgcgtgcccctggtggccagtgtcggcgttggtgctaattgggaacaggcccactgaggtcgac

SEQ ID NO: 14 - protein, 920 aa, Artificial Sequence
  Description of Artificial Sequence: Synthetic Clostridium stercorarium DNA Polymerase sequence from pET26B vect or, clone #7 polypeptide
MKYLLPTAAAGLLLLAAQPAMAMDPKIILIDGNSILNRGFYALSGRSMLTTSTGLYTNAVFAFVNILNKYIEEENPDYIAVAFDLRAKTFRHGLYEGYKAQRKGMPDELAMQIPLAKEVLRAMNIAIIEHEGYEADDIIGSLSLKAEKENFDVIILTGDRDSFQLISDRVKVILPSTKAGKTETNVYDKQAIIDKYGVLPHQLIDVKGLMGDSSDNIPGVPGVGEKTALSLISAYGTLEGVYEHIDEIKQPKLKASLIEYKDQAFLSRKLGTIVRNLELCASLEDLKRKEINRKELLNVFRKLEFESIISKMNLASAEVTELPPAPEELKITHISAAEDLKKWIAYLLNQKNISVLQLIDREDSYSSRLSGLALCTGDEVFYIETGTALPENLIATELKELWQNENIHKIGHNIKEFITWLLKHDVELNGLYFDTMIAEYLIDSIRNGYPIASLSHKYLNRSVPSLDELLGKGKGAKKYSEIPPERLKDYSAYNVKAIFDIWPMQKKVLQENRQEELFNDIELPLITVLASMEYHGFKVDAAKLHEYGEVLLSRIKDLEKVIYMLAGEEFNINSTKQLGTILFEKLKLPVVKSTKTGYSTDVEVLEELYYKHDIIPCIIEYRQLTKLYTTYAEGLEKVINPVTGKIHSSFNQTVTATGRISSTEPNLQNIPVRHEMGREIRKAFIPSSENAVFVDADYSQIELRVLAHITGDEALINAFVKGEDIHTATASLVFDVAPEDVTPELRRKAKAVNFGIVYGISDYGLARDLGITRKEAKRYIDDYFAKYPKVKTYVDEIVRVGQEQGYVETLFHRRRYLPELASKNFHQRSFGKRVAMNTPIQGTAADIIKIAMVKVYKALKESGLKSRLILQVHDELVIETFEDELETVKELVKKCMEEAVELSVPLVVDVSIGKNWYEAS

SEQ ID NO: 15 - protein, 889 aa, Artificial Sequence
  Description of Artificial Sequence: Synthetic Clostridium thermosulfurogenes DNA Polymerase sequence from pET26 B vector, clone #2 polypeptide
MKYLLPTAAAGLLLLAAQPAMAMAKFLIIDGNSLMYRAYFALPDLMNSEGMHTNAIYGFSMMLLKLLEEEKPDYIAIAFDKKASTFRHKEYSAYKGTRQSMPEELIEQVDILKDVINAFNIKTIEIEGFEADDIIGTVSKIASESGMDVLIVTGDRDALQLVSANVKVKICKKGITQMDEYDEKAVFEKYEVTPLQFIDLKGLMGDKSDNIPGVPNIGEKTAIKLVKEFGSIENLLMNTDKLKGKIKENVENNAELAVLSKRLATIERNVPIDIDLNEYAVKNYDVNKLTELFEKLEFSSLISDLKDDSRDTKDIKEWPVRDFTYVKNVLGKFDVLSLYPFIYDGKIKAVSFACGDGSFFVEIDDYDNFKLLNNDKLTLIGHDLKDFLVNISYCGIELNCKILDTAIMTYLLNPSESNYDISRVLKKYLKEDLQNIDDIVGKGRNKKSYDDIDKKLLVDYMCSAASNLSKLKDKLMSFIKEMEMEDLLKNVEIPLIEVLKSMEVYGFTLDKDVLRSISKEIDEKTDKIVKDIYDAAGYEFNINSTKQLSEFLFDKLNLPAIKKTKTGYSTDMEVLAELIPYNDIVGEIIEYRQLMKLKSTYIDGFIPIMDENNRVHSTFKQTVAATGRISSTEPNLQNIPVREEFGRRIRKAFVSSYEDGLIISADYSQIELRVLAHLSEDEKLIESFLNNEDIHLRTASEVFKVSKEEVTSEMRRRAKAVNFGIVYGISDYGLSKDLKISRKEAKEYIDNYFDRYKGVKNYIDSIVKFAKENGYVTTILNRRRYIPEINSKNFNQRSFGERMAMNTPIQGSAADIIKMSMVKVYNELKERGLKSRLILQVHDELIIDTHPDEVEIVKELLKSIMENIIKLKVPLVVDIGQGKNWYDAK

SEQ ID NO: 16 - protein, 925 aa, Artificial Sequence
  Description of Artificial Sequence: Synthetic Caldibacillus cellulovorans CompA.2 DNA Polymerase sequence from pET26B vector, clone #1/#1 polypeptide
MKYLLPTAAAGLLLLAAQPAMAMGKLILVDGNSVANRAFYAVRLLSTRGGLHTNAVYGFANMLLKLIEEERPTHFLVAFDAGKATFRHREYEAYKAGRLQTPPELSEQFPYIRELVRAFGVASGELEEYEADDMIGTLAKRAEAEGVDTLVVTGDRDLLQLVSDRVTVALTRKGITETERYDPARIREEYGFDPDRIRDLKGLMGDASDNLPGVPGVGEKTALKLLRQYGSLESVLEHASEIAGKLGENLRAHADAARLSKRLATIDCAVPLQSGWDWLRLGEPDRAALASLLRQLEFKSLLKRLGLDGTSADADVDGVRSSARPADEKRPRAVAVAEEGVDVRCPDRPEEVEEALSRLEAAQSVVVEVTGDNPHDGEVRGVAWWDGHTAYFIPFERLVQSDMRPLADWLADARRPKRTHDSHRAEVALFWHGLAFRGTSFCTHIAAYLLDPTESRHTLADLSRRYGLPPVPEAEDVYGKGAKFKVPDRDTLARYVGRKAALVARLVPLLEADLAACGMRSLFYDLELPLSSELAVMETVGVRVDAAALAAYGEELREAAAKVEREIYELAGTTFNIGSTKQLGEILFDKLGLPVVKKTKTGYSTDADVLEELAPYHPIVEKILHYRQLTKLQSTYIEGLLKEIRPQTGKIHTYYQQTIAATGRLSSQFPNLQNIPIRLEEGRKIRKAFVPSEPGWLMLAADYSQIELRVLAHVSGDERLKEAFRTGMDIHTKTAMDVFGVSEDRVDARMRRQAKAVNFGIIYGISDFGLAQNLNISRKEAAEFIRQYFAVFSGVKAYRERIVEQARRDGYVTTLLGRRRYLPDINASNYNLRSFAERTAMNTPIQGTAADIIKTAMVRLTRRMRDVGLKSRMLLQVHDELVFEVPPDELDAMRELVTDVMESAVPLDVPLKVDVSWGADWYAAK

SEQ ID NO: 17 - protein, 871 aa, Artificial Sequence
  Description of Artificial Sequence: Synthetic Caldicellulosiruptor TOK13B DNA polymerase polypeptide
MKYLLPTAAAGLLLLAAQPAMAMEFVIFDGNSILYRAFFALPQLTTSTGIPTNAIYGFLNVLLKYLDSEKPDYVAVAFDKKGRAVRKSEYEEYKANRKPMPDSLQVQIPYVREILAALNIPVLKCEGYEADDVIGTLVNRFKAQDLEIVIITGDRDTLQLLDKNVIVKIVTTRFDRTTEDLYAVENVKEKYGVFAHQVVDYKALVGDASDNIPGVKGIGDKTAIKLLEEYQTLENIYQNLNNIKGALKEKLESGKDMAFLSKRLATIICDLPIEVNLEELKTKEWDKERLYQILLQLEFKSFIKRLGFSEEINYARQNFQLPEFSIKELRDVSAIGGKEIYLLYSDEEGLFYIYDHQTSTIFTTSDKEAIKDLLTLQSIQKVVYDLKNILHKVDFDEANQIKNCNDVMLASYVLDSTRSSYDLETLFISYLNTDIAAIKENRWAGATVLLRNLWDELSKLIDLNSAQYVYESIEMPLVPILYEMEKIGFKVDKNTLQEYTKEIESKLLKLESQIYQIAGEWFNINSPKQLSYILFEKLKLPVVKKTKTGYSTDAEVLEELYDKHDIIPLILDYRMYTKILTTYCQGLVQAINPATGRIHTNFIQTGTATGRLASAEPNLQNIPVKYDEGKLIRKAFVPDEGYVLIDADYSQIELRILAHISEDERLINAFKNNLDIHSQTAAEIFGVDISQVTPIMRSQAKAVNFGIVYGISDYGLSRDIKISRKEAAEFINRYFEKYPRVKEYLDNVVKFARENGFVLTIFNRKRYIKDIKSTNKNLRNYAERIAMNSPIQGSAADIMKIAMIRVYKKLKENNLKSRIILQVHDELLIESPYEEKEIVKEIVKSEMENAVLLKVPLVVEVKEGSNWYETK

SEQ ID NO: 18 - protein, 871 aa, Artificial Sequence
  Description of Artificial Sequence: Synthetic Caldicellulosiruptor Tok7B.1 DNA Polymerase sequence from pET26B vector, clone #1 polypeptide
MKYLLPTAAAGLLLLAAQPAMAMEFVIFDGNSILYRAFFALPQLTTSTGIPTNAIYGFLNVLLKYLDSEKPDYVTVAFDKKGRAVRKSEYEEYKANRKPMPDSLQVQIPYVREILAALNIPVLECEGYEADDVIGTLVNRFKALDLEIVIITGDRDTLQLLDKNVIVKIVTTRFDRTTEDLYTVENVKEKYGVFAHQVVDYKALVGDASDNIPGVKGIGDKTAIKLLEEYQTLENIYQNLNNIKGALKEKLESGKDMAFLSKRLATIICDLPIEVNLEELKTKEWDKERLYQILLQLEFKSFIKRLGFSEEINYARQNFQLPEFSIKELRNVSAIGGKEIYLLYSDEEGLFYIYDHQTSTIFTTSDKKAIKDLLTLQSIQKVVYDLKNILHKVDFDEANQIKNCNDVMLASYVLDSTRSSYDLETLFISYLNTDIAAIKENRWAGATVLLRNLWDELSKLIDLNSAQYVYESIEMPLVPILYEMEKIGFKVDKNTLQEYTKEIESKLLKLESQIYQIAGEWFNINSPKQLSYILFEKLKLPVVKKTKTGYSTDAEVLEELYDKHDIIPLILDYRMYTKILTTYCQGLVQAINPATGRIHTNFIQTGTATGRLASAEPNLQNIPVKYDEGKLIRKAFVPDEGYVLIDADYSQIELRILAHISEDERLINAFKNNLDIHSQTAAEIFGVDISQVTPIMRSQAKAVNFGIVYGISDYGLSRDIKISRKEAAEFINRYFEKYPRVKEYLDNVVRFARENGFVLTIFNRKRYIKDIKSTNKNLRNYAERIAMNSPIQGSAADIMKIAMIRVYKKLKENNLKSRIILQVHDELLIESPYEEKEIVKEIVKSEMENAVLLKVPLVVEVKEGSNWYETK

SEQ ID NO: 19 - protein, 871 aa, Artificial Sequence
  Description of Artificial Sequence: Synthetic Caldicellulosiruptor Rt69B.3 DNA Polymerase sequence from pET26B vector, clone #1 polypeptide
MKYLLPTAAAGLLLLAAQPAMAMEFVIFDGNSILYRAFFALPQLTTSTGIPTNAIYGFLNVLLKYLDSEKPDYVAVAFDKKGRAVRKSEYEEYKANRKPMPDSLQVQIPYVREILAAMNIPVLECEGYEADDVIGTLVNRFKARDLEIVIITGDRDTLQLLDKNVIVKIVTTRFDRTTEDLYTVENVKEKYGVFAHQVVDYKALVGDASDNIPGVKGIGDKTAIKLLEEYQTLENIYQNLNNIKGALKEKLESGKDMAFLSKRLATIICDLPIEVNLEELKTKEWDKERLYQILLQLEFKSFIKRLGFSEEINYARQNFQLPEFSIKELRDVSEIEGKEIYLLYSDEEGLFCIYDHQTSTIFTTPDKEAIKHLLTLQSIQKVVYDLKNILHKVDFDETNQIKNCDDVMLASYVLDSTRSSYDLETLFISYLNTDIAAIKENRWAGATVLLRNLWDELSKLIDLNSAQYVYESIEMPLVPILYEMEKIGFKVDKNTLQEYTKEIESKLLKLESQIYQIAGEWFNINSPKQLSYILFEKLKLPVVKKTKTGYSTDAEVLEELYDKHDIIPLILDYRMYTKILTTYCQGLVQAINPVTGRIHTNFIQTGTATGRLASAEPNLQNIPVKYDEGKLIRKAFVPDEGYMLIDADYSQIELRILAHISEDERLINAFKNNLDIHSQTAAEIFGVDISQVTPIMRSQAKAVNFGIVYGISDYGLSRDIKISRKEAAEFINRYFEKYPKVKEYLDNVVKFARENGFVLTIFNRKRYIKDIKSTNKNLRNYAERIAMNSPIQGSAADIMKIAMIRVYKKLKENNLKSRIILQVHDELLIESPYEEKEIVKEIVKSEMENAVLLKVPLVVEVKEGSNWYETK

SEQ ID NO: 20 - protein, 900 aa, Artificial Sequence
  Description of Artificial Sequence: Synthetic Bacillus caldolyticus EA1 DNA polymerase polypeptide
MKYLLPTAAAGLLLLAAQPAMAMGLKKKLVLIDGSSVAYRAFFALPLLHNDKGIHTNAVYGFTMMLNKILAEEEPTHMLVAFDAGKTTFRHEAFQEYKGGRQQTPPELSEQFPLLRELLRAYRIPAYELENYEADDIIGTLAARAEQEGFEVKVISGDRDLTQLASPHVTVDITKKGITDIEPYTPEAVREKYGLTPEQIVDLKGLMGDKSDNIPGVPGIGEKTAVKLLKQFGTVENVLASIDEIKGEKLKETLRQHREMALLSKKLAAIRRDAPVELSLDDIVYQGEDREKVVALFKELGFQSFLEKMESPSSEEEKPLAKMAFTLADRVTEEMLADKAALVVEVVEENYHDAPIVGIAVVNEHGRFFLRPETALADPQFVAWLGDETKKKSMFDSKRAAVALKWKGIELCGVSFDLLLAAYLLDPAQGVDDVAAAAKMKQYEAVRSDEAVYGKGAKRAVPDEPVLAEHLVRKAAAIWALERPFLDELRRNEQDRLLVELEQPLSSILAEMEFAGVKVDTKRLEQMGEELAEQLRTVEQRIYELAGQEFNINSPKQLGVILFEKLQLPVLKKTKTGYSTSADVLEKLAPYHEIVENILHYRQLGKLQSTYIEGLLKVVRPDTKKVHTIFNQALTQTGRLSSTEPNLQNIPIRLEEGRKIRQAFVPSESDWLIFAADYSQIELRVLAHIAEDDNLMEAFRRDLDIHTKTAMDIFQVSEDEVTPNMRRQAKAVNFGIVYGISDYGLAQNLNISRKEAAEFIERYFESFPGVKRYMENIVQEAKQKGYVTTLLHRRRYLPDITSRNFNVRSFAERMAMNTPIQGSAADIIKKAMIDLNARLKEERLQARLLLQVHDELILEAPKEEMERLCRLVPEVMEQAVTLRVPLKVDYHYGSTWYDAK

SEQ ID NO: 21 - protein, 864 aa, Artificial Sequence
  Description of Artificial Sequence: Synthetic Thermus Rt41A DNA Polymerase sequence from pET26B vector, clone # 3/#1 polypeptide
MKYLLPTAAAGLLLLAAQPAMAMDIGINSDPNSPLFDLEEPPKRVLLVDGHHLAYRTFYALSLTTSRGEPVQMVYGFARSLLKALKEDGQAVVVVFDAKAPSFRHEAYEAYKAGRAPTPEDFPRQLALVKRLVDLLGLVRLEAPGYEADDVLGTLAKKAEREGMEVRILTGDRDFFQLLSEKVSVLLPDGTLVTPKDVQEKYGVPPERWVDFRALTGDRSDNIPGVAGIGEKTALRLLAEWGSVENLLKNLDRVKPDSVRRKIEAHLEDLRLSLDLARIRTDLPLEVDFKALRRRTPDLEGLRAFLEELEFGSLLHEFGLLGGEKPREEAPWPPPEGAFVGFLLSRKEPMWAELLALAAAAEGRVHRATSPVEALADLKEARGFLAKDLAVLALREGVALDPTDDPLLVAYLLDPANTNPEGVARRYGGEFTEDAAERALLSERLFQNLFPRLSEKLLWLYQEVERPLSRVLAHMEARGVRLDVPLLEALSFELEKEMERLEGEVFRLAGHPFNLNSRDQLERVLFDELGLTPVGRTEKTGKRSTAQGALEALRGAHPIVELILQYRELSKLKSTYLDPLPRLVHPRTGRLHTRFNQTATATGRLSSSDPNLQNIPVRTPLGQRIRKAFVAEEGWLLLAADYSQIELRVLAHLSGDENLKRVFREGKDIHTETAAWMFGLDPALVDPKMRRAAKTVNFGVLYGMSAHRLSQELGIDYKEAEAFIERYFQSFPKVRAWIERTLEEGRTRGYVETLFGRRRYVPDLASRVRSVREAAERMAFNMPVQGTAADLMKIAMVKLFPRLKPLGAHLLLQVHDELVLEVPEDRAEEAKALVKEVMENTYPLDVPLEVEVGVGRDWLEAKGD

SEQ ID NO: 22 - protein, 884 aa, Artificial Sequence
  Description of Artificial Sequence: Synthetic Dictyoglomus thermophilum DNA Polymerase sequence from pET26B vec tor, clone #23 polypeptide
MKYLLPTAAAGLLLLAAQPAMAMDIGINSDPKSLWDLFQENTEKESKRKILIIDGSSLIYRVYYALPPLKTKNGELTNALYGFIRILLKAVEDFNPDLVGVAFDRPEPTFRHVIYKEYKAKRPPMKDDLKAQIPWIREFLRLNDIPLLEEPGYEADDIIATIVNKYKDDLKYILSGDLDLLQLVSDKTFLIHPQKGITEFTIYDPKAVKDRFGVEPYKIPLYKVLVGDESDNIPGVNGIGPKKASKILEKISSVDEFKSKIKVLDSDLRELIEKNWNIIERNLELVTLKNIDKDLILKPFEIKRDEKVIDFLKRYELKSILQKLFPDLQEEENIEIKDVEEINFNEVEKEGYFAFKCLGDRAFEGISLSFKEGEGYFISPFDFNNEIRKKIENIISSENVKKIGSYIQRDLHFLNCKIKGDVFDVSLASYLLNPERQNHSLDILIGEYLNKTSFIPQKYAGYLFPLKSILEERIKNEGLEFVLYNIEIPLIPVLYSMEKWGIKVDKEYLKQLSDEFCERIKKLEEEIYELAGTRFNLNSPKQLSEVLFERLKLPSGKKGKTGYSTSSSVLQNLINAHPIVRKILQYRELYKLKSTYVDAIPNLVNPQTGRVHTKFNPTGTATGRISSSEPNLQNIPIKSEEGRKIRRAFVSEDGYFLVSLDYSQIELRIMAHLSQEPKLISAFQKGEDIHRRTASEIFGVPEEEVDDLLRSRAKAVNFGIIYGISSFGLSETVSITPEEAEKFIDSYFKHYPRVKLFIDKTIHEAREKLYVKTLFGRKRYIPEIKSINKQVRNAYERIAINAPIQGTAADIIKLAMIEIYKEIENKNLKSRILLQIHDELILEVPEEEMEFTPLMAKEKMEKVVELSVPLVVEISVGKNLAELK

SEQ ID NO: 23 - protein, 870 aa, Artificial Sequence
  Description of Artificial Sequence: Synthetic Caldicellulosiruptor saccharalyticus DNA polymerase polypeptide
MKYLLPTAAAGLLLLAAQPAMAMELVIFDGNSILYRAFFALPELTTSSNIPTNAIYGFLNVLLKYLDSERPDYVAVAFDKRGRAARKSEYEEYKANRKPMPDSLQIQIPYVREIISALNIPILEYEGYEADDVIGTLVNRLKNQNLEIVIITGDRDTLQLLDKNVIVKIVTTRFDKTTEDLYTVENVKEKYGVFAHQVVDYKALVGDASDNIPGVKGIGGKTAIKLLEEYQTLENIYQNLKNIKDSLREKLEAGKDMAFLSKKLATIICDLPIEVTLEELKRREWDKKKLYQILLQLEFKSFIKRLGFSEEIEEIKQAVQLPKFNMKKLCDISEIKGKEIYLLCSGDEGLFYIYDQLSSAVFTTADKGIVEKLLKDQGIQKVVYDLKNILHRVDFGDTYQLKNCNDVMLASYVLDSTRSSYDLETLFISYLNTDIAIIKENRWAGATILLRNLWDELSKLIDLNSCQYVYENIEIPLVPILYEMEKIGFKVNKNTLQEYTKEIESKLLKLETQIYQIAGEWFNINSPKQLSYVLFEKLKLPVVKKTKTGYSTDAEVLEELYDKHEIVPLILDYRMYTKILTTYCQGLMQAINSVTGRVHSNFIQTGTATGRLASAESNLQNIPVKYDEGRLIRKAFIPEEGYVLIDADYSQIELRILAHISEDERLINAFKNNLDIHSQTAAEIFGVDVSQVTPTMRSQAKAVNFGIIYGISDYGLSKDIKISRKEAAEFINRYFEKYPKVKEYLDNVVKFARENGFVLTLFNRKRYIKDIKSTNKNLRNYAERIAMNSPIQGSAADIMKIAMIRVYRRLKEENLKSRIILQVHDELLIESPYEEKEIVKEIVKTEMENAVSLKVPLVVEVKEGLNWYET

SEQ ID NO: 24 - protein, 928 aa, Artificial Sequence
  Description of Artificial Sequence: Synthetic Spirochaete DNA polymerase polypeptide
MKYLLPTAAAGLLLLAAQPAMAMDIGINSDPMKPLFLIDAYGLIYRAYFALIRAPMRTKDGRNTSAIYGFFRMLFRFVKEYDPVYCGVVLDSLTPTFREKTFEAYKATRQKTPEDLHPQIPVIEEILEALGFATVRMNGFEADDVMGTLAAMAQAEGRPCFVVSGDKDLAQLVTKGVKIVRMDKDDFVVLDEEGVKEKWGVRADQIVDFLALVGDASDNIPGVEGIGEKTAQRLLAEYGSLEGVYAHLDELSPSLRRKLEEGRERAFLSRDLATIRTDLDLSLTIGDLRRREPEVQRARELFLAYDIRSLAQEVGGSPSVGEKPTLEVEGPSRAGVSYEVVTDRASLSRWVEEALERGAVAVDTETDGLDPLTCRLVGVSFAVDEGRACYVPLAAPDVRPLPADVVREVLSPLLVSTEVVKVGQNLKFDYHVLRRWGVRPEGPFFDTMVAAWLLESDAGRYNLDRLAEKYLGWRTIHYKDVVEKGASFETVPVAEAGVYAAEDADIALRLSRVLKERLEAEGLGRVFYEMEMPLLSILARMEEWGIGLDGEALSAFGRELEERISTIEKEIFELVGHEFNVGSTKQLQEVLFVERGLPPVKKTKTGFSTDTSVLEELAARDPVAAKVLEYRSLTKLKNTYVDVLPGLVNPGTGRLHTWFSQVGTATGRLSSKDPNLQNIPIKTEEGRRIREAFVPQRGWWFLSADYSQIELVILAHLSEDPALCRAFREGEDVHRATGSLLFGVPPEAVTPEQRRIAKTINFGVIYGMSAFRLSRELGIPRKEAERFIDAYFTTYAGVRAFIERTIAEAEEKGYVTTLFGRKRPLPYITSRNKTQKTGAERIAVNTPIQGSGADIIKLAMIDLDAQMRRMGLASRMILQVHDELIFEVPPEELEVMKRLVRERMEGVVRLSVPLRVEMGVGRNWGEAH

SEQ ID NO: 25 - protein, 960 aa, Artificial Sequence
  Description of Artificial Sequence: Synthetic Tepidomonas DNA polymerase polypeptide
MKYLLPTAAAGLLLLAAQPAMAMDIGINSDPNSMHNSAMTDRNPDAPLLVLVDGSSYLYRAYHAMPDLRAVPSDPQSAPTGAIRGMINMLQALLKEYPTEHMAVVFDAAGATFREALYPQYKAHRAPMPDDLRVQIEPIDEVIRLLGLPVLRVPDVEADDVIGTLAKTAAAQGWRVVISSGDKDLSQLVDERITIIDTMSGKVRDIAGVQAEFGVPPALMVDYQTLVGDAVDNVPGVDKVGPKTAAKWLQAYGSLQAIVEHAHEIKGVAGENLRRALDWLPLARQLLTIRTDCDLDGHVPGLPALDALRRRAPDVPALRDFYQRYGFRGLLRALDDGSSETAPTAASGQGELLADAPAQPPLRYETVRDWHTLDGWLQRLRSAPLVALDTETTSLDEMAARLVGISFSVAPGEAAYLPLAHEDPGTAGQLPLDEVLARLRPWLEDPAAAKCGQHIKYDQHVLANHGILVQGYVHDTMLQSYVLEVHRPHNLESLAERHLGRSAMRYEDLCGKGAAQIPFARVPIERAAPYACEDAEQCLAVHQVLWPQLQAQPALQRIYELEVAVSGVLWRMERHGVLIDAAELQRQSQALGERIRALEAEAHALAGMPFNLGSPKQIAEVFYDRLKLPVLKKTATGAPSTDEEVLEKLAEDYPLPARVLEHRSLVKLKSTYTDKLPTMINPATGRVHTHFAQAVAVTGRLASAEPNLQNIPIRTPEGRRIRAAFIAPPGHVIASADYSQIELRIMAHLSQDPALLRAFEQGLDVHRATAAEVFGVSPEHVTPEQRRYAKTINFGLIYGMSPYGLAKALGIDASAAKSYIERYFERFAGVRAYMEQTRAQARARGYVETVFGRRLVLPEIQSPNGPRRAAAERAAINAPMQGTAADLIKMSMVAVQRALDEQQRRTRMVLQVHDELVFEVPNEEVDWVRTEVPRLMAAVATLRVPLVASVGVGANWEQAH

SEQ ID NO: 26 - protein, 14 aa, Artificial Sequence
  Description of Artificial Sequence: Synthetic peptide
  MOD_RES (2)..(4): Any amino acid
  MOD_RES (6)..(8): Any amino acid
  MOD_RES (10)..(12): Any amino acid
  MOD_RES (14)..(14): Any amino acid
RXXXKXXXFXXXYX

SEQ ID NO: 27 - protein, 832 aa, Thermus aquaticus [sequence omitted]

SEQ ID NO: 28 - protein, 893 aa, Thermatoga neopolitina
MARLFLFDGTALAYRAYYALDRSLSTSTGIPTNAVYGVARMLVKFIKEHIIPEKDYAAVAFDKKAATFRHKLLVSDKAQRPKTPALLVQQLPYIKRLIEALGFKVLELEGYEADDIIATLAVRAARFLMRFSLITGDKDMLQLVNEKIKVWRIVKGISDLELYDSKKVKERYGVEPHQIPDLLALTGDDIDNIPGVTGIGEKTAVQLLGKYRNLEYILEHARELPQRVRKALLRDREVAILSKKLATLVTNAPVEVDWEEMKYRGYDKRKLLPILKELEFASIMKELQLYEEAEPTGYEIVKDHKTFEDLIEKLKEVPSFALDLETSSLDPFNCEIVGISVSFKPKTAYYIPLHHRNAHNLDETLVLSKLKEILEDPSSKIVGQNLKYDYKVLMVKGISPVYPHFDTMIAAYLLEPNEKKFNLEDLSLKFLGYKMTSYQELMSFSSPLFGFSFADVPVDKAAEYSCEDADITYRLYKILSMKLHEAELENVFYRIEMPLVNVLARMEFNWVYVDTEFLKKLSEEYGKKLEELAEKIYQIAGEPFNINSPKQVSNILFEKLGIKPRGKTTKTGDYSTRIEVLEEIANEHEIVPLILEFRKILKLKSTYIDTLPKLVNPKTGRFHASFHQTGTATGRLSSSDPNLQNLPTKSEEGKEIRKAIVPQDPDWWIVSADYSQIELRILAHLSGDENLVKAFEEGIDVHTLTASRIYNVKPEEVNEEMRRVGKMVNFSIIYGVTPYGLSVRLGIPVKEAEKMIISYFTLYPKVRSYIQQVVAEAKEKGYVRTLFGRKRDIPQLMARDKNTQSEGERIAINTPIQGTAADIIKLAMIDIDEELRKRNMKSRMIIQVHDELVFEVPDEEKEELVDLVKNKMTNVVKLSVPLEVDISIGKSWS

SEQ ID NO: 29 - protein, 834 aa, Thermus thermophilus
MEAMLPLFEPKGRVLLVDGHHLAYRTFFALKGLTTSRGEPVQAVYGFAKSLLKALKEDGYKAVFVVFDAKAPSFRHEAYEAYKAGRAPTPEDFPRQLALIKELVDLLGFTRLEVPGYEADDVLATLAKKAEKEGYEVRILTADRDLYQLVSDRVAVLHPEGHLITPEWLWEKYGLRPEQWVDFRALVGDPSDNLPGVKGIGEKTALKLLKEWGSLENLLKNLDRVKPENVREKIKAHLEDLRLSLELSRVRTDLPLEVDLAQGREPDREGLRAFLERLEFGSLLHEFGLLEAPAPLEEAPWPPPEGAFVGFVLSRPEPMWAELKALAACRDGRVHRAADPLAGLKDLKEVRGLLAKDLAVLASREGLDLVPGDDPMLLAYLLDPSNTTPEGVARRYGGEWTEDAAHRALLSERLHRNLLKRLEGEEKLLWLYHEVEKPLSRVLAHMEATGVRRDVAYLQALSLELAEEIRRLEEEVFRLAGHPFNLNSRDQLERVLFDELRLPALGKTQKTGKRSTSAAVLEALREAHPIVEKILQHRELTKLKNTYVDPLPSLVHPRTGRLHTRFNQTATATGRLSSSDPNLQNIPVRTPLGQRIRRAFVAEAGWALVALDYSQIELRVLAHLSGDENLIRVFQEGKDIHTQTASWMFGVPPEAVDPLMRRAAKTVNFGVLYGMSAHRLSQELAIPYEEAVAFIERYFQSFPKVRAWIEKTLEEGRKRGYVETLFGRRRYVPDLNARVKSVREAAERMAFNMPVQGTAADLMKLAMVKLFPRLREMGARMLLQVHDELLLEAPQARAEEVAALAKEAMEKAYPLAVPLEVEVGMGEDWLSAKG

SEQ ID NO: 30 - protein, 856 aa, Thermoanaerobacter sp.
  AZ3B.1
MKYLLPTAAAGLLLLAAQPAMAMVLIKLIEEEKPDYIAIAFDKKAPTFRHKEYQDYKATRQAMPEELAEQVDLLKEIIDGFNIKTLELEGYEADDLIGTISKLAEEKGMEVLVVTGDRDALQLVSDKVKVKISKKGITQMEEFDEKAVLERYEITPYQFIDLKGLMGDKSDNIPGIPNIGEKTAIKLLKEFGSVENLLQNLSQLKGKIKENIENNKELAVMSKRLATIKRDIPIEIDFEEYRVKDFNEEKLLEIFNKLEFFSLIDSIKKKDNVEIVNNHKVQKWPKIDIRKLITLLQDSRNIAFYPLIYEGEIKKIAFSFGSNTVYIDIFQIEDLKEIFEKEEFEFTTHEIKDFLVKLSYKGIECKSKYIDTAIMAYLLNPSESNYDLDRVLKKYLKVDVPSYEEVFGKGRDKKKLEEIREDVLADYICSRCVHLFDLREKLMNFIEEMDMKKLLLEIEMPLVEVLKSMEVSGFTLDKEVLKELSQKIDDRIAEILDKIYKEAGYQFNVNSPKQLSEFLFEKLNLPVIKKTKTGYSTDSEVLEQLVPYNDVVSDIIEYRQLTKLKSTYIDGFLPLMDENNRVHSNFKQMVTATGRISSTEPNLQNIPIREEFGRQIRRAFIPRTKDGYIVSADYSQIELRVLAHVSGDEKLIESFMNNEDIHLRTAAEVFKVPMEKVTPEMRRAAKAVNFGIIYGISDYGLSRDLKISRKEAKEYINNYFERYKGVKEYIEKIVRFAKENGYVTTIMNRRRYIPEINSRNFTQRSQAERLAMNAPIQGSAADIIKMAMVKVYEDFKKLQLKSQLILQVHDELVVDTYKDEVDIVKKILKENMENVIKLKVPLVVEIGIGPNWFLAK

SEQ ID NO: 31 - protein, 2578 aa, Thermoanaerobacter sp.
  AZ3B.1
ATGAAATACCTGCTGCCGACCGCTGCTGCTGGTCTGCTGCTCCTCGCTGCCCAGCCGGCGATGGCCATGGTGCTTATAAAACTTATTGAAGAGGAAAAACCTGATTATATAGCTATAGCTTTTGACAAAAAAGCTCCTACTTTTAGACACAAAGAGTATCAAGACTACAAAGCTACAAGACAAGCAATGCCTGAGGAACTCGCAGAACAAGTAGACCTTTTAAAAGAAATTATAGATGGCTTTAATATAAAGACTTTAGAATTAGAAGGTTACGAAGCCGATGACCTCATAGGTACTATTTCAAAGTTGGCAGAGGAAAAAGGAATGGAAGTGCTTGTAGTTACAGGAGATAGGGACGCGCTTCAATTAGTTTCAGATAAAGTGAAAGTTAAGATTTCTAAAAAGGGTATAACTCAGATGGAAGAGTTTGACGAAAAGGCTGTTTTAGAAAGATATGAAATAACTCCTTATCAATTTATTGATTTAAAAGGGCTAATGGGGGATAAATCTGATAATATCCCAGGGATACCTAATATAGGAGAAAAAACAGCGATTAAACTTTTAAAAGAATTTGGCAGTGTTGAAAATTTGCTTCAAAATCTTTCTCAACTCAAAGGTAAGATAAAGGAAAATATAGAAAATAATAAAGAATTAGCTGTAATGAGTAAAAGACTTGCAACTATAAAAAGAGACATTCCTATTGAGATAGATTTTGAGGAATATAGAGTAAAAGACTTTAATGAGGAGAAGCTTTTGGAGATTTTTAATAAATTAGAATTCTTTAGTTTGATTGATAGCATAAAGAAAAAAGATAATGTAGAGATTGTAAATAATCATAAAGTTCAAAAATGGCCAAAAATAGATATAAGAAAATTAATAACTTTATTGCAAGACAGCAGAAATATTGCTTTTTATCCTTTAATTTATGAAGGGGAAATAAAGAAAATAGCTTTTTCTTTTGGAAGCAATACTGTTTATATTGACATTTTTCAAATAGAAGACTTAAAAGAGATTTTTGAAAAAGAAGAGTTTGAATTTACAACCCACGAAATAAAAGATTTTTTAGTCAAGCTTTCTTATAAAGGAATAGAGTGTAAAAGCAAGTACATAGATACTGCTATAATGGCTTATCTTTTAAATCCTTCTGAGTCTAACTATGATTTGGACCGTGTGCTGAAAAAATATTTAAAGGTGGATGTTCCATCTTATGAAGAGGTATTTGGCAAAGGTAGGGATAAAAAGAAGCTTGAAGAAATAAGAGAAGATGTACTTGCTGATTACATTTGCAGTAGATGTGTGCATCTATTTGATTTAAGAGAAAAGTTGATGAATTTTATTGAAGAAATGGATATGAAAAAACTTTTATTGGAAATAGAAATGCCTCTTGTAGAAGTTTTAAAATCAATGGAAGTAAGTGGTTTTACATTAGATAAAGAAGTCCTAAAAGAGCTTTCACAAAAAATAGATGATAGAATAGCAGAAATACTAGATAAAATTTATAAAGAGGCAGGGTATCAATTTAATGTAAATTCCCCTAAGCAATTAAGTGAATTTTTGTTTGAAAAATTAAATTTACCAGTAATAAAGAAAACAAAAACAGGATATTCTACAGATTCTGAAGTTTTAGAGCAATTAGTTCCTTATAATGATGTTGTCAGTGATATAATAGAGTATAGGCAACTTACAAAACTTAAATCTACTTATATAGACGGATTTTTGCCTCTCATGGATGAAAACAATAGAGTACATTCTAATTTTAAGCAAATGGTCACTGCTACAGGCAGAATAAGCAGTACCGAGCCGAATCTACAAAATATACCTATAAGAGAAGAGTTTGGTAGACAAATTAGAAGAGCTTTTATTCCGCGGACTAAAGATGGGTATATTGTCTCGGCTGATTATTCTCAGATTGAACTAAGGGTTTTAGCACATGTTTCGGGGGATGAGAAGCTAATAGAATCTTTTATGAATAACGAAGATATACATTTAAGAACAGCTGCTGAAGTTTTTAAAGTCCCAATGGAAAAAGTTACACCTGAAATGAGAAGAGCGGCAAAAGCCGTAAACTTTGGTATAATATATGGCATTAGCGATTATGGGCTTTCTCGAGACCTTAAAATATCAAGAAAAGAGGCAAAAGAGTATATAAATAATTATTTTGAAAGATACAAAGGAGTAAAAGAATATATTGAAAAAATAGTGCGATTTGCAAAAGAAAATGGCTATGTGACTACAATAATGAACAGAAGAAGGTATATTCCTGAGATAAACTCAAGAAATTTTACTCAAAGGTCGCAGGCTGAGAGGTTAGCAATGAATGCTCCAATACAGGGAAGTGCGGCTGATATAATAAAAATGGCAATGGTTAAAGTTTATGAAGATTTTAAAAAATTGCAGTTAAAGTCTCAACTTATATTGCAAGTGCACGATGAGCTTGTAGTAGATACGTATAAAGATGAAGTAGATATTGTAAAGAAAATATTGAAAGAAAATATGGAAAACGTGATAAAACTAAAAGTCCCTCTTGTTGTTGAAATTGGTATAGGGCCCAATTGGTTTTTAGCCAAGTGAGGGATCC

SEQ ID NO: 32 - protein, 876 aa, Bacillus stearothermophilus
MKNKLVLIDGNSVAYRAFFALPLLHNDKGIHTNAVYGFTMMLNKILAEEQPTHILVAFDAGKTTFRHETFQDYKGGRQQTPPELSEQFPLLRELLKAYRIPAYELDHYEADDIIGTMAARAEREGFAVKVISGDRDLTQLASPQVTVEITKKGITDIESYTPETVVEKYGLTPEQIVDLKGLMGDKSDNIPGVPGIGEKTAVKLLKQFGTVENVLASIDEIKGEKLKENLRQYRDLALLSKQLAAICRDAPVELTLDDIVYKGEDREKVVALFQELGFQSFLDKMAVQTDEGEKPLAGMDFAIADSVTDEMLADKAALVVEVVGDNYHHAPIVGIALANERGRFFLRPETALADPKFLAWLGDETKKKTMFDSKRAAVALKWKGIELRGVVFDLLLAAYLLDPAQAAGDVAAVAKMHQYEAVRSDEAVYGKGAKRTVPDEPTLAEHLVRKAAAIWALEEPLMDELRRNEQDRLLTELEQPLAGILANMEFTGVKVDTKRLEQMGAELTEQLQAVERRIYELAGQEFNINSPKQLGTVLFDKLQLPVLKKTKTGYSTSADVLEKLAPHHEIVEHILHYRQLGKLQSTYIEGLLKVVHPVTGKVHTMFNQALTQTGRLSSVEPNLQNIPIRLEEGRKIRQAFVPSEPDWLIFAADYSQIELRVLAHIAEDDNLIEAFRRGLDIHTKTAMDIFHVSEEDVTANMRRQAKAVNFGIVYGISDYGLAQNLNITRKEAAEFIERYFASFPGVKQYMDNIVQEAKQKGYVTTLLHRRRYLPDITSRNFNVRSFAERTAMNTPIQGSAADIIKKAMIDLSVRLREERLQARLLLQVHDELILEAPKEEIERLCRLVPEVMEQAVTLRVPLKVDYHYGPTWYDAK

SEQ ID NO: 33 - protein, 877 aa, Bacillus caldotenax
MKKKLVLIDGSSVAYRAFFALPLLHNDKGIHTNAVYGFTMMLNKILAEEEPTHMLVAFDAGKTTFRHEAFQEYKGGRQQTPPELSEQFPLLRELLRAYRIPAYELENYEADDIIGTLAARAEQEGFEVKVISGDRDLTQLASPHVTVDITKKGITDIEPYTPEAVREKYGLTPEQIVDLKGLMGDKSDNIPGVPGIGEKTAVKLLRQFGTVENVLASIDEIKGEKLKETLRQHREMALLSKKLAAIRRDAPVELSLDDIAYQGEDREKVVALFKELGFQSFLEKMESPSSEEEKPLAKMAFTLADRVTEEMLADKAALVVEVVEENYHDAPIVGIAVVNEHGRFFLRPETALADPQFVAWLGDETKKKSMFDSKRAAVALKWKGIELCGVSFDLLLAAYLLDPAQGVDDVAAAAKMKQYEAVRPDEAVYGKGAKRAVPDEPVLAEHLVRKAAAIWALERPFLDELRRNEQDRLLVELEQPLSSILAEMEFAGVKVDTKRLEQMGEELAEQLRTVEQRIYELAGQEFNINSPKQLGVILFEKLQLPVLKKSKTGYSTSADVLEKLAPYHEIVENILQHYRQLGKLQSTYIEGLLKVVRPDTKKVHTIFNQALTQTGRLSSTEPNLQNIPIRLEEGRKIRQAFVPSESDWLIFAADYSQIELRVLAHIAEDDNLMEAFRRDLDIHTKTAMDIFQVSEDEVTPNMRRQAKAVNFGIVYGISDYGLAQNLNISRKEAAEFIERYFESFPGVKRYMENIVQEAKQKGYVTTLLHRRRYLPDITSRNFNVRSFAERMAMNTPIQGSAADIIKKAMIDLNARLKEERLQARLLLQVHDELILEAPKEEMERLCRLVPEVMEQAVTLRVPLKVDYHYGSTWYDAK

SEQ ID NO: 34 - protein, 928 aa, Escherichia coli [sequence omitted]

SEQ ID NO: 35 - protein, 4 aa, Artificial Sequence
  Description of Artificial Sequence: Synthetic Factor Xa cleavage site peptide
IEGR

SEQ ID NO: 36 - protein, 4 aa, Artificial Sequence
  Description of Artificial Sequence: Synthetic Thrombin cleavage site peptide
LVPR

SEQ ID NO: 37 - DNA, 52 bp, Artificial Sequence
  Description of Artificial Sequence: Synthetic primer
ggggacaactttgtacaaaaaagttgtcgatccaaaaataatccttatagac

SEQ ID NO: 38 - DNA, 52 bp, Artificial Sequence
  Description of Artificial Sequence: Synthetic primer
ggggacaactttgtacaaaaaagttgtcgcgaaatttttgatcatagatggt

SEQ ID NO: 39 - DNA, 51 bp, Artificial Sequence
  Description of Artificial Sequence: Synthetic primer
ggggacaactttgtacaagaaagttgctcaggaggcttcataccagttttt

SEQ ID NO: 40 - DNA, 67 bp, Artificial Sequence
  Description of Artificial Sequence: Synthetic primer
ggggacaactttgtacaaaaaagttgtcaggaggttaaccatggatccaaaaataatccttatagac

SEQ ID NO: 41 - DNA, 66 bp, Artificial Sequence
  Description of Artificial Sequence: Synthetic primer
ggggacaactttgtacaaaaaagttgtcaggaggttaaccatggcgaaatttttgatcatagatgg

SEQ ID NO: 42 - DNA, 51 bp, Artificial Sequence
  Description of Artificial Sequence: Synthetic primer
ggggacaactttgtacaagaaagttgcttattttgcatcataccagttttt

SEQ ID NO: 43 - DNA, 22 bp, Artificial Sequence
  Description of Artificial Sequence: Synthetic CAT forward primer
cgaccgttcagctggatattac

SEQ ID NO: 44 - DNA, 24 bp, Artificial Sequence
  Description of Artificial Sequence: Synthetic CAT reverse primer
ttgtaattcattaagcattctgcc

SEQ ID NO: 45 - DNA, 733 bp, Homo sapiens
gggatccggagcccaaatcttctgacaaaactcacacatgcccaccgtgcccagcacctgaattcgagggtgcaccgtcagtcttcctcttccccccaaaacccaaggacaccctcatgatctcccggactcctgaggtcacatgcgtggtggtggacgtaagccacgaagaccctgaggtcaagttcaactggtacgtggacggcgtggaggtgcataatgccaagacaaagccgcgggaggagcagtacaacagcacgtaccgtgtggtcagcgtcctcaccgtcctgcaccaggactggctgaatggcaaggagtacaagtgcaaggtctccaacaaagccctcccaacccccatcgagaaaaccatctccaaagccaaagggcagccccgagaaccacaggtgtacaccctgcccccatcccgggatgagctgaccaagaaccaggtcagcctgacctgcctggtcaaaggcttctatccaagcgacatcgccgtggagtgggagagcaatgggcagccggagaacaactacaagaccacgcctcccgtgctggactccgacggctccttcttcctctacagcaagctcaccgtggacaagagcaggtggcagcaggggaacgtcttctcatgctccgtgatgcatgaggctctgcacaaccactacacgcagaagagcctctccctgtctccgggtaaatgagtgcgacggccgcgactctagaggat

SEQ ID NO: 46 - protein, 19 aa, Thermus aquaticus
RYVPDLEARVKSVREAAER

SEQ ID NO: 47 - protein, 19 aa, Thermus RTA 41A
RYVPDLASRVRSVREAAER

SEQ ID NO: 48 - protein, 19 aa, Thermatoga neopolitina
RDIPQLMARDKNTQSEGER

SEQ ID NO: 49 - protein, 19 aa, Thermus thermophilus
RYVPDLNARVKSVREAAER

SEQ ID NO: 50 - protein, 19 aa, Dictyoglomus thermophilum
RYIPEIKSINKQVRNAYER

SEQ ID NO: 51 - protein, 19 aa, Caldicellulosiruptor saccharolyticus
RYIKDIKSTNKNLRNYAER

SEQ ID NO: 52 - protein, 19 aa, Caldicellulosiruptor Tok13B
RYIKDIKSTNKNLRNYAER

SEQ ID NO: 53 - protein, 19 aa, Caldicellulosiruptor Tok7B
RYIKDIKSTNKNLRNYAER

SEQ ID NO: 54 - protein, 19 aa, Caldicellulosiruptor RT69B
RYIKDIKSTNKNLRNYAER

SEQ ID NO: 55 - protein, 19 aa, Bacillus caldolyticus EA1
RYLPDITSRNFNVRSFAER

SEQ ID NO: 56 - protein, 19 aa, Clostridium thermosulfurogenes
RYIPEINSKNFHQRSFGKR

SEQ ID NO: 57 - protein, 19 aa, Clostridium stercorarium
RYLPELASKNFHQRSFGKR

SEQ ID NO: 58 - protein, 19 aa, Caldibacillus cellulovorans Comp A.2
RYLPDINASNYNLRSFAER

SEQ ID NO: 59 - protein, 984 aa, Artificial Sequence
  Description of Artificial Sequence: Synthetic polymerase alignment consensus sequence
  MOD_RES (2)..(3): Any amino acid or not present
  MOD_RES (26)..(50): Any amino acid or not present
  MOD_RES (70)..(73): Any amino acid or not present
  MOD_RES (100)..(102): Any amino acid or not present
  MOD_RES (203)..(204): Any amino acid or not present
  MOD_RES (279)..(279): Any amino acid or not present
  MOD_RES (345)..(349): Any amino acid or not present
  MOD_RES (353)..(354): Any amino acid or not present
  MOD_RES (357)..(357): Any amino acid or not present
  MOD_RES (363)..(376): Any amino acid or not present
  MOD_RES (379)..(384): Any amino acid or not present
  MOD_RES (393)..(393): Any amino acid or not present
  MOD_RES (397)..(397): Any amino acid or not present
  MOD_RES (405)..(412): Any amino acid or not present
  MOD_RES (416)..(416): Any amino acid or not present
  MOD_RES (418)..(420): Any amino acid or not present
  MOD_RES (422)..(424): Any amino acid or not present
  MOD_RES (426)..(427): Any amino acid or not present
  MOD_RES (431)..(435): Any amino acid or not present
  MOD_RES (443)..(444): Any amino acid or not present
  MOD_RES (519)..(525): Any amino acid or not present
  MOD_RES (529)..(536): Any amino acid or not present
  MOD_RES (538)..(538): Any amino acid or not present
  MOD_RES (546)..(548): Any amino acid or not present
  MOD_RES (569)..(569): Any amino acid or not present
  MOD_RES (645)..(645): Any amino acid or not present
  MOD_RES (655)..(655): Any amino acid or not present
  MOD_RES (679)..(679): Any amino acid or not present
  MOD_RES (746)..(747): Any amino acid or not present
  MOD_RES (981)..(984): Any amino acid or not present
MXXKYLLPTAAAGLLLLAAQPAMAMXXXXXXXXXXXXXXXXXXXXXXXXXKLVLIDGNSLAYRAFFALPXXXXLTTSTGIPTNAVYGFANMLLKYLEEEXXXKPDYVAVAFDKKAPTFRHSEYEEYKAGRQPMPDELQEQIPYVRELLRALNIPVLELEGYEADDIIGTLAKRAEAEGMEVVIITGDRDLLQLVSDNVIVKIXXTKKGITTEELYTPEAVKEKYGVTPHQIVDLKGLMGDASDNIPGVPGIGEKTAIKLLEEYGTLENLLQNLDEIKGXKLKEKLEAHKDMAFLSKRLATIIRDLPIEVDLEELKRKEWDKEKLLAILLQLEFKSLIKRLGFSEXXXXXEIEXXRQXKQLPEXXXXXXXXXXXXXXFSXXXXXXVSDIKEKEXYLLXSDEEGLFXXXXXXXXYDGXIXXXAXXXGXXYFYXXXXXIRQTSALXXTSDKEALKELLADESIQKVGHDLKNILVKLDFKGIELLGNCFDTMLAAYLLDPTRSSYDLETLAKKYLNTDVASXXXXXXXGKGXXXXXXXXIXENRLAGYXXXAAVLLRNLWDELSKLIDENEXLEYLLEEIEMPLVPVLAEMEKIGFKVDKETLQELSEEIEEKLLKLESEIYQLAGEEFNINSPKQLSEILFEKLKLXPVVKKTKTGXYSTDAEVLEELYPYHDIVPLILEXYRQLTKLKSTYIDGLLKLINPVTGRVHTNFNQTGTATGRLSSTEPNLQNIPVRYEEGRLIRKAFVPXXEEGYLLVAADYSQIELRVLAHISGDENLIEAFKNNLDIHTQTAAEIFGVDEEEVTPEMRRQAKAVNFGIVYGISDYGLSRDLKISRKEAAEFINRYFEKYPGVKEYIDNIVKFARENGYVTTLFNRRRYIPDIKSRNKNVRSFAERIAMNTPIQGSAADIIKIAMIKVYKRLKEENLKSRLILQVHDELVIEVPKEEKEIVKELVKEVMENAVLLKVPLVVEVGIGSNWYEAKXXXX

SEQ ID NO: 60 - protein, 19 aa, Spirochaete
RPLPYITSRNKTQKTGAER

SEQ ID NO: 61 - protein, 20 aa, Tepidomonas
RLVLPEIQSPNGPRRAAAER

SEQ ID NO: 62 - protein, 19 aa, Thermoanaerobacter AZ3B.1
RYIPEINSRNFTQRSQAER

SEQ ID NO: 63 - protein, 19 aa, Bacillus stearothermophilus
RYLPDITSRNFNVRSFAER

SEQ ID NO: 64 - protein, 19 aa, Bacillus caldotenax
RYLPDITSRNFNVRSFAER

SEQ ID NO: 65 - protein, 19 aa, Escherichia coli
LYLPDIKSSNGARRAAAER

SEQ ID NO: 66 - protein, 6 aa, Artificial Sequence
  Description of Artificial Sequence: Synthetic Bacterial Pol I conserved motif peptide
DYSQIE

SEQ ID NO: 67 - protein, 6 aa, Artificial Sequence
  Description of Artificial Sequence: Synthetic Bacterial Pol I conserved motif peptide
QVHDEL

SEQ ID NO: 68 - DNA, 17 bp, Rickettsia Pwazekii
gattattctcaaattga

SEQ ID NO: 69 - DNA, 18 bp, Rickettsia Pwazekii
caaattcatgatgaatta

SEQ ID NO: 70 - DNA, 17 bp, Chlamydia pneumoniae
gattattctcaaattga

SEQ ID NO: 71 - DNA, 18 bp, Chlamydia pneumoniae
caaatacatgacgaatta

SEQ ID NO: 72 - DNA, 17 bp, Escherichia coli
gactactcgcagattga

SEQ ID NO: 73 - DNA, 18 bp, Escherichia coli
caggtacacgatgaactg

SEQ ID NO: 74 - DNA, 17 bp, Haemophilus influenzae
gactattctcaaattga

SEQ ID NO: 75 - DNA, 18 bp, Haemophilus influenzae
caagtacatgatgaatta

SEQ ID NO: 76 - DNA, 17 bp, Bacillus caldotenax
gactactcgcaaattga

SEQ ID NO: 77 - DNA, 18 bp, Bacillus caldotenax
caggtgcatgacgagctc

SEQ ID NO: 78 - DNA, 17 bp, Bacillus stearothermophilus
gattactcacaaattga

SEQ ID NO: 79 - DNA, 18 bp, Bacillus stearothermophilus
caagtgcatgacgagctc

SEQ ID NO: 80 - DNA, 17 bp, Bacillus subtilis
gattattcacaaatcga

SEQ ID NO: 81 - DNA, 18 bp, Bacillus subtilis
caagtacacgatgaattg

SEQ ID NO: 82 - DNA, 17 bp, Streptococcus pneumoniae
gactattcacagattga

SEQ ID NO: 83 - DNA, 18 bp, Streptococcus pneumoniae
caagtgcacgatgaaatc

SEQ ID NO: 84 - DNA, 17 bp, Lactococcus lactis
gactattcacaaattga

SEQ ID NO: 85 - DNA, 18 bp, Lactococcus lactis
caagtacacgatgaaatt

SEQ ID NO: 86 - DNA, 17 bp, Anaerocellum thermophilum
gattattcccaaattga

SEQ ID NO: 87 - DNA, 18 bp, Anaerocellum thermophilum
caggtacacgatgagctt

SEQ ID NO: 88 - DNA, 17 bp, Thermotoga maritima
gactactcccaaataga

SEQ ID NO: 89 - DNA, 18 bp, Thermotoga maritima
caggtccacgacgaactg

SEQ ID NO: 90 - DNA, 17 bp, Treponema pallidum
gactatacacaaataga

SEQ ID NO: 91 - DNA, 18 bp, Treponema pallidum
caggtacacgatgaattg

SEQ ID NO: 92 - DNA, 17 bp, Rhizobium leguminosarum
gactacagccagatcga

SEQ ID NO: 93 - DNA, 18 bp, Rhizobium leguminosarum
caggtgcacgacgaactc

SEQ ID NO: 94 - DNA, 17 bp, Methylobacterium sp.
gattacagccagatcga

SEQ ID NO: 95 - DNA, 18 bp, Methylobacterium sp.
caagtgcacgacgaactc

SEQ ID NO: 96 - DNA, 17 bp, Thermus thermophilus
gactatagccagataga

SEQ ID NO: 97 - DNA, 18 bp, Thermus thermophilus
caggtccacgacgagctc

SEQ ID NO: 98 - DNA, 17 bp, Thermus sp.
gactatagccagataga

SEQ ID NO: 99 - DNA, 18 bp, Thermus sp.
caggtccacgacgagctc

SEQ ID NO: 100 - DNA, 17 bp, Thermus aquaticus
gactatagccagataga

SEQ ID NO: 101 - DNA, 18 bp, Thermus aquaticus
caggtccacgacgagctg

SEQ ID NO: 102 - DNA, 17 bp, Thermus flavus
gactacagccagattga

SEQ ID NO: 103 - DNA, 18 bp, Thermus flavus
caggtgcacgacgagctg

SEQ ID NO: 104 - DNA, 17 bp, Thermus filiformis
gactactcccagattga

SEQ ID NO: 105 - DNA, 18 bp, Thermus filiformis
caagtgcacgacgagctg

SEQ ID NO: 106 - DNA, 17 bp, Deinococcus radiodurans
gactactcgcaaatcga

SEQ ID NO: 107 - DNA, 18 bp, Deinococcus radiodurans
caagtgcacgacgaactg

SEQ ID NO: 108 - DNA, 17 bp, Mycobacterium tuberculosis
gactacagccagatcga

SEQ ID NO: 109 - DNA, 18 bp, Mycobacterium tuberculosis
caggtccacgacgagctg

SEQ ID NO: 110 - DNA, 17 bp, Rhodothermus obamensis
gactacgtccagatcga

SEQ ID NO: 111 - DNA, 18 bp, Rhodothermus obamensis
caggtgcacgacgagctg

SEQ ID NO: 112 - DNA, 17 bp, Cloroflexus aurantiacus
gactactcgcagatcga

SEQ ID NO: 113 - DNA, 18 bp, Cloroflexus aurantiacus
caggtacacgacgaatta

SEQ ID NO: 114 - DNA, 17 bp, Helicobacter pylori
gattattcgcagattga

SEQ ID NO: 115 - DNA, 18 bp, Helicobacter pylori
caagtgcatgacgaattg

SEQ ID NO: 116 - DNA, 26 bp, Artificial Sequence
  Description of Artificial Sequence: Synthetic POLGCF1 oligonucleotide
  modified_base (18)..(18): a, c, t, g, unknown or other
atggccgccgactactcncarathga

SEQ ID NO: 117 - DNA, 26 bp, Artificial Sequence
  Description of Artificial Sequence: Synthetic POLGCF2 oligonucleotide oligonucleotide
atggccgccgactacagycarathga

SEQ ID NO: 118 - DNA, 30 bp, Artificial Sequence
  Description of Artificial Sequence: Synthetic POLATF oligonucleotide
  modified_base (22)..(22): a, c, t, g, unknown or other
catttttgctgccgattaywsncarathga

SEQ ID NO: 119 - DNA, 28 bp, Artificial Sequence
  Description of Artificial Sequence: Synthetic POLGCR oligonucleotide oligonucleotide
tgggcacctcgaagatcarytcrtcrtg

SEQ ID NO: 120 - DNA, 28 bp, Artificial Sequence
  Description of Artificial Sequence: Synthetic POLATR oligonucleotide oligonucleotide
ttggcgcttcaaaaataarytcrtcrtg

SEQ ID NO: 121 - DNA, 2772 bp, Artificial Sequence
  Description of Artificial Sequence: Synthetic Clostridium stercorarium DNA Polymerase R815A
atgaaatacctgctgccgaccgctgctgctggtctgctgctcctcgctgcccagccggcgatggccatggatccaaaaataatccttatagacggaaacagtattttaaaccgcggtttttatgccctgtcggggcgatccatgctgactacgtccacaggtctgtataccaatgcggttttcgcttttgtaaatatattgaacaaatatatcgaagaggaaaaccctgattatattgccgttgctttcgatcttagggcaaaaactttccggcacggtctatatgagggatacaaagcgcagcggaaaggcatgcccgatgaacttgcaatgcagatacccctcgcgaaggaagtactgagggcgatgaatattgccataatagagcatgaaggttatgaagccgacgatataatcggcagcctttcgttaaaggccgaaaaagagaattttgacgtaataatccttacgggggacagggattctttccagctgatcagcgacagggtgaaagttatcctgccttcgacgaaagccggaaaaacagagaccaacgtatatgataaacaggccatcattgacaaatacggagttttaccccatcagcttattgacgttaaaggcttaatgggagattcgtcagataatatacccggcgttccgggagtgggtgagaaaacggcgttaagccttatttcagcctacggtacactggaaggtgtttacgagcatattgatgaaataaaacagcctaagctgaaagcatcgctgattgaatataaggatcaggcgtttttaagccgtaagctgggtactattgtaagaaatctggagctgtgtgcttcgctggaggatctgaaaagaaaagaaataaaccgcaaagagcttttgaatgttttcagaaaactcgaatttgaaagtatcatatcaaaaatgaatcttgcttccgctgaggtgacagaattacctcccgcgccggaagagcttaaaataacccatatttcagcggcagaggatcttaagaaatggattgcttacctgcttaaccagaaaaacatttccgtccttcaactgattgaccgggaggattcatacagttcccgtctttcagggctggctttgtgcaccggggatgaggttttttatatcgagaccgggactgcactccccgagaatttgattgcaacagagctgaaagaactgtggcagaatgaaaatattcacaaaatcggacacaatataaaagaatttataacctggctgctgaaacacgatgttgaactgaacggcctttatttcgacactatgattgccgaatacctgatagattccataagaaacggctatcctatagcaagcctttctcacaaatacctgaatcgcagcgttccgtcgctggacgaacttttgggcaagggaaagggagcaaaaaagtactctgaaattccgcccgaaaggctgaaagattacagcgcttataacgtcaaagccatttttgacatatggccgatgcagaaaaaagttcttcaggaaaaccggcaggaggagctttttaatgacatagagcttcctcttataaccgtacttgccagtatggaataccacggtttcaaagttgacgccgcaaaacttcacgaatacggcgaagttcttctgtcacgcataaaagacctggaaaaggtaatttacatgctggccggtgaagaattcaacatcaattcaacgaagcagcttggtaccatattattcgaaaaactgaagcttcccgttgtaaaaagtacaaagaccggatactccaccgacgtcgaggttcttgaagagctttattacaagcatgatataataccatgcataatagaataccgccagcttacaaaactttacaccacctacgccgaaggtcttgaaaaagtgataaatcctgtaaccggtaaaattcattcaagttttaaccagacggttacggctacaggccgcatcagcagtaccgaaccaaatttacagaatatcccagtcagacacgaaatgggaagggaaatacggaaagcttttattccgtcgtcggaaaacgctgtttttgttgatgccgattattcacagatagagcttcgcgtgcttgcccatataacaggcgatgaagccctgataaatgctttcgttaagggggaagatattcatacggccacggcgtcgctggtatttgacgtagctcccgaagatgtgacgccggaactgcgcagaaaggcaaaagccgtaaatttcggcatagtgtacgggatcagtgattacgggctggcacgggatttgggaattacccggaaggaagcaaagcggtatatagacgactattttgccaaataccccaaagtaaaaacctatgtggatgaaattgtgcgggtcggccaggaacaggggtatgtggaaactctgttccacagaagagcttaccttcccgagcttgcatctaaaaattttcaccagcgttctttcggaaaaagggttgcaatgaatacgcccatacagggcactgcagccgatattattaaaattgcgatggtgaaggtatacaaggctttgaaagaatccggccttaaatccaggcttatcctccaggtccatgacgaacttgttattgagacttttgaagacgaactggagactgtcaaggaacttgtcaaaaagtgcatggaagaggccgttgaattgagtgtgccgcttgttgtcgacgtttcaatcgggaaaaactggtatgaagcctcctgatatggatcc

SEQ ID NO: 122 - DNA, 2772 bp, Artificial Sequence
  Description of Artificial Sequence: Synthetic Clostridium stercorarium DNA Polymerase R815N
atgaaatacctgctgccgaccgctgctgctggtctgctgctcctcgctgcccagccggcgatggccatggatccaaaaataatccttatagacggaaacagtattttaaaccgcggtttttatgccctgtcggggcgatccatgctgactacgtccacaggtctgtataccaatgcggttttcgcttttgtaaatatattgaacaaatatatcgaagaggaaaaccctgattatattgccgttgctttcgatcttagggcaaaaactttccggcacggtctatatgagggatacaaagcgcagcggaaaggcatgcccgatgaacttgcaatgcagatacccctcgcgaaggaagtactgagggcgatgaatattgccataatagagcatgaaggttatgaagccgacgatataatcggcagcctttcgttaaaggccgaaaaagagaattttgacgtaataatccttacgggggacagggattctttccagctgatcagcgacagggtgaaagttatcctgccttcgacgaaagccggaaaaacagagaccaacgtatatgataaacaggccatcattgacaaatacggagttttaccccatcagcttattgacgttaaaggcttaatgggagattcgtcagataatatacccggcgttccgggagtgggtgagaaaacggcgttaagccttatttcagcctacggtacactggaaggtgtttacgagcatattgatgaaataaaacagcctaagctgaaagcatcgctgattgaatataaggatcaggcgtttttaagccgtaagctgggtactattgtaagaaatctggagctgtgtgcttcgctggaggatctgaaaagaaaagaaataaaccgcaaagagcttttgaatgttttcagaaaactcgaatttgaaagtatcatatcaaaaatgaatcttgcttccgctgaggtgacagaattacctcccgcgccggaagagcttaaaataacccatatttcagcggcagaggatcttaagaaatggattgcttacctgcttaaccagaaaaacatttccgtccttcaactgattgaccgggaggattcatacagttcccgtctttcagggctggctttgtgcaccggggatgaggttttttatatcgagaccgggactgcactccccgagaatttgattgcaacagagctgaaagaactgtggcagaatgaaaatattcacaaaatcggacacaatataaaagaatttataacctggctgctgaaacacgatgttgaactgaacggcctttatttcgacactatgattgccgaatacctgatagattccataagaaacggctatcctatagcaagcctttctcacaaatacctgaatcgcagcgttccgtcgctggacgaacttttgggcaagggaaagggagcaaaaaagtactctgaaattccgcccgaaaggctgaaagattacagcgcttataacgtcaaagccatttttgacatatggccgatgcagaaaaaagttcttcaggaaaaccggcaggaggagctttttaatgacatagagcttcctcttataaccgtacttgccagtatggaataccacggtttcaaagttgacgccgcaaaacttcacgaatacggcgaagttcttctgtcacgcataaaagacctggaaaaggtaatttacatgctggccggtgaagaattcaacatcaattcaacgaagcagcttggtaccatattattcgaaaaactgaagcttcccgttgtaaaaagtacaaagaccggatactccaccgacgtcgaggttcttgaagagctttattacaagcatgatataataccatgcataatagaataccgccagcttacaaaactttacaccacctacgccgaaggtcttgaaaaagtgataaatcctgtaaccggtaaaattcattcaagttttaaccagacggttacggctacaggccgcatcagcagtaccgaaccaaatttacagaatatcccagtcagacacgaaatgggaagggaaatacggaaagcttttattccgtcgtcggaaaacgctgtttttgttgatgccgattattcacagatagagcttcgcgtgcttgcccatataacaggcgatgaagccctgataaatgctttcgttaagggggaagatattcatacggccacggcgtcgctggtatttgacgtagctcccgaagatgtgacgccggaactgcgcagaaaggcaaaagccgtaaatttcggcatagtgtacgggatcagtgattacgggctggcacgggatttgggaattacccggaaggaagcaaagcggtatatagacgactattttgccaaataccccaaagtaaaaacctatgtggatgaaattgtgcgggtcggccaggaacaggggtatgtggaaactctgttccacagaagaaattaccttcccgagcttgcatctaaaaattttcaccagcgttctttcggaaaaagggttgcaatgaatacgcccatacagggcactgcagccgatattattaaaattgcgatggtgaaggtatacaaggctttgaaagaatccggccttaaatccaggcttatcctccaggtccatgacgaacttgttattgagacttttgaagacgaactggagactgtcaaggaacttgtcaaaaagtgcatggaagaggccgttgaattgagtgtgccgcttgttgtcgacgtttcaatcgggaaaaactggtatgaagcctcctgatatggatcc

SEQ ID NO: 123 - DNA, 2772 bp, Artificial Sequence
  Description of Artificial Sequence: Synthetic Clostridium stercorarium DNA Polymerase R815D
atgaaatacctgctgccgaccgctgctgctggtctgctgctcctcgctgcccagccggcgatggccatggatccaaaaataatccttatagacggaaacagtattttaaaccgcggtttttatgccctgtcggggcgatccatgctgactacgtccacaggtctgtataccaatgcggttttcgcttttgtaaatatattgaacaaatatatcgaagaggaaaaccctgattatattgccgttgctttcgatcttagggcaaaaactttccggcacggtctatatgagggatacaaagcgcagcggaaaggcatgcccgatgaacttgcaatgcagatacccctcgcgaaggaagtactgagggcgatgaatattgccataatagagcatgaaggttatgaagccgacgatataatcggcagcctttcgttaaaggccgaaaaagagaattttgacgtaataatccttacgggggacagggattctttccagctgatcagcgacagggtgaaagttatcctgccttcgacgaaagccggaaaaacagagaccaacgtatatgataaacaggccatcattgacaaatacggagttttaccccatcagcttattgacgttaaaggcttaatgggagattcgtcagataatatacccggcgttccgggagtgggtgagaaaacggcgttaagccttatttcagcctacggtacactggaaggtgtttacgagcatattgatgaaataaaacagcctaagctgaaagcatcgctgattgaatataaggatcaggcgtttttaagccgtaagctgggtactattgtaagaaatctggagctgtgtgcttcgctggaggatctgaaaagaaaagaaataaaccgcaaagagcttttgaatgttttcagaaaactcgaatttgaaagtatcatatcaaaaatgaatcttgcttccgctgaggtgacagaattacctcccgcgccggaagagcttaaaataacccatatttcagcggcagaggatcttaagaaatggattgcttacctgcttaaccagaaaaacatttccgtccttcaactgattgaccgggaggattcatacagttcccgtctttcagggctggctttgtgcaccggggatgaggttttttatatcgagaccgggactgcactccccgagaatttgattgcaacagagctgaaagaactgtggcagaatgaaaatattcacaaaatcggacacaatataaaagaatttataacctggctgctgaaacacgatgttgaactgaacggcctttatttcgacactatgattgccgaatacctgatagattccataagaaacggctatcctatagcaagcctttctcacaaatacctgaatcgcagcgttccgtcgctggacgaacttttgggcaagggaaagggagcaaaaaagtactctgaaattccgcccgaaaggctgaaagattacagcgcttataacgtcaaagccatttttgacatatggccgatgcagaaaaaagttcttcaggaaaaccggcaggaggagctttttaatgacatagagcttcctcttataaccgtacttgccagtatggaataccacggtttcaaagttgacgccgcaaaacttcacgaatacggcgaagttcttctgtcacgcataaaagacctggaaaaggtaatttacatgctggccggtgaagaattcaacatcaattcaacgaagcagcttggtaccatattattcgaaaaactgaagcttcccgttgtaaaaagtacaaagaccggatactccaccgacgtcgaggttcttgaagagctttattacaagcatgatataataccatgcataatagaataccgccagcttacaaaactttacaccacctacgccgaaggtcttgaaaaagtgataaatcctgtaaccggtaaaattcattcaagttttaaccagacggttacggctacaggccgcatcagcagtaccgaaccaaatttacagaatatcccagtcagacacgaaatgggaagggaaatacggaaagcttttattccgtcgtcggaaaacgctgtttttgttgatgccgattattcacagatagagcttcgcgtgcttgcccatataacaggcgatgaagccctgataaatgctttcgttaagggggaagatattcatacggccacggcgtcgctggtatttgacgtagctcccgaagatgtgacgccggaactgcgcagaaaggcaaaagccgtaaatttcggcatagtgtacgggatcagtgattacgggctggcacgggatttgggaattacccggaaggaagcaaagcggtatatagacgactattttgccaaataccccaaagtaaaaacctatgtggatgaaattgtgcgggtcggccaggaacaggggtatgtggaaactctgttccacagaagagattaccttcccgagcttgcatctaaaaattttcaccagcgttctttcggaaaaagggttgcaatgaatacgcccatacagggcactgcagccgatattattaaaattgcgatggtgaaggtatacaaggctttgaaagaatccggccttaaatccaggcttatcctccaggtccatgacgaacttgttattgagacttttgaagacgaactggagactgtcaaggaacttgtcaaaaagtgcatggaagaggccgttgaattgagtgtgccgcttgttgtcgacgtttcaatcgggaaaaactggtatgaagcctcctgatatggatcc

SEQ ID NO: 124 - DNA, 2772 bp, Artificial Sequence
  Description of Artificial Sequence: Synthetic Clostridium stercorarium DNA Polymerase R815C
atgaaatacctgctgccgaccgctgctgctggtctgctgctcctcgctgcccagccggcgatggccatggatccaaaaataatccttatagacggaaacagtattttaaaccgcggtttttatgccctgtcggggcgatccatgctgactacgtccacaggtctgtataccaatgcggttttcgcttttgtaaatatattgaacaaatatatcgaagaggaaaaccctgattatattgccgttgctttcgatcttagggcaaaaactttccggcacggtctatatgagggatacaaagcgcagcggaaaggcatgcccgatgaacttgcaatgcagatacccctcgcgaaggaagtactgagggcgatgaatattgccataatagagcatgaaggttatgaagccgacgatataatcggcagcctttcgttaaaggccgaaaaagagaattttgacgtaataatccttacgggggacagggattctttccagctgatcagcgacagggtgaaagttatcctgccttcgacgaaagccggaaaaacagagaccaacgtatatgataaacaggccatcattgacaaatacggagttttaccccatcagcttattgacgttaaaggcttaatgggagattcgtcagataatatacccggcgttccgggagtgggtgagaaaacggcgttaagccttatttcagcctacggtacactggaaggtgtttacgagcatattgatgaaataaaacagcctaagctgaaagcatcgctgattgaatataaggatcaggcgtttttaagccgtaagctgggtactattgtaagaaatctggagctgtgtgcttcgctggaggatctgaaaagaaaagaaataaaccgcaaagagcttttgaatgttttcagaaaactcgaatttgaaagtatcatatcaaaaatgaatcttgcttccgctgaggtgacagaattacctcccgcgccggaagagcttaaaataacccatatttcagcggcagaggatcttaagaaatggattgcttacctgcttaaccagaaaaacatttccgtccttcaactgattgaccgggaggattcatacagttcccgtctttcagggctggctttgtgcaccggggatgaggttttttatatcgagaccgggactgcactccccgagaatttgattgcaacagagctgaaagaactgtggcagaatgaaaatattcacaaaatcggacacaatataaaagaatttataacctggctgctgaaacacgatgttgaactgaacggcctttatttcgacactatgattgccgaatacctgatagattccataagaaacggctatcctatagcaagcctttctcacaaatacctgaatcgcagcgttccgtcgctggacgaacttttgggcaagggaaagggagcaaaaaagtactctgaaattccgcccgaaaggctgaaagattacagcgcttataacgtcaaagccatttttgacatatggccgatgcagaaaaaagttcttcaggaaaaccggcaggaggagctttttaatgacatagagcttcctcttataaccgtacttgccagtatggaataccacggtttcaaagttgacgccgcaaaacttcacgaatacggcgaagttcttctgtcacgcataaaagacctggaaaaggtaatttacatgctggccggtgaagaattcaacatcaattcaacgaagcagcttggtaccatattattcgaaaaactgaagcttcccgttgtaaaaagtacaaagaccggatactccaccgacgtcgaggttcttgaagagctttattacaagcatgatataataccatgcataatagaataccgccagcttacaaaactttacaccacctacgccgaaggtcttgaaaaagtgataaatcctgtaaccggtaaaattcattcaagttttaaccagacggttacggctacaggccgcatcagcagtaccgaaccaaatttacagaatatcccagtcagacacgaaatgggaagggaaatacggaaagcttttattccgtcgtcggaaaacgctgtttttgttgatgccgattattcacagatagagcttcgcgtgcttgcccatataacaggcgatgaagccctgataaatgctttcgttaagggggaagatattcatacggccacggcgtcgctggtatttgacgtagctcccgaagatgtgacgccggaactgcgcagaaaggcaaaagccgtaaatttcggcatagtgtacgggatcagtgattacgggctggcacgggatttgggaattacccggaaggaagcaaagcggtatatagacgactattttgccaaataccccaaagtaaaaacctatgtggatgaaattgtgcgggtcggccaggaacaggggtatgtggaaactctgttccacagaagatgttaccttcccgagcttgcatctaaaaattttcaccagcgttctttcggaaaaagggttgcaatgaatacgcccatacagggcactgcagccgatattattaaaattgcgatggtgaaggtatacaaggctttgaaagaatccggccttaaatccaggcttatcctccaggtccatgacgaacttgttattgagacttttgaagacgaactggagactgtcaaggaacttgtcaaaaagtgcatggaagaggccgttgaattgagtgtgccgcttgttgtcgacgtttcaatcgggaaaaactggtatgaagcctcctgatatggatcc

SEQ ID NO: 125 - DNA, 2772 bp, Artificial Sequence
  Description of Artificial Sequence: Synthetic Clostridium stercorarium DNA Polymerase R815E
atgaaatacctgctgccgaccgctgctgctggtctgctgctcctcgctgcccagccggcgatggccatggatccaaaaataatccttatagacggaaacagtattttaaaccgcggtttttatgccctgtcggggcgatccatgctgactacgtccacaggtctgtataccaatgcggttttcgcttttgtaaatatattgaacaaatatatcgaagaggaaaaccctgattatattgccgttgctttcgatcttagggcaaaaactttccggcacggtctatatgagggatacaaagcgcagcggaaaggcatgcccgatgaacttgcaatgcagatacccctcgcgaaggaagtactgagggcgatgaatattgccataatagagcatgaaggttatgaagccgacgatataatcggcagcctttcgttaaaggccgaaaaagagaattttgacgtaataatccttacgggggacagggattctttccagctgatcagcgacagggtgaaagttatcctgccttcgacgaaagccggaaaaacagagaccaacgtatatgataaacaggccatcattgacaaatacggagttttaccccatcagcttattgacgttaaaggcttaatgggagattcgtcagataatatacccggcgttccgggagtgggtgagaaaacggcgttaagccttatttcagcctacggtacactggaaggtgtttacgagcatattgatgaaataaaacagcctaagctgaaagcatcgctgattgaatataaggatcaggcgtttttaagccgtaagctgggtactattgtaagaaatctggagctgtgtgcttcgctggaggatctgaaaagaaaagaaataaaccgcaaagagcttttgaatgttttcagaaaactcgaatttgaaagtatcatatcaaaaatgaatcttgcttccgctgaggtgacagaattacctcccgcgccggaagagcttaaaataacccatatttcagcggcagaggatcttaagaaatggattgcttacctgcttaaccagaaaaacatttccgtccttcaactgattgaccgggaggattcatacagttcccgtctttcagggctggctttgtgcaccggggatgaggttttttatatcgagaccgggactgcactccccgagaatttgattgcaacagagctgaaagaactgtggcagaatgaaaatattcacaaaatcggacacaatataaaagaatttataacctggctgctgaaacacgatgttgaactgaacggcctttatttcgacactatgattgccgaatacctgatagattccataagaaacggctatcctatagcaagcctttctcacaaatacctgaatcgcagcgttccgtcgctggacgaacttttgggcaagggaaagggagcaaaaaagtactctgaaattccgcccgaaaggctgaaagattacagcgcttataacgtcaaagccatttttgacatatggccgatgcagaaaaaagttcttcaggaaaaccggcaggaggagctttttaatgacatagagcttcctcttataaccgtacttgccagtatggaataccacggtttcaaagttgacgccgcaaaacttcacgaatacggcgaagttcttctgtcacgcataaaagacctggaaaaggtaatttacatgctggccggtgaagaattcaacatcaattcaacgaagcagcttggtaccatattattcgaaaaactgaagcttcccgttgtaaaaagtacaaagaccggatactccaccgacgtcgaggttcttgaagagctttattacaagcatgatataataccatgcataatagaataccgccagcttacaaaactttacaccacctacgccgaaggtcttgaaaaagtgataaatcctgtaaccggtaaaattcattcaagttttaaccagacggttacggctacaggccgcatcagcagtaccgaaccaaatttacagaatatcccagtcagacacgaaatgggaagggaaatacggaaagcttttattccgtcgtcggaaaacgctgtttttgttgatgccgattattcacagatagagcttcgcgtgcttgcccatataacaggcgatgaagccctgataaatgctttcgttaagggggaagatattcatacggccacggcgtcgctggtatttgacgtagctcccgaagatgtgacgccggaactgcgcagaaaggcaaaagccgtaaatttcggcatagtgtacgggatcagtgattacgggctggcacgggatttgggaattacccggaaggaagcaaagcggtatatagacgactattttgccaaataccccaaagtaaaaacctatgtggatgaaattgtgcgggtcggccaggaacaggggtatgtggaaactctgttccacagaagagaataccttcccgagcttgcatctaaaaattttcaccagcgttctttcggaaaaagggttgcaatgaatacgcccatacagggcactgcagccgatattattaaaattgcgatggtgaaggtatacaaggctttgaaagaatccggccttaaatccaggcttatcctccaggtccatgacgaacttgttattgagacttttgaagacgaactggagactgtcaaggaacttgtcaaaaagtgcatggaagaggccgttgaattgagtgtgccgcttgttgtcgacgtttcaatcgggaaaaactggtatgaagcctcctgatatggatcc

SEQ ID NO: 126 - DNA, 2772 bp, Artificial Sequence
  Description of Artificial Sequence: Synthetic Clostridium stercorarium DNA Polymerase R815Q
atgaaatacctgctgccgaccgctgctgctggtctgctgctcctcgctgcccagccggcgatggccatggatccaaaaataatccttatagacggaaacagtattttaaaccgcggtttttatgccctgtcggggcgatccatgctgactacgtccacaggtctgtataccaatgcggttttcgcttttgtaaatatattgaacaaatatatcgaagaggaaaaccctgattatattgccgttgctttcgatcttagggcaaaaactttccggcacggtctatatgagggatacaaagcgcagcggaaaggcatgcccgatgaacttgcaatgcagatacccctcgcgaaggaagtactgagggcgatgaatattgccataatagagcatgaaggttatgaagccgacgatataatcggcagcctttcgttaaaggccgaaaaagagaattttgacgtaataatccttacgggggacagggattctttccagctgatcagcgacagggtgaaagttatcctgccttcgacgaaagccggaaaaacagagaccaacgtatatgataaacaggccatcattgacaaatacggagttttaccccatcagcttattgacgttaaaggcttaatgggagattcgtcagataatatacccggcgttccgggagtgggtgagaaaacggcgttaagccttatttcagcctacggtacactggaaggtgtttacgagcatattgatgaaataaaacagcctaagctgaaagcatcgctgattgaatataaggatcaggcgtttttaagccgtaagctgggtactattgtaagaaatctggagctgtgtgcttcgctggaggatctgaaaagaaaagaaataaaccgcaaagagcttttgaatgttttcagaaaactcgaatttgaaagtatcatatcaaaaatgaatcttgcttccgctgaggtgacagaattacctcccgcgccggaagagcttaaaataacccatatttcagcggcagaggatcttaagaaatggattgcttacctgcttaaccagaaaaacatttccgtccttcaactgattgaccgggaggattcatacagttcccgtctttcagggctggctttgtgcaccggggatgaggttttttatatcgagaccgggactgcactccccgagaatttgattgcaacagagctgaaagaactgtggcagaatgaaaatattcacaaaatcggacacaatataaaagaatttataacctggctgctgaaacacgatgttgaactgaacggcctttatttcgacactatgattgccgaatacctgatagattccataagaaacggctatcctatagcaagcctttctcacaaatacctgaatcgcagcgttccgtcgctggacgaacttttgggcaagggaaagggagcaaaaaagtactctgaaattccgcccgaaaggctgaaagattacagcgcttataacgtcaaagccatttttgacatatggccgatgcagaaaaaagttcttcaggaaaaccggcaggaggagctttttaatgacatagagcttcctcttataaccgtacttgccagtatggaataccacggtttcaaagttgacgccgcaaaacttcacgaatacggcgaagttcttctgtcacgcataaaagacctggaaaaggtaatttacatgctggccggtgaagaattcaacatcaattcaacgaagcagcttggtaccatattattcgaaaaactgaagcttcccgttgtaaaaagtacaaagaccggatactccaccgacgtcgaggttcttgaagagctttattacaagcatgatataataccatgcataatagaataccgccagcttacaaaactttacaccacctacgccgaaggtcttgaaaaagtgataaatcctgtaaccggtaaaattcattcaagttttaaccagacggttacggctacaggccgcatcagcagtaccgaaccaaatttacagaatatcccagtcagacacgaaatgggaagggaaatacggaaagcttttattccgtcgtcggaaaacgctgtttttgttgatgccgattattcacagatagagcttcgcgtgcttgcccatataacaggcgatgaagccctgataaatgctttcgttaagggggaagatattcatacggccacggcgtcgctggtatttgacgtagctcccgaagatgtgacgccggaactgcgcagaaaggcaaaagccgtaaatttcggcatagtgtacgggatcagtgattacgggctggcacgggatttgggaattacccggaaggaagcaaagcggtatatagacgactattttgccaaataccccaaagtaaaaacctatgtggatgaaattgtgcgggtcggccaggaacaggggtatgtggaaactctgttccacagaagacaataccttcccgagcttgcatctaaaaattttcaccagcgttctttcggaaaaagggttgcaatgaatacgcccatacagggcactgcagccgatattattaaaattgcgatggtgaaggtatacaaggctttgaaagaatccggccttaaatccaggcttatcctccaggtccatgacgaacttgttattgagacttttgaagacgaactggagactgtcaaggaacttgtcaaaaagtgcatggaagaggccgttgaattgagtgtgccgcttgttgtcgacgtttcaatcgggaaaaactggtatgaagcctcctgatatggatcc

SEQ ID NO: 127 - DNA, 2772 bp, Artificial Sequence
  Description of Artificial Sequence: Synthetic Clostridium stercorarium DNA Polymerase R815G
atgaaatacctgctgccgaccgctgctgctggtctgctgctcctcgctgcccagccggcgatggccatggatccaaaaataatccttatagacggaaacagtattttaaaccgcggtttttatgccctgtcggggcgatccatgctgactacgtccacaggtctgtataccaatgcggttttcgcttttgtaaatatattgaacaaatatatcgaagaggaaaaccctgattatattgccgttgctttcgatcttagggcaaaaactttccggcacggtctatatgagggatacaaagcgcagcggaaaggcatgcccgatgaacttgcaatgcagatacccctcgcgaaggaagtactgagggcgatgaatattgccataatagagcatgaaggttatgaagccgacgatataatcggcagcctttcgttaaaggccgaaaaagagaattttgacgtaataatccttacgggggacagggattctttccagctgatcagcgacagggtgaaagttatcctgccttcgacgaaagccggaaaaacagagaccaacgtatatgataaacaggccatcattgacaaatacggagttttaccccatcagcttattgacgttaaaggcttaatgggagattcgtcagataatatacccggcgttccgggagtgggtgagaaaacggcgttaagccttatttcagcctacggtacactggaaggtgtttacgagcatattgatgaaataaaacagcctaagctgaaagcatcgctgattgaatataaggatcaggcgtttttaagccgtaagctgggtactattgtaagaaatctggagctgtgtgcttcgctggaggatctgaaaagaaaagaaataaaccgcaaagagcttttgaatgttttcagaaaactcgaatttgaaagtatcatatcaaaaatgaatcttgcttccgctgaggtgacagaattacctcccgcgccggaagagcttaaaataacccatatttcagcggcagaggatcttaagaaatggattgcttacctgcttaaccagaaaaacatttccgtccttcaactgattgaccgggaggattcatacagttcccgtctttcagggctggctttgtgcaccggggatgaggttttttatatcgagaccgggactgcactccccgagaatttgattgcaacagagctgaaagaactgtggcagaatgaaaatattcacaaaatcggacacaatataaaagaatttataacctggctgctgaaacacgatgttgaactgaacggcctttatttcgacactatgattgccgaatacctgatagattccataagaaacggctatcctatagcaagcctttctcacaaatacctgaatcgcagcgttccgtcgctggacgaacttttgggcaagggaaagggagcaaaaaagtactctgaaattccgcccgaaaggctgaaagattacagcgcttataacgtcaaagccatttttgacatatggccgatgcagaaaaaagttcttcaggaaaaccggcaggaggagctttttaatgacatagagcttcctcttataaccgtacttgccagtatggaataccacggtttcaaagttgacgccgcaaaacttcacgaatacggcgaagttcttctgtcacgcataaaagacctggaaaaggtaatttacatgctggccggtgaagaattcaacatcaattcaacgaagcagcttggtaccatattattcgaaaaactgaagcttcccgttgtaaaaagtacaaagaccggatactccaccgacgtcgaggttcttgaagagctttattacaagcatgatataataccatgcataatagaataccgccagcttacaaaactttacaccacctacgccgaaggtcttgaaaaagtgataaatcctgtaaccggtaaaattcattcaagttttaaccagacggttacggctacaggccgcatcagcagtaccgaaccaaatttacagaatatcccagtcagacacgaaatgggaagggaaatacggaaagcttttattccgtcgtcggaaaacgctgtttttgttgatgccgattattcacagatagagcttcgcgtgcttgcccatataacaggcgatgaagccctgataaatgctttcgttaagggggaagatattcatacggccacggcgtcgctggtatttgacgtagctcccgaagatgtgacgccggaactgcgcagaaaggcaaaagccgtaaatttcggcatagtgtacgggatcagtgattacgggctggcacgggatttgggaattacccggaaggaagcaaagcggtatatagacgactattttgccaaataccccaaagtaaaaacctatgtggatgaaattgtgcgggtcggccaggaacaggggtatgtggaaactctgttccacagaagaggttaccttcccgagcttgcatctaaaaattttcaccagcgttctttcggaaaaagggttgcaatgaatacgcccatacagggcactgcagccgatattattaaaattgcgatggtgaaggtatacaaggctttgaaagaatccggccttaaatccaggcttatcctccaggtccatgacgaacttgttattgagacttttgaagacgaactggagactgtcaaggaacttgtcaaaaagtgcatggaagaggccgttgaattgagtgtgccgcttgttgtcgacgtttcaatcgggaaaaactggtatgaagcctcctgatatggatcc

SEQ ID NO: 128 - DNA, 2772 bp, Artificial Sequence
  Description of Artificial Sequence: Synthetic Clostridium stercorarium DNA Polymerase R815H
atgaaatacctgctgccgaccgctgctgctggtctgctgctcctcgctgcccagccggcgatggccatggatccaaaaataatccttatagacggaaacagtattttaaaccgcggtttttatgccctgtcggggcgatccatgctgactacgtccacaggtctgtataccaatgcggttttcgcttttgtaaatatattgaacaaatatatcgaagaggaaaaccctgattatattgccgttgctttcgatcttagggcaaaaactttccggcacggtctatatgagggatacaaagcgcagcggaaaggcatgcccgatgaacttgcaatgcagatacccctcgcgaaggaagtactgagggcgatgaatattgccataatagagcatgaaggttatgaagccgacgatataatcggcagcctttcgttaaaggccgaaaaagagaattttgacgtaataatccttacgggggacagggattctttccagctgatcagcgacagggtgaaagttatcctgccttcgacgaaagccggaaaaacagagaccaacgtatatgataaacaggccatcattgacaaatacggagttttaccccatcagcttattgacgttaaaggcttaatgggagattcgtcagataatatacccggcgttccgggagtgggtgagaaaacggcgttaagccttatttcagcctacggtacactggaaggtgtttacgagcatattgatgaaataaaacagcctaagctgaaagcatcgctgattgaatataaggatcaggcgtttttaagccgtaagctgggtactattgtaagaaatctggagctgtgtgcttcgctggaggatctgaaaagaaaagaaataaaccgcaaagagcttttgaatgttttcagaaaactcgaatttgaaagtatcatatcaaaaatgaatcttgcttccgctgaggtgacagaattacctcccgcgccggaagagcttaaaataacccatatttcagcggcagaggatcttaagaaatggattgcttacctgcttaaccagaaaaacatttccgtccttcaactgattgaccgggaggattcatacagttcccgtctttcagggctggctttgtgcaccggggatgaggttttttatatcgagaccgggactgcactccccgagaatttgattgcaacagagctgaaagaactgtggcagaatgaaaatattcacaaaatcggacacaatataaaagaatttataacctggctgctgaaacacgatgttgaactgaacggcctttatttcgacactatgattgccgaatacctgatagattccataagaaacggctatcctatagcaagcctttctcacaaatacctgaatcgcagcgttccgtcgctggacgaacttttgggcaagggaaagggagcaaaaaagtactctgaaattccgcccgaaaggctgaaagattacagcgcttataacgtcaaagccatttttgacatatggccgatgcagaaaaaagttcttcaggaaaaccggcaggaggagctttttaatgacatagagcttcctcttataaccgtacttgccagtatggaataccacggtttcaaagttgacgccgcaaaacttcacgaatacggcgaagttcttctgtcacgcataaaagacctggaaaaggtaatttacatgctggccggtgaagaattcaacatcaattcaacgaagcagcttggtaccatattattcgaaaaactgaagcttcccgttgtaaaaagtacaaagaccggatactccaccgacgtcgaggttcttgaagagctttattacaagcatgatataataccatgcataatagaataccgccagcttacaaaactttacaccacctacgccgaaggtcttgaaaaagtgataaatcctgtaaccggtaaaattcattcaagttttaaccagacggttacggctacaggccgcatcagcagtaccgaaccaaatttacagaatatcccagtcagacacgaaatgggaagggaaatacggaaagcttttattccgtcgtcggaaaacgctgtttttgttgatgccgattattcacagatagagcttcgcgtgcttgcccatataacaggcgatgaagccctgataaatgctttcgttaagggggaagatattcatacggccacggcgtcgctggtatttgacgtagctcccgaagatgtgacgccggaactgcgcagaaaggcaaaagccgtaaatttcggcatagtgtacgggatcagtgattacgggctggcacgggatttgggaattacccggaaggaagcaaagcggtatatagacgactattttgccaaataccccaaagtaaaaacctatgtggatgaaattgtgcgggtcggccaggaacaggggtatgtggaaactctgttccacagaagacattaccttcccgagcttgcatctaaaaattttcaccagcgttctttcggaaaaagggttgcaatgaatacgcccatacagggcactgcagccgatattattaaaattgcgatggtgaaggtatacaaggctttgaaagaatccggccttaaatccaggcttatcctccaggtccatgacgaacttgttattgagacttttgaagacgaactggagactgtcaaggaacttgtcaaaaagtgcatggaagaggccgttgaattgagtgtgccgcttgttgtcgacgtttcaatcgggaaaaactggtatgaagcctcctgatatggatcc

SEQ ID NO: 129 - DNA, 2772 bp, Artificial Sequence
  Description of Artificial Sequence: Synthetic Clostridium stercorarium DNA Polymerase R815I
atgaaatacctgctgccgaccgctgctgctggtctgctgctcctcgctgcccagccggcgatggccatggatccaaaaataatccttatagacggaaacagtattttaaaccgcggtttttatgccctgtcggggcgatccatgctgactacgtccacaggtctgtataccaatgcggttttcgcttttgtaaatatattgaacaaatatatcgaagaggaaaaccctgattatattgccgttgctttcgatcttagggcaaaaactttccggcacggtctatatgagggatacaaagcgcagcggaaaggcatgcccgatgaacttgcaatgcagatacccctcgcgaaggaagtactgagggcgatgaatattgccataatagagcatgaaggttatgaagccgacgatataatcggcagcctttcgttaaaggccgaaaaagagaattttgacgtaataatccttacgggggacagggattctttccagctgatcagcgacagggtgaaagttatcctgccttcgacgaaagccggaaaaacagagaccaacgtatatgataaacaggccatcattgacaaatacggagttttaccccatcagcttattgacgttaaaggcttaatgggagattcgtcagataatatacccggcgttccgggagtgggtgagaaaacggcgttaagccttatttcagcctacggtacactggaaggtgtttacgagcatattgatgaaataaaacagcctaagctgaaagcatcgctgattgaatataaggatcaggcgtttttaagccgtaagctgggtactattgtaagaaatctggagctgtgtgcttcgctggaggatctgaaaagaaaagaaataaaccgcaaagagcttttgaatgttttcagaaaactcgaatttgaaagtatcatatcaaaaatgaatcttgcttccgctgaggtgacagaattacctcccgcgccggaagagcttaaaataacccatatttcagcggcagaggatcttaagaaatggattgcttacctgcttaaccagaaaaacatttccgtccttcaactgattgaccgggaggattcatacagttcccgtctttcagggctggctttgtgcaccggggatgaggttttttatatcgagaccgggactgcactccccgagaatttgattgcaacagagctgaaagaactgtggcagaatgaaaatattcacaaaatcggacacaatataaaagaatttataacctggctgctgaaacacgatgttgaactgaacggcctttatttcgacactatgattgccgaatacctgatagattccataagaaacggctatcctatagcaagcctttctcacaaatacctgaatcgcagcgttccgtcgctggacgaacttttgggcaagggaaagggagcaaaaaagtactctgaaattccgcccgaaaggctgaaagattacagcgcttataacgtcaaagccatttttgacatatggccgatgcagaaaaaagttcttcaggaaaaccggcaggaggagctttttaatgacatagagcttcctcttataaccgtacttgccagtatggaataccacggtttcaaagttgacgccgcaaaacttcacgaatacggcgaagttcttctgtcacgcataaaagacctggaaaaggtaatttacatgctggccggtgaagaattcaacatcaattcaacgaagcagcttggtaccatattattcgaaaaactgaagcttcccgttgtaaaaagtacaaagaccggatactccaccgacgtcgaggttcttgaagagctttattacaagcatgatataataccatgcataatagaataccgccagcttacaaaactttacaccacctacgccgaaggtcttgaaaaagtgataaatcctgtaaccggtaaaattcattcaagttttaaccagacggttacggctacaggccgcatcagcagtaccgaaccaaatttacagaatatcccagtcagacacgaaatgggaagggaaatacggaaagcttttattccgtcgtcggaaaacgctgtttttgttgatgccgattattcacagatagagcttcgcgtgcttgcccatataacaggcgatgaagccctgataaatgctttcgttaagggggaagatattcatacggccacggcgtcgctggtatttgacgtagctcccgaagatgtgacgccggaactgcgcagaaaggcaaaagccgtaaatttcggcatagtgtacgggatcagtgattacgggctggcacgggatttgggaattacccggaaggaagcaaagcggtatatagacgactattttgccaaataccccaaagtaaaaacctatgtggatgaaattgtgcgggtcggccaggaacaggggtatgtggaaactctgttccacagaagaatttaccttcccgagcttgcatctaaaaattttcaccagcgttctttcggaaaaagggttgcaatgaatacgcccatacagggcactgcagccgatattattaaaattgcgatggtgaaggtatacaaggctttgaaagaatccggccttaaatccaggcttatcctccaggtccatgacgaacttgttattgagacttttgaagacgaactggagactgtcaaggaacttgtcaaaaagtgcatggaagaggccgttgaattgagtgtgccgcttgttgtcgacgtttcaatcgggaaaaactggtatgaagcctcctgatatggatcc

SEQ ID NO: 130 - DNA, 2772 bp, Artificial Sequence
  Description of Artificial Sequence: Synthetic Clostridium stercorarium DNA Polymerase R815L
atgaaatacctgctgccgaccgctgctgctggtctgctgctcctcgctgcccagccggcgatggccatggatccaaaaataatccttatagacggaaacagtattttaaaccgcggtttttatgccctgtcggggcgatccatgctgactacgtccacaggtctgtataccaatgcggttttcgcttttgtaaatatattgaacaaatatatcgaagaggaaaaccctgattatattgccgttgctttcgatcttagggcaaaaactttccggcacggtctatatgagggatacaaagcgcagcggaaaggcatgcccgatgaacttgcaatgcagatacccctcgcgaaggaagtactgagggcgatgaatattgccataatagagcatgaaggttatgaagccgacgatataatcggcagcctttcgttaaaggccgaaaaagagaattttgacgtaataatccttacgggggacagggattctttccagctgatcagcgacagggtgaaagttatcctgccttcgacgaaagccggaaaaacagagaccaacgtatatgataaacaggccatcattgacaaatacggagttttaccccatcagcttattgacgttaaaggcttaatgggagattcgtcagataatatacccggcgttccgggagtgggtgagaaaacggcgttaagccttatttcagcctacggtacactggaaggtgtttacgagcatattgatgaaataaaacagcctaagctgaaagcatcgctgattgaatataaggatcaggcgtttttaagccgtaagctgggtactattgtaagaaatctggagctgtgtgcttcgctggaggatctgaaaagaaaagaaataaaccgcaaagagcttttgaatgttttcagaaaactcgaatttgaaagtatcatatcaaaaatgaatcttgcttccgctgaggtgacagaattacctcccgcgccggaagagcttaaaataacccatatttcagcggcagaggatcttaagaaatggattgcttacctgcttaaccagaaaaacatttccgtccttcaactgattgaccgggaggattcatacagttcccgtctttcagggctggctttgtgcaccggggatgaggttttttatatcgagaccgggactgcactccccgagaatttgattgcaacagagctgaaagaactgtggcagaatgaaaatattcacaaaatcggacacaatataaaagaatttataacctggctgctgaaacacgatgttgaactgaacggcctttatttcgacactatgattgccgaatacctgatagattccataagaaacggctatcctatagcaagcctttctcacaaatacctgaatcgcagcgttccgtcgctggacgaacttttgggcaagggaaagggagcaaaaaagtactctgaaattccgcccgaaaggctgaaagattacagcgcttataacgtcaaagccatttttgacatatggccgatgcagaaaaaagttcttcaggaaaaccggcaggaggagctttttaatgacatagagcttcctcttataaccgtacttgccagtatggaataccacggtttcaaagttgacgccgcaaaacttcacgaatacggcgaagttcttctgtcacgcataaaagacctggaaaaggtaatttacatgctggccggtgaagaattcaacatcaattcaacgaagcagcttggtaccatattattcgaaaaactgaagcttcccgttgtaaaaagtacaaagaccggatactccaccgacgtcgaggttcttgaagagctttattacaagcatgatataataccatgcataatagaataccgccagcttacaaaactttacaccacctacgccgaaggtcttgaaaaagtgataaatcctgtaaccggtaaaattcattcaagttttaaccagacggttacggctacaggccgcatcagcagtaccgaaccaaatttacagaatatcccagtcagacacgaaatgggaagggaaatacggaaagcttttattccgtcgtcggaaaacgctgtttttgttgatgccgattattcacagatagagcttcgcgtgcttgcccatataacaggcgatgaagccctgataaatgctttcgttaagggggaagatattcatacggccacggcgtcgctggtatttgacgtagctcccgaagatgtgacgccggaactgcgcagaaaggcaaaagccgtaaatttcggcatagtgtacgggatcagtgattacgggctggcacgggatttgggaattacccggaaggaagcaaagcggtatatagacgactattttgccaaataccccaaagtaaaaacctatgtggatgaaattgtgcgggtcggccaggaacaggggtatgtggaaactctgttccacagaagattataccttcccgagcttgcatctaaaaattttcaccagcgttctttcggaaaaagggttgcaatgaatacgcccatacagggcactgcagccgatattattaaaattgcgatggtgaaggtatacaaggctttgaaagaatccggccttaaatccaggcttatcctccaggtccatgacgaacttgttattgagacttttgaagacgaactggagactgtcaaggaacttgtcaaaaagtgcatggaagaggccgttgaattgagtgtgccgcttgttgtcgacgtttcaatcgggaaaaactggtatgaagcctcctgatatggatcc

SEQ ID NO: 131 - DNA, 2772 bp, Artificial Sequence
  Description of Artificial Sequence: Synthetic Clostridium stercorarium DNA Polymerase R815K
atgaaatacctgctgccgaccgctgctgctggtctgctgctcctcgctgcccagccggcgatggccatggatccaaaaataatccttatagacggaaacagtattttaaaccgcggtttttatgccctgtcggggcgatccatgctgactacgtccacaggtctgtataccaatgcggttttcgcttttgtaaatatattgaacaaatatatcgaagaggaaaaccctgattatattgccgttgctttcgatcttagggcaaaaactttccggcacggtctatatgagggatacaaagcgcagcggaaaggcatgcccgatgaacttgcaatgcagatacccctcgcgaaggaagtactgagggcgatgaatattgccataatagagcatgaaggttatgaagccgacgatataatcggcagcctttcgttaaaggccgaaaaagagaattttgacgtaataatccttacgggggacagggattctttccagctgatcagcgacagggtgaaagttatcctgccttcgacgaaagccggaaaaacagagaccaacgtatatgataaacaggccatcattgacaaatacggagttttaccccatcagcttattgacgttaaaggcttaatgggagattcgtcagataatatacccggcgttccgggagtgggtgagaaaacggcgttaagccttatttcagcctacggtacactggaaggtgtttacgagcatattgatgaaataaaacagcctaagctgaaagcatcgctgattgaatataaggatcaggcgtttttaagccgtaagctgggtactattgtaagaaatctggagctgtgtgcttcgctggaggatctgaaaagaaaagaaataaaccgcaaagagcttttgaatgttttcagaaaactcgaatttgaaagtatcatatcaaaaatgaatcttgcttccgctgaggtgacagaattacctcccgcgccggaagagcttaaaataacccatatttcagcggcagaggatcttaagaaatggattgcttacctgcttaaccagaaaaacatttccgtccttcaactgattgaccgggaggattcatacagttcccgtctttcagggctggctttgtgcaccggggatgaggttttttatatcgagaccgggactgcactccccgagaatttgattgcaacagagctgaaagaactgtggcagaatgaaaatattcacaaaatcggacacaatataaaagaatttataacctggctgctgaaacacgatgttgaactgaacggcctttatttcgacactatgattgccgaatacctgatagattccataagaaacggctatcctatagcaagcctttctcacaaatacctgaatcgcagcgttccgtcgctggacgaacttttgggcaagggaaagggagcaaaaaagtactctgaaattccgcccgaaaggctgaaagattacagcgcttataacgtcaaagccatttttgacatatggccgatgcagaaaaaagttcttcaggaaaaccggcaggaggagctttttaatgacatagagcttcctcttataaccgtacttgccagtatggaataccacggtttcaaagttgacgccgcaaaacttcacgaatacggcgaagttcttctgtcacgcataaaagacctggaaaaggtaatttacatgctggccggtgaagaattcaacatcaattcaacgaagcagcttggtaccatattattcgaaaaactgaagcttcccgttgtaaaaagtacaaagaccggatactccaccgacgtcgaggttcttgaagagctttattacaagcatgatataataccatgcataatagaataccgccagcttacaaaactttacaccacctacgccgaaggtcttgaaaaagtgataaatcctgtaaccggtaaaattcattcaagttttaaccagacggttacggctacaggccgcatcagcagtaccgaaccaaatttacagaatatcccagtcagacacgaaatgggaagggaaatacggaaagcttttattccgtcgtcggaaaacgctgtttttgttgatgccgattattcacagatagagcttcgcgtgcttgcccatataacaggcgatgaagccctgataaatgctttcgttaagggggaagatattcatacggccacggcgtcgctggtatttgacgtagctcccgaagatgtgacgccggaactgcgcagaaaggcaaaagccgtaaatttcggcatagtgtacgggatcagtgattacgggctggcacgggatttgggaattacccggaaggaagcaaagcggtatatagacgactattttgccaaataccccaaagtaaaaacctatgtggatgaaattgtgcgggtcggccaggaacaggggtatgtggaaactctgttccacagaagaaaataccttcccgagcttgcatctaaaaattttcaccagcgttctttcggaaaaagggttgcaatgaatacgcccatacagggcactgcagccgatattattaaaattgcgatggtgaaggtatacaaggctttgaaagaatccggccttaaatccaggcttatcctccaggtccatgacgaacttgttattgagacttttgaagacgaactggagactgtcaaggaacttgtcaaaaagtgcatggaagaggccgttgaattgagtgtgccgcttgttgtcgacgtttcaatcgggaaaaactggtatgaagcctcctgatatggatcc

SEQ ID NO: 132 - DNA, 2772 bp, Artificial Sequence
  Description of Artificial Sequence: Synthetic Clostridium stercorarium DNA Polymerase R815M
atgaaatacctgctgccgaccgctgctgctggtctgctgctcctcgctgcccagccggcgatggccatggatccaaaaataatccttatagacggaaacagtattttaaaccgcggtttttatgccctgtcggggcgatccatgctgactacgtccacaggtctgtataccaatgcggttttcgcttttgtaaatatattgaacaaatatatcgaagaggaaaaccctgattatattgccgttgctttcgatcttagggcaaaaactttccggcacggtctatatgagggatacaaagcgcagcggaaaggcatgcccgatgaacttgcaatgcagatacccctcgcgaaggaagtactgagggcgatgaatattgccataatagagcatgaaggttatgaagccgacgatataatcggcagcctttcgttaaaggccgaaaaagagaattttgacgtaataatccttacgggggacagggattctttccagctgatcagcgacagggtgaaagttatcctgccttcgacgaaagccggaaaaacagagaccaacgtatatgataaacaggccatcattgacaaatacggagttttaccccatcagcttattgacgttaaaggcttaatgggagattcgtcagataatatacccggcgttccgggagtgggtgagaaaacggcgttaagccttatttcagcctacggtacactggaaggtgtttacgagcatattgatgaaataaaacagcctaagctgaaagcatcgctgattgaatataaggatcaggcgtttttaagccgtaagctgggtactattgtaagaaatctggagctgtgtgcttcgctggaggatctgaaaagaaaagaaataaaccgcaaagagcttttgaatgttttcagaaaactcgaatttgaaagtatcatatcaaaaatgaatcttgcttccgctgaggtgacagaattacctcccgcgccggaagagcttaaaataacccatatttcagcggcagaggatcttaagaaatggattgcttacctgcttaaccagaaaaacatttccgtccttcaactgattgaccgggaggattcatacagttcccgtctttcagggctggctttgtgcaccggggatgaggttttttatatcgagaccgggactgcactccccgagaatttgattgcaacagagctgaaagaactgtggcagaatgaaaatattcacaaaatcggacacaatataaaagaatttataacctggctgctgaaacacgatgttgaactgaacggcctttatttcgacactatgattgccgaatacctgatagattccataagaaacggctatcctatagcaagcctttctcacaaatacctgaatcgcagcgttccgtcgctggacgaacttttgggcaagggaaagggagcaaaaaagtactctgaaattccgcccgaaaggctgaaagattacagcgcttataacgtcaaagccatttttgacatatggccgatgcagaaaaaagttcttcaggaaaaccggcaggaggagctttttaatgacatagagcttcctcttataaccgtacttgccagtatggaataccacggtttcaaagttgacgccgcaaaacttcacgaatacggcgaagttcttctgtcacgcataaaagacctggaaaaggtaatttacatgctggccggtgaagaattcaacatcaattcaacgaagcagcttggtaccatattattcgaaaaactgaagcttcccgttgtaaaaagtacaaagaccggatactccaccgacgtcgaggttcttgaagagctttattacaagcatgatataataccatgcataatagaataccgccagcttacaaaactttacaccacctacgccgaaggtcttgaaaaagtgataaatcctgtaaccggtaaaattcattcaagttttaaccagacggttacggctacaggccgcatcagcagtaccgaaccaaatttacagaatatcccagtcagacacgaaatgggaagggaaatacggaaagcttttattccgtcgtcggaaaacgctgtttttgttgatgccgattattcacagatagagcttcgcgtgcttgcccatataacaggcgatgaagccctgataaatgctttcgttaagggggaagatattcatacggccacggcgtcgctggtatttgacgtagctcccgaagatgtgacgccggaactgcgcagaaaggcaaaagccgtaaatttcggcatagtgtacgggatcagtgattacgggctggcacgggatttgggaattacccggaaggaagcaaagcggtatatagacgactattttgccaaataccccaaagtaaaaacctatgtggatgaaattgtgcgggtcggccaggaacaggggtatgtggaaactctgttccacagaagaatgtaccttcccgagcttgcatctaaaaattttcaccagcgttctttcggaaaaagggttgcaatgaatacgcccatacagggcactgcagccgatattattaaaattgcgatggtgaaggtatacaaggctttgaaagaatccggccttaaatccaggcttatcctccaggtccatgacgaacttgttattgagacttttgaagacgaactggagactgtcaaggaacttgtcaaaaagtgcatggaagaggccgttgaattgagtgtgccgcttgttgtcgacgtttcaatcgggaaaaactggtatgaagcctcctgatatggatcc

SEQ ID NO: 133 - DNA, 2772 bp, Artificial Sequence
  Description of Artificial Sequence: Synthetic Clostridium stercorarium DNA Polymerase R815F
atgaaatacctgctgccgaccgctgctgctggtctgctgctcctcgctgcccagccggcgatggccatggatccaaaaataatccttatagacggaaacagtattttaaaccgcggtttttatgccctgtcggggcgatccatgctgactacgtccacaggtctgtataccaatgcggttttcgcttttgtaaatatattgaacaaatatatcgaagaggaaaaccctgattatattgccgttgctttcgatcttagggcaaaaactttccggcacggtctatatgagggatacaaagcgcagcggaaaggcatgcccgatgaacttgcaatgcagatacccctcgcgaaggaagtactgagggcgatgaatattgccataatagagcatgaaggttatgaagccgacgatataatcggcagcctttcgttaaaggccgaaaaagagaattttgacgtaataatccttacgggggacagggattctttccagctgatcagcgacagggtgaaagttatcctgccttcgacgaaagccggaaaaacagagaccaacgtatatgataaacaggccatcattgacaaatacggagttttaccccatcagcttattgacgttaaaggcttaatgggagattcgtcagataatatacccggcgttccgggagtgggtgagaaaacggcgttaagccttatttcagcctacggtacactggaaggtgtttacgagcatattgatgaaataaaacagcctaagctgaaagcatcgctgattgaatataaggatcaggcgtttttaagccgtaagctgggtactattgtaagaaatctggagctgtgtgcttcgctggaggatctgaaaagaaaagaaataaaccgcaaagagcttttgaatgttttcagaaaactcgaatttgaaagtatcatatcaaaaatgaatcttgcttccgctgaggtgacagaattacctcccgcgccggaagagcttaaaataacccatatttcagcggcagaggatcttaagaaatggattgcttacctgcttaaccagaaaaacatttccgtccttcaactgattgaccgggaggattcatacagttcccgtctttcagggctggctttgtgcaccggggatgaggttttttatatcgagaccgggactgcactccccgagaatttgattgcaacagagctgaaagaactgtggcagaatgaaaatattcacaaaatcggacacaatataaaagaatttataacctggctgctgaaacacgatgttgaactgaacggcctttatttcgacactatgattgccgaatacctgatagattccataagaaacggctatcctatagcaagcctttctcacaaatacctgaatcgcagcgttccgtcgctggacgaacttttgggcaagggaaagggagcaaaaaagtactctgaaattccgcccgaaaggctgaaagattacagcgcttataacgtcaaagccatttttgacatatggccgatgcagaaaaaagttcttcaggaaaaccggcaggaggagctttttaatgacatagagcttcctcttataaccgtacttgccagtatggaataccacggtttcaaagttgacgccgcaaaacttcacgaatacggcgaagttcttctgtcacgcataaaagacctggaaaaggtaatttacatgctggccggtgaagaattcaacatcaattcaacgaagcagcttggtaccatattattcgaaaaactgaagcttcccgttgtaaaaagtacaaagaccggatactccaccgacgtcgaggttcttgaagagctttattacaagcatgatataataccatgcataatagaataccgccagcttacaaaactttacaccacctacgccgaaggtcttgaaaaagtgataaatcctgtaaccggtaaaattcattcaagttttaaccagacggttacggctacaggccgcatcagcagtaccgaaccaaatttacagaatatcccagtcagacacgaaatgggaagggaaatacggaaagcttttattccgtcgtcggaaaacgctgtttttgttgatgccgattattcacagatagagcttcgcgtgcttgcccatataacaggcgatgaagccctgataaatgctttcgttaagggggaagatattcatacggccacggcgtcgctggtatttgacgtagctcccgaagatgtgacgccggaactgcgcagaaaggcaaaagccgtaaatttcggcatagtgtacgggatcagtgattacgggctggcacgggatttgggaattacccggaaggaagcaaagcggtatatagacgactattttgccaaataccccaaagtaaaaacctatgtggatgaaattgtgcgggtcggccaggaacaggggtatgtggaaactctgttccacagaagattttaccttcccgagcttgcatctaaaaattttcaccagcgttctttcggaaaaagggttgcaatgaatacgcccatacagggcactgcagccgatattattaaaattgcgatggtgaaggtatacaaggctttgaaagaatccggccttaaatccaggcttatcctccaggtccatgacgaacttgttattgagacttttgaagacgaactggagactgtcaaggaacttgtcaaaaagtgcatggaagaggccgttgaattgagtgtgccgcttgttgtcgacgtttcaatcgggaaaaactggtatgaagcctcctgatatggatcc

SEQ ID NO: 134 - DNA, 2772 bp, Artificial Sequence
  Description of Artificial Sequence: Synthetic Clostridium stercorarium DNA Polymerase R815P
atgaaatacctgctgccgaccgctgctgctggtctgctgctcctcgctgcccagccggcgatggccatggatccaaaaataatccttatagacggaaacagtattttaaaccgcggtttttatgccctgtcggggcgatccatgctgactacgtccacaggtctgtataccaatgcggttttcgcttttgtaaatatattgaacaaatatatcgaagaggaaaaccctgattatattgccgttgctttcgatcttagggcaaaaactttccggcacggtctatatgagggatacaaagcgcagcggaaaggcatgcccgatgaacttgcaatgcagatacccctcgcgaaggaagtactgagggcgatgaatattgccataatagagcatgaaggttatgaagccgacgatataatcggcagcctttcgttaaaggccgaaaaagagaattttgacgtaataatccttacgggggacagggattctttccagctgatcagcgacagggtgaaagttatcctgccttcgacgaaagccggaaaaacagagaccaacgtatatgataaacaggccatcattgacaaatacggagttttaccccatcagcttattgacgttaaaggcttaatgggagattcgtcagataatatacccggcgttccgggagtgggtgagaaaacggcgttaagccttatttcagcctacggtacactggaaggtgtttacgagcatattgatgaaataaaacagcctaagctgaaagcatcgctgattgaatataaggatcaggcgtttttaagccgtaagctgggtactattgtaagaaatctggagctgtgtgcttcgctggaggatctgaaaagaaaagaaataaaccgcaaagagcttttgaatgttttcagaaaactcgaatttgaaagtatcatatcaaaaatgaatcttgcttccgctgaggtgacagaattacctcccgcgccggaagagcttaaaataacccatatttcagcggcagaggatcttaagaaatggattgcttacctgcttaaccagaaaaacatttccgtccttcaactgattgaccgggaggattcatacagttcccgtctttcagggctggctttgtgcaccggggatgaggttttttatatcgagaccgggactgcactccccgagaatttgattgcaacagagctgaaagaactgtggcagaatgaaaatattcacaaaatcggacacaatataaaagaatttataacctggctgctgaaacacgatgttgaactgaacggcctttatttcgacactatgattgccgaatacctgatagattccataagaaacggctatcctatagcaagcctttctcacaaatacctgaatcgcagcgttccgtcgctggacgaacttttgggcaagggaaagggagcaaaaaagtactctgaaattccgcccgaaaggctgaaagattacagcgcttataacgtcaaagccatttttgacatatggccgatgcagaaaaaagttcttcaggaaaaccggcaggaggagctttttaatgacatagagcttcctcttataaccgtacttgccagtatggaataccacggtttcaaagttgacgccgcaaaacttcacgaatacggcgaagttcttctgtcacgcataaaagacctggaaaaggtaatttacatgctggccggtgaagaattcaacatcaattcaacgaagcagcttggtaccatattattcgaaaaactgaagcttcccgttgtaaaaagtacaaagaccggatactccaccgacgtcgaggttcttgaagagctttattacaagcatgatataataccatgcataatagaataccgccagcttacaaaactttacaccacctacgccgaaggtcttgaaaaagtgataaatcctgtaaccggtaaaattcattcaagttttaaccagacggttacggctacaggccgcatcagcagtaccgaaccaaatttacagaatatcccagtcagacacgaaatgggaagggaaatacggaaagcttttattccgtcgtcggaaaacgctgtttttgttgatgccgattattcacagatagagcttcgcgtgcttgcccatataacaggcgatgaagccctgataaatgctttcgttaagggggaagatattcatacggccacggcgtcgctggtatttgacgtagctcccgaagatgtgacgccggaactgcgcagaaaggcaaaagccgtaaatttcggcatagtgtacgggatcagtgattacgggctggcacgggatttgggaattacccggaaggaagcaaagcggtatatagacgactattttgccaaataccccaaagtaaaaacctatgtggatgaaattgtgcgggtcggccaggaacaggggtatgtggaaactctgttccacagaagaccttaccttcccgagcttgcatctaaaaattttcaccagcgttctttcggaaaaagggttgcaatgaatacgcccatacagggcactgcagccgatattattaaaattgcgatggtgaaggtatacaaggctttgaaagaatccggccttaaatccaggcttatcctccaggtccatgacgaacttgttattgagacttttgaagacgaactggagactgtcaaggaacttgtcaaaaagtgcatggaagaggccgttgaattgagtgtgccgcttgttgtcgacgtttcaatcgggaaaaactggtatgaagcctcctgatatggatcc

SEQ ID NO: 135 - DNA, 2772 bp, Artificial Sequence
  Description of Artificial Sequence: Synthetic Clostridium stercorarium DNA Polymerase R815S
atgaaatacctgctgccgaccgctgctgctggtctgctgctcctcgctgcccagccggcgatggccatggatccaaaaataatccttatagacggaaacagtattttaaaccgcggtttttatgccctgtcggggcgatccatgctgactacgtccacaggtctgtataccaatgcggttttcgcttttgtaaatatattgaacaaatatatcgaagaggaaaaccctgattatattgccgttgctttcgatcttagggcaaaaactttccggcacggtctatatgagggatacaaagcgcagcggaaaggcatgcccgatgaacttgcaatgcagatacccctcgcgaaggaagtactgagggcgatgaatattgccataatagagcatgaaggttatgaagccgacgatataatcggcagcctttcgttaaaggccgaaaaagagaattttgacgtaataatccttacgggggacagggattctttccagctgatcagcgacagggtgaaagttatcctgccttcgacgaaagccggaaaaacagagaccaacgtatatgataaacaggccatcattgacaaatacggagttttaccccatcagcttattgacgttaaaggcttaatgggagattcgtcagataatatacccggcgttccgggagtgggtgagaaaacggcgttaagccttatttcagcctacggtacactggaaggtgtttacgagcatattgatgaaataaaacagcctaagctgaaagcatcgctgattgaatataaggatcaggcgtttttaagccgtaagctgggtactattgtaagaaatctggagctgtgtgcttcgctggaggatctgaaaagaaaagaaataaaccgcaaagagcttttgaatgttttcagaaaactcgaatttgaaagtatcatatcaaaaatgaatcttgcttccgctgaggtgacagaattacctcccgcgccggaagagcttaaaataacccatatttcagcggcagaggatcttaagaaatggattgcttacctgcttaaccagaaaaacatttccgtccttcaactgattgaccgggaggattcatacagttcccgtctttcagggctggctttgtgcaccggggatgaggttttttatatcgagaccgggactgcactccccgagaatttgattgcaacagagctgaaagaactgtggcagaatgaaaatattcacaaaatcggacacaatataaaagaatttataacctggctgctgaaacacgatgttgaactgaacggcctttatttcgacactatgattgccgaatacctgatagattccataagaaacggctatcctatagcaagcctttctcacaaatacctgaatcgcagcgttccgtcgctggacgaacttttgggcaagggaaagggagcaaaaaagtactctgaaattccgcccgaaaggctgaaagattacagcgcttataacgtcaaagccatttttgacatatggccgatgcagaaaaaagttcttcaggaaaaccggcaggaggagctttttaatgacatagagcttcctcttataaccgtacttgccagtatggaataccacggtttcaaagttgacgccgcaaaacttcacgaatacggcgaagttcttctgtcacgcataaaagacctggaaaaggtaatttacatgctggccggtgaagaattcaacatcaattcaacgaagcagcttggtaccatattattcgaaaaactgaagcttcccgttgtaaaaagtacaaagaccggatactccaccgacgtcgaggttcttgaagagctttattacaagcatgatataataccatgcataatagaataccgccagcttacaaaactttacaccacctacgccgaaggtcttgaaaaagtgataaatcctgtaaccggtaaaattcattcaagttttaaccagacggttacggctacaggccgcatcagcagtaccgaaccaaatttacagaatatcccagtcagacacgaaatgggaagggaaatacggaaagcttttattccgtcgtcggaaaacgctgtttttgttgatgccgattattcacagatagagcttcgcgtgcttgcccatataacaggcgatgaagccctgataaatgctttcgttaagggggaagatattcatacggccacggcgtcgctggtatttgacgtagctcccgaagatgtgacgccggaactgcgcagaaaggcaaaagccgtaaatttcggcatagtgtacgggatcagtgattacgggctggcacgggatttgggaattacccggaaggaagcaaagcggtatatagacgactattttgccaaataccccaaagtaaaaacctatgtggatgaaattgtgcgggtcggccaggaacaggggtatgtggaaactctgttccacagaagatcttaccttcccgagcttgcatctaaaaattttcaccagcgttctttcggaaaaagggttgcaatgaatacgcccatacagggcactgcagccgatattattaaaattgcgatggtgaaggtatacaaggctttgaaagaatccggccttaaatccaggcttatcctccaggtccatgacgaacttgttattgagacttttgaagacgaactggagactgtcaaggaacttgtcaaaaagtgcatggaagaggccgttgaattgagtgtgccgcttgttgtcgacgtttcaatcgggaaaaactggtatgaagcctcctgatatggatcc

SEQ ID NO: 136 - DNA, 2772 bp, Artificial Sequence
  Description of Artificial Sequence: Synthetic Clostridium stercorarium DNA Polymerase R815T
atgaaatacctgctgccgaccgctgctgctggtctgctgctcctcgctgcccagccggcgatggccatggatccaaaaataatccttatagacggaaacagtattttaaaccgcggtttttatgccctgtcggggcgatccatgctgactacgtccacaggtctgtataccaatgcggttttcgcttttgtaaatatattgaacaaatatatcgaagaggaaaaccctgattatattgccgttgctttcgatcttagggcaaaaactttccggcacggtctatatgagggatacaaagcgcagcggaaaggcatgcccgatgaacttgcaatgcagatacccctcgcgaaggaagtactgagggcgatgaatattgccataatagagcatgaaggttatgaagccgacgatataatcggcagcctttcgttaaaggccgaaaaagagaattttgacgtaataatccttacgggggacagggattctttccagctgatcagcgacagggtgaaagttatcctgccttcgacgaaagccggaaaaacagagaccaacgtatatgataaacaggccatcattgacaaatacggagttttaccccatcagcttattgacgttaaaggcttaatgggagattcgtcagataatatacccggcgttccgggagtgggtgagaaaacggcgttaagccttatttcagcctacggtacactggaaggtgtttacgagcatattgatgaaataaaacagcctaagctgaaagcatcgctgattgaatataaggatcaggcgtttttaagccgtaagctgggtactattgtaagaaatctggagctgtgtgcttcgctggaggatctgaaaagaaaagaaataaaccgcaaagagcttttgaatgttttcagaaaactcgaatttgaaagtatcatatcaaaaatgaatcttgcttccgctgaggtgacagaattacctcccgcgccggaagagcttaaaataacccatatttcagcggcagaggatcttaagaaatggattgcttacctgcttaaccagaaaaacatttccgtccttcaactgattgaccgggaggattcatacagttcccgtctttcagggctggctttgtgcaccggggatgaggttttttatatcgagaccgggactgcactccccgagaatttgattgcaacagagctgaaagaactgtggcagaatgaaaatattcacaaaatcggacacaatataaaagaatttataacctggctgctgaaacacgatgttgaactgaacggcctttatttcgacactatgattgccgaatacctgatagattccataagaaacggctatcctatagcaagcctttctcacaaatacctgaatcgcagcgttccgtcgctggacgaacttttgggcaagggaaagggagcaaaaaagtactctgaaattccgcccgaaaggctgaaagattacagcgcttataacgtcaaagccatttttgacatatggccgatgcagaaaaaagttcttcaggaaaaccggcaggaggagctttttaatgacatagagcttcctcttataaccgtacttgccagtatggaataccacggtttcaaagttgacgccgcaaaacttcacgaatacggcgaagttcttctgtcacgcataaaagacctggaaaaggtaatttacatgctggccggtgaagaattcaacatcaattcaacgaagcagcttggtaccatattattcgaaaaactgaagcttcccgttgtaaaaagtacaaagaccggatactccaccgacgtcgaggttcttgaagagctttattacaagcatgatataataccatgcataatagaataccgccagcttacaaaactttacaccacctacgccgaaggtcttgaaaaagtgataaatcctgtaaccggtaaaattcattcaagttttaaccagacggttacggctacaggccgcatcagcagtaccgaaccaaatttacagaatatcccagtcagacacgaaatgggaagggaaatacggaaagcttttattccgtcgtcggaaaacgctgtttttgttgatgccgattattcacagatagagcttcgcgtgcttgcccatataacaggcgatgaagccctgataaatgctttcgttaagggggaagatattcatacggccacggcgtcgctggtatttgacgtagctcccgaagatgtgacgccggaactgcgcagaaaggcaaaagccgtaaatttcggcatagtgtacgggatcagtgattacgggctggcacgggatttgggaattacccggaaggaagcaaagcggtatatagacgactattttgccaaataccccaaagtaaaaacctatgtggatgaaattgtgcgggtcggccaggaacaggggtatgtggaaactctgttccacagaagaacttaccttcccgagcttgcatctaaaaattttcaccagcgttctttcggaaaaagggttgcaatgaatacgcccatacagggcactgcagccgatattattaaaattgcgatggtgaaggtatacaaggctttgaaagaatccggccttaaatccaggcttatcctccaggtccatgacgaacttgttattgagacttttgaagacgaactggagactgtcaaggaacttgtcaaaaagtgcatggaagaggccgttgaattgagtgtgccgcttgttgtcgacgtttcaatcgggaaaaactggtatgaagcctcctgatatggatcc

SEQ ID NO: 137 - DNA, 2772 bp, Artificial Sequence
  Description of Artificial Sequence: Synthetic Clostridium stercorarium DNA Polymerase R815W
atgaaatacctgctgccgaccgctgctgctggtctgctgctcctcgctgcccagccggcgatggccatggatccaaaaataatccttatagacggaaacagtattttaaaccgcggtttttatgccctgtcggggcgatccatgctgactacgtccacaggtctgtataccaatgcggttttcgcttttgtaaatatattgaacaaatatatcgaagaggaaaaccctgattatattgccgttgctttcgatcttagggcaaaaactttccggcacggtctatatgagggatacaaagcgcagcggaaaggcatgcccgatgaacttgcaatgcagatacccctcgcgaaggaagtactgagggcgatgaatattgccataatagagcatgaaggttatgaagccgacgatataatcggcagcctttcgttaaaggccgaaaaagagaattttgacgtaataatccttacgggggacagggattctttccagctgatcagcgacagggtgaaagttatcctgccttcgacgaaagccggaaaaacagagaccaacgtatatgataaacaggccatcattgacaaatacggagttttaccccatcagcttattgacgttaaaggcttaatgggagattcgtcagataatatacccggcgttccgggagtgggtgagaaaacggcgttaagccttatttcagcctacggtacactggaaggtgtttacgagcatattgatgaaataaaacagcctaagctgaaagcatcgctgattgaatataaggatcaggcgtttttaagccgtaagctgggtactattgtaagaaatctggagctgtgtgcttcgctggaggatctgaaaagaaaagaaataaaccgcaaagagcttttgaatgttttcagaaaactcgaatttgaaagtatcatatcaaaaatgaatcttgcttccgctgaggtgacagaattacctcccgcgccggaagagcttaaaataacccatatttcagcggcagaggatcttaagaaatggattgcttacctgcttaaccagaaaaacatttccgtccttcaactgattgaccgggaggattcatacagttcccgtctttcagggctggctttgtgcaccggggatgaggttttttatatcgagaccgggactgcactccccgagaatttgattgcaacagagctgaaagaactgtggcagaatgaaaatattcacaaaatcggacacaatataaaagaatttataacctggctgctgaaacacgatgttgaactgaacggcctttatttcgacactatgattgccgaatacctgatagattccataagaaacggctatcctatagcaagcctttctcacaaatacctgaatcgcagcgttccgtcgctggacgaacttttgggcaagggaaagggagcaaaaaagtactctgaaattccgcccgaaaggctgaaagattacagcgcttataacgtcaaagccatttttgacatatggccgatgcagaaaaaagttcttcaggaaaaccggcaggaggagctttttaatgacatagagcttcctcttataaccgtacttgccagtatggaataccacggtttcaaagttgacgccgcaaaacttcacgaatacggcgaagttcttctgtcacgcataaaagacctggaaaaggtaatttacatgctggccggtgaagaattcaacatcaattcaacgaagcagcttggtaccatattattcgaaaaactgaagcttcccgttgtaaaaagtacaaagaccggatactccaccgacgtcgaggttcttgaagagctttattacaagcatgatataataccatgcataatagaataccgccagcttacaaaactttacaccacctacgccgaaggtcttgaaaaagtgataaatcctgtaaccggtaaaattcattcaagttttaaccagacggttacggctacaggccgcatcagcagtaccgaaccaaatttacagaatatcccagtcagacacgaaatgggaagggaaatacggaaagcttttattccgtcgtcggaaaacgctgtttttgttgatgccgattattcacagatagagcttcgcgtgcttgcccatataacaggcgatgaagccctgataaatgctttcgttaagggggaagatattcatacggccacggcgtcgctggtatttgacgtagctcccgaagatgtgacgccggaactgcgcagaaaggcaaaagccgtaaatttcggcatagtgtacgggatcagtgattacgggctggcacgggatttgggaattacccggaaggaagcaaagcggtatatagacgactattttgccaaataccccaaagtaaaaacctatgtggatgaaattgtgcgggtcggccaggaacaggggtatgtggaaactctgttccacagaagatggtaccttcccgagcttgcatctaaaaattttcaccagcgttctttcggaaaaagggttgcaatgaatacgcccatacagggcactgcagccgatattattaaaattgcgatggtgaaggtatacaaggctttgaaagaatccggccttaaatccaggcttatcctccaggtccatgacgaacttgttattgagacttttgaagacgaactggagactgtcaaggaacttgtcaaaaagtgcatggaagaggccgttgaattgagtgtgccgcttgttgtcgacgtttcaatcgggaaaaactggtatgaagcctcctgatatggatcc

SEQ ID NO: 138 - DNA, 2772 bp, Artificial Sequence
  Description of Artificial Sequence: Synthetic Clostridium stercorarium DNA Polymerase R815Y
atgaaatacctgctgccgaccgctgctgctggtctgctgctcctcgctgcccagccggcgatggccatggatccaaaaataatccttatagacggaaacagtattttaaaccgcggtttttatgccctgtcggggcgatccatgctgactacgtccacaggtctgtataccaatgcggttttcgcttttgtaaatatattgaacaaatatatcgaagaggaaaaccctgattatattgccgttgctttcgatcttagggcaaaaactttccggcacggtctatatgagggatacaaagcgcagcggaaaggcatgcccgatgaacttgcaatgcagatacccctcgcgaaggaagtactgagggcgatgaatattgccataatagagcatgaaggttatgaagccgacgatataatcggcagcctttcgttaaaggccgaaaaagagaattttgacgtaataatccttacgggggacagggattctttccagctgatcagcgacagggtgaaagttatcctgccttcgacgaaagccggaaaaacagagaccaacgtatatgataaacaggccatcattgacaaatacggagttttaccccatcagcttattgacgttaaaggcttaatgggagattcgtcagataatatacccggcgttccgggagtgggtgagaaaacggcgttaagccttatttcagcctacggtacactggaaggtgtttacgagcatattgatgaaataaaacagcctaagctgaaagcatcgctgattgaatataaggatcaggcgtttttaagccgtaagctgggtactattgtaagaaatctggagctgtgtgcttcgctggaggatctgaaaagaaaagaaataaaccgcaaagagcttttgaatgttttcagaaaactcgaatttgaaagtatcatatcaaaaatgaatcttgcttccgctgaggtgacagaattacctcccgcgccggaagagcttaaaataacccatatttcagcggcagaggatcttaagaaatggattgcttacctgcttaaccagaaaaacatttccgtccttcaactgattgaccgggaggattcatacagttcccgtctttcagggctggctttgtgcaccggggatgaggttttttatatcgagaccgggactgcactccccgagaatttgattgcaacagagctgaaagaactgtggcagaatgaaaatattcacaaaatcggacacaatataaaagaatttataacctggctgctgaaacacgatgttgaactgaacggcctttatttcgacactatgattgccgaatacctgatagattccataagaaacggctatcctatagcaagcctttctcacaaatacctgaatcgcagcgttccgtcgctggacgaacttttgggcaagggaaagggagcaaaaaagtactctgaaattccgcccgaaaggctgaaagattacagcgcttataacgtcaaagccatttttgacatatggccgatgcagaaaaaagttcttcaggaaaaccggcaggaggagctttttaatgacatagagcttcctcttataaccgtacttgccagtatggaataccacggtttcaaagttgacgccgcaaaacttcacgaatacggcgaagttcttctgtcacgcataaaagacctggaaaaggtaatttacatgctggccggtgaagaattcaacatcaattcaacgaagcagcttggtaccatattattcgaaaaactgaagcttcccgttgtaaaaagtacaaagaccggatactccaccgacgtcgaggttcttgaagagctttattacaagcatgatataataccatgcataatagaataccgccagcttacaaaactttacaccacctacgccgaaggtcttgaaaaagtgataaatcctgtaaccggtaaaattcattcaagttttaaccagacggttacggctacaggccgcatcagcagtaccgaaccaaatttacagaatatcccagtcagacacgaaatgggaagggaaatacggaaagcttttattccgtcgtcggaaaacgctgtttttgttgatgccgattattcacagatagagcttcgcgtgcttgcccatataacaggcgatgaagccctgataaatgctttcgttaagggggaagatattcatacggccacggcgtcgctggtatttgacgtagctcccgaagatgtgacgccggaactgcgcagaaaggcaaaagccgtaaatttcggcatagtgtacgggatcagtgattacgggctggcacgggatttgggaattacccggaaggaagcaaagcggtatatagacgactattttgccaaataccccaaagtaaaaacctatgtggatgaaattgtgcgggtcggccaggaacaggggtatgtggaaactctgttccacagaagatattaccttcccgagcttgcatctaaaaattttcaccagcgttctttcggaaaaagggttgcaatgaatacgcccatacagggcactgcagccgatattattaaaattgcgatggtgaaggtatacaaggctttgaaagaatccggccttaaatccaggcttatcctccaggtccatgacgaacttgttattgagacttttgaagacgaactggagactgtcaaggaacttgtcaaaaagtgcatggaagaggccgttgaattgagtgtgccgcttgttgtcgacgtttcaatcgggaaaaactggtatgaagcctcctgatatggatcc

SEQ ID NO: 139 - DNA, 2772 bp, Artificial Sequence
  Description of Artificial Sequence: Synthetic Clostridium stercorarium DNA Polymerase R815V
atgaaatacctgctgccgaccgctgctgctggtctgctgctcctcgctgcccagccggcgatggccatggatccaaaaataatccttatagacggaaacagtattttaaaccgcggtttttatgccctgtcggggcgatccatgctgactacgtccacaggtctgtataccaatgcggttttcgcttttgtaaatatattgaacaaatatatcgaagaggaaaaccctgattatattgccgttgctttcgatcttagggcaaaaactttccggcacggtctatatgagggatacaaagcgcagcggaaaggcatgcccgatgaacttgcaatgcagatacccctcgcgaaggaagtactgagggcgatgaatattgccataatagagcatgaaggttatgaagccgacgatataatcggcagcctttcgttaaaggccgaaaaagagaattttgacgtaataatccttacgggggacagggattctttccagctgatcagcgacagggtgaaagttatcctgccttcgacgaaagccggaaaaacagagaccaacgtatatgataaacaggccatcattgacaaatacggagttttaccccatcagcttattgacgttaaaggcttaatgggagattcgtcagataatatacccggcgttccgggagtgggtgagaaaacggcgttaagccttatttcagcctacggtacactggaaggtgtttacgagcatattgatgaaataaaacagcctaagctgaaagcatcgctgattgaatataaggatcaggcgtttttaagccgtaagctgggtactattgtaagaaatctggagctgtgtgcttcgctggaggatctgaaaagaaaagaaataaaccgcaaagagcttttgaatgttttcagaaaactcgaatttgaaagtatcatatcaaaaatgaatcttgcttccgctgaggtgacagaattacctcccgcgccggaagagcttaaaataacccatatttcagcggcagaggatcttaagaaatggattgcttacctgcttaaccagaaaaacatttccgtccttcaactgattgaccgggaggattcatacagttcccgtctttcagggctggctttgtgcaccggggatgaggttttttatatcgagaccgggactgcactccccgagaatttgattgcaacagagctgaaagaactgtggcagaatgaaaatattcacaaaatcggacacaatataaaagaatttataacctggctgctgaaacacgatgttgaactgaacggcctttatttcgacactatgattgccgaatacctgatagattccataagaaacggctatcctatagcaagcctttctcacaaatacctgaatcgcagcgttccgtcgctggacgaacttttgggcaagggaaagggagcaaaaaagtactctgaaattccgcccgaaaggctgaaagattacagcgcttataacgtcaaagccatttttgacatatggccgatgcagaaaaaagttcttcaggaaaaccggcaggaggagctttttaatgacatagagcttcctcttataaccgtacttgccagtatggaataccacggtttcaaagttgacgccgcaaaacttcacgaatacggcgaagttcttctgtcacgcataaaagacctggaaaaggtaatttacatgctggccggtgaagaattcaacatcaattcaacgaagcagcttggtaccatattattcgaaaaactgaagcttcccgttgtaaaaagtacaaagaccggatactccaccgacgtcgaggttcttgaagagctttattacaagcatgatataataccatgcataatagaataccgccagcttacaaaactttacaccacctacgccgaaggtcttgaaaaagtgataaatcctgtaaccggtaaaattcattcaagttttaaccagacggttacggctacaggccgcatcagcagtaccgaaccaaatttacagaatatcccagtcagacacgaaatgggaagggaaatacggaaagcttttattccgtcgtcggaaaacgctgtttttgttgatgccgattattcacagatagagcttcgcgtgcttgcccatataacaggcgatgaagccctgataaatgctttcgttaagggggaagatattcatacggccacggcgtcgctggtatttgacgtagctcccgaagatgtgacgccggaactgcgcagaaaggcaaaagccgtaaatttcggcatagtgtacgggatcagtgattacgggctggcacgggatttgggaattacccggaaggaagcaaagcggtatatagacgactattttgccaaataccccaaagtaaaaacctatgtggatgaaattgtgcgggtcggccaggaacaggggtatgtggaaactctgttccacagaagagtttaccttcccgagcttgcatctaaaaattttcaccagcgttctttcggaaaaagggttgcaatgaatacgcccatacagggcactgcagccgatattattaaaattgcgatggtgaaggtatacaaggctttgaaagaatccggccttaaatccaggcttatcctccaggtccatgacgaacttgttattgagacttttgaagacgaactggagactgtcaaggaacttgtcaaaaagtgcatggaagaggccgttgaattgagtgtgccgcttgttgtcgacgtttcaatcgggaaaaactggtatgaagcctcctgatatggatcc

SEQ ID NO: 140 - DNA, 2772 bp, Artificial Sequence
  Description of Artificial Sequence: Synthetic Clostridium stercorarium DNA Polymerase Y816A
atgaaatacctgctgccgaccgctgctgctggtctgctgctcctcgctgcccagccggcgatggccatggatccaaaaataatccttatagacggaaacagtattttaaaccgcggtttttatgccctgtcggggcgatccatgctgactacgtccacaggtctgtataccaatgcggttttcgcttttgtaaatatattgaacaaatatatcgaagaggaaaaccctgattatattgccgttgctttcgatcttagggcaaaaactttccggcacggtctatatgagggatacaaagcgcagcggaaaggcatgcccgatgaacttgcaatgcagatacccctcgcgaaggaagtactgagggcgatgaatattgccataatagagcatgaaggttatgaagccgacgatataatcggcagcctttcgttaaaggccgaaaaagagaattttgacgtaataatccttacgggggacagggattctttccagctgatcagcgacagggtgaaagttatcctgccttcgacgaaagccggaaaaacagagaccaacgtatatgataaacaggccatcattgacaaatacggagttttaccccatcagcttattgacgttaaaggcttaatgggagattcgtcagataatatacccggcgttccgggagtgggtgagaaaacggcgttaagccttatttcagcctacggtacactggaaggtgtttacgagcatattgatgaaataaaacagcctaagctgaaagcatcgctgattgaatataaggatcaggcgtttttaagccgtaagctgggtactattgtaagaaatctggagctgtgtgcttcgctggaggatctgaaaagaaaagaaataaaccgcaaagagcttttgaatgttttcagaaaactcgaatttgaaagtatcatatcaaaaatgaatcttgcttccgctgaggtgacagaattacctcccgcgccggaagagcttaaaataacccatatttcagcggcagaggatcttaagaaatggattgcttacctgcttaaccagaaaaacatttccgtccttcaactgattgaccgggaggattcatacagttcccgtctttcagggctggctttgtgcaccggggatgaggttttttatatcgagaccgggactgcactccccgagaatttgattgcaacagagctgaaagaactgtggcagaatgaaaatattcacaaaatcggacacaatataaaagaatttataacctggctgctgaaacacgatgttgaactgaacggcctttatttcgacactatgattgccgaatacctgatagattccataagaaacggctatcctatagcaagcctttctcacaaatacctgaatcgcagcgttccgtcgctggacgaacttttgggcaagggaaagggagcaaaaaagtactctgaaattccgcccgaaaggctgaaagattacagcgcttataacgtcaaagccatttttgacatatggccgatgcagaaaaaagttcttcaggaaaaccggcaggaggagctttttaatgacatagagcttcctcttataaccgtacttgccagtatggaataccacggtttcaaagttgacgccgcaaaacttcacgaatacggcgaagttcttctgtcacgcataaaagacctggaaaaggtaatttacatgctggccggtgaagaattcaacatcaattcaacgaagcagcttggtaccatattattcgaaaaactgaagcttcccgttgtaaaaagtacaaagaccggatactccaccgacgtcgaggttcttgaagagctttattacaagcatgatataataccatgcataatagaataccgccagcttacaaaactttacaccacctacgccgaaggtcttgaaaaagtgataaatcctgtaaccggtaaaattcattcaagttttaaccagacggttacggctacaggccgcatcagcagtaccgaaccaaatttacagaatatcccagtcagacacgaaatgggaagggaaatacggaaagcttttattccgtcgtcggaaaacgctgtttttgttgatgccgattattcacagatagagcttcgcgtgcttgcccatataacaggcgatgaagccctgataaatgctttcgttaagggggaagatattcatacggccacggcgtcgctggtatttgacgtagctcccgaagatgtgacgccggaactgcgcagaaaggcaaaagccgtaaatttcggcatagtgtacgggatcagtgattacgggctggcacgggatttgggaattacccggaaggaagcaaagcggtatatagacgactattttgccaaataccccaaagtaaaaacctatgtggatgaaattgtgcgggtcggccaggaacaggggtatgtggaaactctgttccacagaagaagagctcttcccgagcttgcatctaaaaattttcaccagcgttctttcggaaaaagggttgcaatgaatacgcccatacagggcactgcagccgatattattaaaattgcgatggtgaaggtatacaaggctttgaaagaatccggccttaaatccaggcttatcctccaggtccatgacgaacttgttattgagacttttgaagacgaactggagactgtcaaggaacttgtcaaaaagtgcatggaagaggccgttgaattgagtgtgccgcttgttgtcgacgtttcaatcgggaaaaactggtatgaagcctcctgatatggatcc

SEQ ID NO: 141 - DNA, 2772 bp, Artificial Sequence
  Description of Artificial Sequence: Synthetic Clostridium stercorarium DNA Polymerase Y816R
atgaaatacctgctgccgaccgctgctgctggtctgctgctcctcgctgcccagccggcgatggccatggatccaaaaataatccttatagacggaaacagtattttaaaccgcggtttttatgccctgtcggggcgatccatgctgactacgtccacaggtctgtataccaatgcggttttcgcttttgtaaatatattgaacaaatatatcgaagaggaaaaccctgattatattgccgttgctttcgatcttagggcaaaaactttccggcacggtctatatgagggatacaaagcgcagcggaaaggcatgcccgatgaacttgcaatgcagatacccctcgcgaaggaagtactgagggcgatgaatattgccataatagagcatgaaggttatgaagccgacgatataatcggcagcctttcgttaaaggccgaaaaagagaattttgacgtaataatccttacgggggacagggattctttccagctgatcagcgacagggtgaaagttatcctgccttcgacgaaagccggaaaaacagagaccaacgtatatgataaacaggccatcattgacaaatacggagttttaccccatcagcttattgacgttaaaggcttaatgggagattcgtcagataatatacccggcgttccgggagtgggtgagaaaacggcgttaagccttatttcagcctacggtacactggaaggtgtttacgagcatattgatgaaataaaacagcctaagctgaaagcatcgctgattgaatataaggatcaggcgtttttaagccgtaagctgggtactattgtaagaaatctggagctgtgtgcttcgctggaggatctgaaaagaaaagaaataaaccgcaaagagcttttgaatgttttcagaaaactcgaatttgaaagtatcatatcaaaaatgaatcttgcttccgctgaggtgacagaattacctcccgcgccggaagagcttaaaataacccatatttcagcggcagaggatcttaagaaatggattgcttacctgcttaaccagaaaaacatttccgtccttcaactgattgaccgggaggattcatacagttcccgtctttcagggctggctttgtgcaccggggatgaggttttttatatcgagaccgggactgcactccccgagaatttgattgcaacagagctgaaagaactgtggcagaatgaaaatattcacaaaatcggacacaatataaaagaatttataacctggctgctgaaacacgatgttgaactgaacggcctttatttcgacactatgattgccgaatacctgatagattccataagaaacggctatcctatagcaagcctttctcacaaatacctgaatcgcagcgttccgtcgctggacgaacttttgggcaagggaaagggagcaaaaaagtactctgaaattccgcccgaaaggctgaaagattacagcgcttataacgtcaaagccatttttgacatatggccgatgcagaaaaaagttcttcaggaaaaccggcaggaggagctttttaatgacatagagcttcctcttataaccgtacttgccagtatggaataccacggtttcaaagttgacgccgcaaaacttcacgaatacggcgaagttcttctgtcacgcataaaagacctggaaaaggtaatttacatgctggccggtgaagaattcaacatcaattcaacgaagcagcttggtaccatattattcgaaaaactgaagcttcccgttgtaaaaagtacaaagaccggatactccaccgacgtcgaggttcttgaagagctttattacaagcatgatataataccatgcataatagaataccgccagcttacaaaactttacaccacctacgccgaaggtcttgaaaaagtgataaatcctgtaaccggtaaaattcattcaagttttaaccagacggttacggctacaggccgcatcagcagtaccgaaccaaatttacagaatatcccagtcagacacgaaatgggaagggaaatacggaaagcttttattccgtcgtcggaaaacgctgtttttgttgatgccgattattcacagatagagcttcgcgtgcttgcccatataacaggcgatgaagccctgataaatgctttcgttaagggggaagatattcatacggccacggcgtcgctggtatttgacgtagctcccgaagatgtgacgccggaactgcgcagaaaggcaaaagccgtaaatttcggcatagtgtacgggatcagtgattacgggctggcacgggatttgggaattacccggaaggaagcaaagcggtatatagacgactattttgccaaataccccaaagtaaaaacctatgtggatgaaattgtgcgggtcggccaggaacaggggtatgtggaaactctgttccacagaagaagacgtcttcccgagcttgcatctaaaaattttcaccagcgttctttcggaaaaagggttgcaatgaatacgcccatacagggcactgcagccgatattattaaaattgcgatggtgaaggtatacaaggctttgaaagaatccggccttaaatccaggcttatcctccaggtccatgacgaacttgttattgagacttttgaagacgaactggagactgtcaaggaacttgtcaaaaagtgcatggaagaggccgttgaattgagtgtgccgcttgttgtcgacgtttcaatcgggaaaaactggtatgaagcctcctgatatggatcc

SEQ ID NO: 142 - DNA, 2772 bp, Artificial Sequence
  Description of Artificial Sequence: Synthetic Clostridium stercorarium DNA Polymerase Y816N
atgaaatacctgctgccgaccgctgctgctggtctgctgctcctcgctgcccagccggcgatggccatggatccaaaaataatccttatagacggaaacagtattttaaaccgcggtttttatgccctgtcggggcgatccatgctgactacgtccacaggtctgtataccaatgcggttttcgcttttgtaaatatattgaacaaatatatcgaagaggaaaaccctgattatattgccgttgctttcgatcttagggcaaaaactttccggcacggtctatatgagggatacaaagcgcagcggaaaggcatgcccgatgaacttgcaatgcagatacccctcgcgaaggaagtactgagggcgatgaatattgccataatagagcatgaaggttatgaagccgacgatataatcggcagcctttcgttaaaggccgaaaaagagaattttgacgtaataatccttacgggggacagggattctttccagctgatcagcgacagggtgaaagttatcctgccttcgacgaaagccggaaaaacagagaccaacgtatatgataaacaggccatcattgacaaatacggagttttaccccatcagcttattgacgttaaaggcttaatgggagattcgtcagataatatacccggcgttccgggagtgggtgagaaaacggcgttaagccttatttcagcctacggtacactggaaggtgtttacgagcatattgatgaaataaaacagcctaagctgaaagcatcgctgattgaatataaggatcaggcgtttttaagccgtaagctgggtactattgtaagaaatctggagctgtgtgcttcgctggaggatctgaaaagaaaagaaataaaccgcaaagagcttttgaatgttttcagaaaactcgaatttgaaagtatcatatcaaaaatgaatcttgcttccgctgaggtgacagaattacctcccgcgccggaagagcttaaaataacccatatttcagcggcagaggatcttaagaaatggattgcttacctgcttaaccagaaaaacatttccgtccttcaactgattgaccgggaggattcatacagttcccgtctttcagggctggctttgtgcaccggggatgaggttttttatatcgagaccgggactgcactccccgagaatttgattgcaacagagctgaaagaactgtggcagaatgaaaatattcacaaaatcggacacaatataaaagaatttataacctggctgctgaaacacgatgttgaactgaacggcctttatttcgacactatgattgccgaatacctgatagattccataagaaacggctatcctatagcaagcctttctcacaaatacctgaatcgcagcgttccgtcgctggacgaacttttgggcaagggaaagggagcaaaaaagtactctgaaattccgcccgaaaggctgaaagattacagcgcttataacgtcaaagccatttttgacatatggccgatgcagaaaaaagttcttcaggaaaaccggcaggaggagctttttaatgacatagagcttcctcttataaccgtacttgccagtatggaataccacggtttcaaagttgacgccgcaaaacttcacgaatacggcgaagttcttctgtcacgcataaaagacctggaaaaggtaatttacatgctggccggtgaagaattcaacatcaattcaacgaagcagcttggtaccatattattcgaaaaactgaagcttcccgttgtaaaaagtacaaagaccggatactccaccgacgtcgaggttcttgaagagctttattacaagcatgatataataccatgcataatagaataccgccagcttacaaaactttacaccacctacgccgaaggtcttgaaaaagtgataaatcctgtaaccggtaaaattcattcaagttttaaccagacggttacggctacaggccgcatcagcagtaccgaaccaaatttacagaatatcccagtcagacacgaaatgggaagggaaatacggaaagcttttattccgtcgtcggaaaacgctgtttttgttgatgccgattattcacagatagagcttcgcgtgcttgcccatataacaggcgatgaagccctgataaatgctttcgttaagggggaagatattcatacggccacggcgtcgctggtatttgacgtagctcccgaagatgtgacgccggaactgcgcagaaaggcaaaagccgtaaatttcggcatagtgtacgggatcagtgattacgggctggcacgggatttgggaattacccggaaggaagcaaagcggtatatagacgactattttgccaaataccccaaagtaaaaacctatgtggatgaaattgtgcgggtcggccaggaacaggggtatgtggaaactctgttccacagaagaagaaatcttcccgagcttgcatctaaaaattttcaccagcgttctttcggaaaaagggttgcaatgaatacgcccatacagggcactgcagccgatattattaaaattgcgatggtgaaggtatacaaggctttgaaagaatccggccttaaatccaggcttatcctccaggtccatgacgaacttgttattgagacttttgaagacgaactggagactgtcaaggaacttgtcaaaaagtgcatggaagaggccgttgaattgagtgtgccgcttgttgtcgacgtttcaatcgggaaaaactggtatgaagcctcctgatatggatcc

SEQ ID NO: 143 - DNA, 2772 bp, Artificial Sequence
  Description of Artificial Sequence: Synthetic Clostridium stercorarium DNA Polymerase Y816D
atgaaatacctgctgccgaccgctgctgctggtctgctgctcctcgctgcccagccggcgatggccatggatccaaaaataatccttatagacggaaacagtattttaaaccgcggtttttatgccctgtcggggcgatccatgctgactacgtccacaggtctgtataccaatgcggttttcgcttttgtaaatatattgaacaaatatatcgaagaggaaaaccctgattatattgccgttgctttcgatcttagggcaaaaactttccggcacggtctatatgagggatacaaagcgcagcggaaaggcatgcccgatgaacttgcaatgcagatacccctcgcgaaggaagtactgagggcgatgaatattgccataatagagcatgaaggttatgaagccgacgatataatcggcagcctttcgttaaaggccgaaaaagagaattttgacgtaataatccttacgggggacagggattctttccagctgatcagcgacagggtgaaagttatcctgccttcgacgaaagccggaaaaacagagaccaacgtatatgataaacaggccatcattgacaaatacggagttttaccccatcagcttattgacgttaaaggcttaatgggagattcgtcagataatatacccggcgttccgggagtgggtgagaaaacggcgttaagccttatttcagcctacggtacactggaaggtgtttacgagcatattgatgaaataaaacagcctaagctgaaagcatcgctgattgaatataaggatcaggcgtttttaagccgtaagctgggtactattgtaagaaatctggagctgtgtgcttcgctggaggatctgaaaagaaaagaaataaaccgcaaagagcttttgaatgttttcagaaaactcgaatttgaaagtatcatatcaaaaatgaatcttgcttccgctgaggtgacagaattacctcccgcgccggaagagcttaaaataacccatatttcagcggcagaggatcttaagaaatggattgcttacctgcttaaccagaaaaacatttccgtccttcaactgattgaccgggaggattcatacagttcccgtctttcagggctggctttgtgcaccggggatgaggttttttatatcgagaccgggactgcactccccgagaatttgattgcaacagagctgaaagaactgtggcagaatgaaaatattcacaaaatcggacacaatataaaagaatttataacctggctgctgaaacacgatgttgaactgaacggcctttatttcgacactatgattgccgaatacctgatagattccataagaaacggctatcctatagcaagcctttctcacaaatacctgaatcgcagcgttccgtcgctggacgaacttttgggcaagggaaagggagcaaaaaagtactctgaaattccgcccgaaaggctgaaagattacagcgcttataacgtcaaagccatttttgacatatggccgatgcagaaaaaagttcttcaggaaaaccggcaggaggagctttttaatgacatagagcttcctcttataaccgtacttgccagtatggaataccacggtttcaaagttgacgccgcaaaacttcacgaatacggcgaagttcttctgtcacgcataaaagacctggaaaaggtaatttacatgctggccggtgaagaattcaacatcaattcaacgaagcagcttggtaccatattattcgaaaaactgaagcttcccgttgtaaaaagtacaaagaccggatactccaccgacgtcgaggttcttgaagagctttattacaagcatgatataataccatgcataatagaataccgccagcttacaaaactttacaccacctacgccgaaggtcttgaaaaagtgataaatcctgtaaccggtaaaattcattcaagttttaaccagacggttacggctacaggccgcatcagcagtaccgaaccaaatttacagaatatcccagtcagacacgaaatgggaagggaaatacggaaagcttttattccgtcgtcggaaaacgctgtttttgttgatgccgattattcacagatagagcttcgcgtgcttgcccatataacaggcgatgaagccctgataaatgctttcgttaagggggaagatattcatacggccacggcgtcgctggtatttgacgtagctcccgaagatgtgacgccggaactgcgcagaaaggcaaaagccgtaaatttcggcatagtgtacgggatcagtgattacgggctggcacgggatttgggaattacccggaaggaagcaaagcggtatatagacgactattttgccaaataccccaaagtaaaaacctatgtggatgaaattgtgcgggtcggccaggaacaggggtatgtggaaactctgttccacagaagaagagatcttcccgagcttgcatctaaaaattttcaccagcgttctttcggaaaaagggttgcaatgaatacgcccatacagggcactgcagccgatattattaaaattgcgatggtgaaggtatacaaggctttgaaagaatccggccttaaatccaggcttatcctccaggtccatgacgaacttgttattgagacttttgaagacgaactggagactgtcaaggaacttgtcaaaaagtgcatggaagaggccgttgaattgagtgtgccgcttgttgtcgacgtttcaatcgggaaaaactggtatgaagcctcctgatatggatcc

SEQ ID NO: 144 - DNA, 2772 bp, Artificial Sequence
  Description of Artificial Sequence: Synthetic Clostridium stercorarium DNA Polymerase Y816C
atgaaatacctgctgccgaccgctgctgctggtctgctgctcctcgctgcccagccggcgatggccatggatccaaaaataatccttatagacggaaacagtattttaaaccgcggtttttatgccctgtcggggcgatccatgctgactacgtccacaggtctgtataccaatgcggttttcgcttttgtaaatatattgaacaaatatatcgaagaggaaaaccctgattatattgccgttgctttcgatcttagggcaaaaactttccggcacggtctatatgagggatacaaagcgcagcggaaaggcatgcccgatgaacttgcaatgcagatacccctcgcgaaggaagtactgagggcgatgaatattgccataatagagcatgaaggttatgaagccgacgatataatcggcagcctttcgttaaaggccgaaaaagagaattttgacgtaataatccttacgggggacagggattctttccagctgatcagcgacagggtgaaagttatcctgccttcgacgaaagccggaaaaacagagaccaacgtatatgataaacaggccatcattgacaaatacggagttttaccccatcagcttattgacgttaaaggcttaatgggagattcgtcagataatatacccggcgttccgggagtgggtgagaaaacggcgttaagccttatttcagcctacggtacactggaaggtgtttacgagcatattgatgaaataaaacagcctaagctgaaagcatcgctgattgaatataaggatcaggcgtttttaagccgtaagctgggtactattgtaagaaatctggagctgtgtgcttcgctggaggatctgaaaagaaaagaaataaaccgcaaagagcttttgaatgttttcagaaaactcgaatttgaaagtatcatatcaaaaatgaatcttgcttccgctgaggtgacagaattacctcccgcgccggaagagcttaaaataacccatatttcagcggcagaggatcttaagaaatggattgcttacctgcttaaccagaaaaacatttccgtccttcaactgattgaccgggaggattcatacagttcccgtctttcagggctggctttgtgcaccggggatgaggttttttatatcgagaccgggactgcactccccgagaatttgattgcaacagagctgaaagaactgtggcagaatgaaaatattcacaaaatcggacacaatataaaagaatttataacctggctgctgaaacacgatgttgaactgaacggcctttatttcgacactatgattgccgaatacctgatagattccataagaaacggctatcctatagcaagcctttctcacaaatacctgaatcgcagcgttccgtcgctggacgaacttttgggcaagggaaagggagcaaaaaagtactctgaaattccgcccgaaaggctgaaagattacagcgcttataacgtcaaagccatttttgacatatggccgatgcagaaaaaagttcttcaggaaaaccggcaggaggagctttttaatgacatagagcttcctcttataaccgtacttgccagtatggaataccacggtttcaaagttgacgccgcaaaacttcacgaatacggcgaagttcttctgtcacgcataaaagacctggaaaaggtaatttacatgctggccggtgaagaattcaacatcaattcaacgaagcagcttggtaccatattattcgaaaaactgaagcttcccgttgtaaaaagtacaaagaccggatactccaccgacgtcgaggttcttgaagagctttattacaagcatgatataataccatgcataatagaataccgccagcttacaaaactttacaccacctacgccgaaggtcttgaaaaagtgataaatcctgtaaccggtaaaattcattcaagttttaaccagacggttacggctacaggccgcatcagcagtaccgaaccaaatttacagaatatcccagtcagacacgaaatgggaagggaaatacggaaagcttttattccgtcgtcggaaaacgctgtttttgttgatgccgattattcacagatagagcttcgcgtgcttgcccatataacaggcgatgaagccctgataaatgctttcgttaagggggaagatattcatacggccacggcgtcgctggtatttgacgtagctcccgaagatgtgacgccggaactgcgcagaaaggcaaaagccgtaaatttcggcatagtgtacgggatcagtgattacgggctggcacgggatttgggaattacccggaaggaagcaaagcggtatatagacgactattttgccaaataccccaaagtaaaaacctatgtggatgaaattgtgcgggtcggccaggaacaggggtatgtggaaactctgttccacagaagaagatgtcttcccgagcttgcatctaaaaattttcaccagcgttctttcggaaaaagggttgcaatgaatacgcccatacagggcactgcagccgatattattaaaattgcgatggtgaaggtatacaaggctttgaaagaatccggccttaaatccaggcttatcctccaggtccatgacgaacttgttattgagacttttgaagacgaactggagactgtcaaggaacttgtcaaaaagtgcatggaagaggccgttgaattgagtgtgccgcttgttgtcgacgtttcaatcgggaaaaactggtatgaagcctcctgatatggatcc

SEQ ID NO: 145 - DNA, 2772 bp, Artificial Sequence
  Description of Artificial Sequence: Synthetic Clostridium stercorarium DNA Polymerase Y816E
atgaaatacctgctgccgaccgctgctgctggtctgctgctcctcgctgcccagccggcgatggccatggatccaaaaataatccttatagacggaaacagtattttaaaccgcggtttttatgccctgtcggggcgatccatgctgactacgtccacaggtctgtataccaatgcggttttcgcttttgtaaatatattgaacaaatatatcgaagaggaaaaccctgattatattgccgttgctttcgatcttagggcaaaaactttccggcacggtctatatgagggatacaaagcgcagcggaaaggcatgcccgatgaacttgcaatgcagatacccctcgcgaaggaagtactgagggcgatgaatattgccataatagagcatgaaggttatgaagccgacgatataatcggcagcctttcgttaaaggccgaaaaagagaattttgacgtaataatccttacgggggacagggattctttccagctgatcagcgacagggtgaaagttatcctgccttcgacgaaagccggaaaaacagagaccaacgtatatgataaacaggccatcattgacaaatacggagttttaccccatcagcttattgacgttaaaggcttaatgggagattcgtcagataatatacccggcgttccgggagtgggtgagaaaacggcgttaagccttatttcagcctacggtacactggaaggtgtttacgagcatattgatgaaataaaacagcctaagctgaaagcatcgctgattgaatataaggatcaggcgtttttaagccgtaagctgggtactattgtaagaaatctggagctgtgtgcttcgctggaggatctgaaaagaaaagaaataaaccgcaaagagcttttgaatgttttcagaaaactcgaatttgaaagtatcatatcaaaaatgaatcttgcttccgctgaggtgacagaattacctcccgcgccggaagagcttaaaataacccatatttcagcggcagaggatcttaagaaatggattgcttacctgcttaaccagaaaaacatttccgtccttcaactgattgaccgggaggattcatacagttcccgtctttcagggctggctttgtgcaccggggatgaggttttttatatcgagaccgggactgcactccccgagaatttgattgcaacagagctgaaagaactgtggcagaatgaaaatattcacaaaatcggacacaatataaaagaatttataacctggctgctgaaacacgatgttgaactgaacggcctttatttcgacactatgattgccgaatacctgatagattccataagaaacggctatcctatagcaagcctttctcacaaatacctgaatcgcagcgttccgtcgctggacgaacttttgggcaagggaaagggagcaaaaaagtactctgaaattccgcccgaaaggctgaaagattacagcgcttataacgtcaaagccatttttgacatatggccgatgcagaaaaaagttcttcaggaaaaccggcaggaggagctttttaatgacatagagcttcctcttataaccgtacttgccagtatggaataccacggtttcaaagttgacgccgcaaaacttcacgaatacggcgaagttcttctgtcacgcataaaagacctggaaaaggtaatttacatgctggccggtgaagaattcaacatcaattcaacgaagcagcttggtaccatattattcgaaaaactgaagcttcccgttgtaaaaagtacaaagaccggatactccaccgacgtcgaggttcttgaagagctttattacaagcatgatataataccatgcataatagaataccgccagcttacaaaactttacaccacctacgccgaaggtcttgaaaaagtgataaatcctgtaaccggtaaaattcattcaagttttaaccagacggttacggctacaggccgcatcagcagtaccgaaccaaatttacagaatatcccagtcagacacgaaatgggaagggaaatacggaaagcttttattccgtcgtcggaaaacgctgtttttgttgatgccgattattcacagatagagcttcgcgtgcttgcccatataacaggcgatgaagccctgataaatgctttcgttaagggggaagatattcatacggccacggcgtcgctggtatttgacgtagctcccgaagatgtgacgccggaactgcgcagaaaggcaaaagccgtaaatttcggcatagtgtacgggatcagtgattacgggctggcacgggatttgggaattacccggaaggaagcaaagcggtatatagacgactattttgccaaataccccaaagtaaaaacctatgtggatgaaattgtgcgggtcggccaggaacaggggtatgtggaaactctgttccacagaagaagagaacttcccgagcttgcatctaaaaattttcaccagcgttctttcggaaaaagggttgcaatgaatacgcccatacagggcactgcagccgatattattaaaattgcgatggtgaaggtatacaaggctttgaaagaatccggccttaaatccaggcttatcctccaggtccatgacgaacttgttattgagacttttgaagacgaactggagactgtcaaggaacttgtcaaaaagtgcatggaagaggccgttgaattgagtgtgccgcttgttgtcgacgtttcaatcgggaaaaactggtatgaagcctcctgatatggatcc

SEQ ID NO: 146 - DNA, 2772 bp, Artificial Sequence
  Description of Artificial Sequence: Synthetic Clostridium stercorarium DNA Polymerase Y816Q
atgaaatacctgctgccgaccgctgctgctggtctgctgctcctcgctgcccagccggcgatggccatggatccaaaaataatccttatagacggaaacagtattttaaaccgcggtttttatgccctgtcggggcgatccatgctgactacgtccacaggtctgtataccaatgcggttttcgcttttgtaaatatattgaacaaatatatcgaagaggaaaaccctgattatattgccgttgctttcgatcttagggcaaaaactttccggcacggtctatatgagggatacaaagcgcagcggaaaggcatgcccgatgaacttgcaatgcagatacccctcgcgaaggaagtactgagggcgatgaatattgccataatagagcatgaaggttatgaagccgacgatataatcggcagcctttcgttaaaggccgaaaaagagaattttgacgtaataatccttacgggggacagggattctttccagctgatcagcgacagggtgaaagttatcctgccttcgacgaaagccggaaaaacagagaccaacgtatatgataaacaggccatcattgacaaatacggagttttaccccatcagcttattgacgttaaaggcttaatgggagattcgtcagataatatacccggcgttccgggagtgggtgagaaaacggcgttaagccttatttcagcctacggtacactggaaggtgtttacgagcatattgatgaaataaaacagcctaagctgaaagcatcgctgattgaatataaggatcaggcgtttttaagccgtaagctgggtactattgtaagaaatctggagctgtgtgcttcgctggaggatctgaaaagaaaagaaataaaccgcaaagagcttttgaatgttttcagaaaactcgaatttgaaagtatcatatcaaaaatgaatcttgcttccgctgaggtgacagaattacctcccgcgccggaagagcttaaaataacccatatttcagcggcagaggatcttaagaaatggattgcttacctgcttaaccagaaaaacatttccgtccttcaactgattgaccgggaggattcatacagttcccgtctttcagggctggctttgtgcaccggggatgaggttttttatatcgagaccgggactgcactccccgagaatttgattgcaacagagctgaaagaactgtggcagaatgaaaatattcacaaaatcggacacaatataaaagaatttataacctggctgctgaaacacgatgttgaactgaacggcctttatttcgacactatgattgccgaatacctgatagattccataagaaacggctatcctatagcaagcctttctcacaaatacctgaatcgcagcgttccgtcgctggacgaacttttgggcaagggaaagggagcaaaaaagtactctgaaattccgcccgaaaggctgaaagattacagcgcttataacgtcaaagccatttttgacatatggccgatgcagaaaaaagttcttcaggaaaaccggcaggaggagctttttaatgacatagagcttcctcttataaccgtacttgccagtatggaataccacggtttcaaagttgacgccgcaaaacttcacgaatacggcgaagttcttctgtcacgcataaaagacctggaaaaggtaatttacatgctggccggtgaagaattcaacatcaattcaacgaagcagcttggtaccatattattcgaaaaactgaagcttcccgttgtaaaaagtacaaagaccggatactccaccgacgtcgaggttcttgaagagctttattacaagcatgatataataccatgcataatagaataccgccagcttacaaaactttacaccacctacgccgaaggtcttgaaaaagtgataaatcctgtaaccggtaaaattcattcaagttttaaccagacggttacggctacaggccgcatcagcagtaccgaaccaaatttacagaatatcccagtcagacacgaaatgggaagggaaatacggaaagcttttattccgtcgtcggaaaacgctgtttttgttgatgccgattattcacagatagagcttcgcgtgcttgcccatataacaggcgatgaagccctgataaatgctttcgttaagggggaagatattcatacggccacggcgtcgctggtatttgacgtagctcccgaagatgtgacgccggaactgcgcagaaaggcaaaagccgtaaatttcggcatagtgtacgggatcagtgattacgggctggcacgggatttgggaattacccggaaggaagcaaagcggtatatagacgactattttgccaaataccccaaagtaaaaacctatgtggatgaaattgtgcgggtcggccaggaacaggggtatgtggaaactctgttccacagaagaagacaacttcccgagcttgcatctaaaaattttcaccagcgttctttcggaaaaagggttgcaatgaatacgcccatacagggcactgcagccgatattattaaaattgcgatggtgaaggtatacaaggctttgaaagaatccggccttaaatccaggcttatcctccaggtccatgacgaacttgttattgagacttttgaagacgaactggagactgtcaaggaacttgtcaaaaagtgcatggaagaggccgttgaattgagtgtgccgcttgttgtcgacgtttcaatcgggaaaaactggtatgaagcctcctgatatggatcc

SEQ ID NO: 147 - DNA, 2772 bp, Artificial Sequence
  Description of Artificial Sequence: Synthetic Clostridium stercorarium DNA Polymerase Y816G
atgaaatacctgctgccgaccgctgctgctggtctgctgctcctcgctgcccagccggcgatggccatggatccaaaaataatccttatagacggaaacagtattttaaaccgcggtttttatgccctgtcggggcgatccatgctgactacgtccacaggtctgtataccaatgcggttttcgcttttgtaaatatattgaacaaatatatcgaagaggaaaaccctgattatattgccgttgctttcgatcttagggcaaaaactttccggcacggtctatatgagggatacaaagcgcagcggaaaggcatgcccgatgaacttgcaatgcagatacccctcgcgaaggaagtactgagggcgatgaatattgccataatagagcatgaaggttatgaagccgacgatataatcggcagcctttcgttaaaggccgaaaaagagaattttgacgtaataatccttacgggggacagggattctttccagctgatcagcgacagggtgaaagttatcctgccttcgacgaaagccggaaaaacagagaccaacgtatatgataaacaggccatcattgacaaatacggagttttaccccatcagcttattgacgttaaaggcttaatgggagattcgtcagataatatacccggcgttccgggagtgggtgagaaaacggcgttaagccttatttcagcctacggtacactggaaggtgtttacgagcatattgatgaaataaaacagcctaagctgaaagcatcgctgattgaatataaggatcaggcgtttttaagccgtaagctgggtactattgtaagaaatctggagctgtgtgcttcgctggaggatctgaaaagaaaagaaataaaccgcaaagagcttttgaatgttttcagaaaactcgaatttgaaagtatcatatcaaaaatgaatcttgcttccgctgaggtgacagaattacctcccgcgccggaagagcttaaaataacccatatttcagcggcagaggatcttaagaaatggattgcttacctgcttaaccagaaaaacatttccgtccttcaactgattgaccgggaggattcatacagttcccgtctttcagggctggctttgtgcaccggggatgaggttttttatatcgagaccgggactgcactccccgagaatttgattgcaacagagctgaaagaactgtggcagaatgaaaatattcacaaaatcggacacaatataaaagaatttataacctggctgctgaaacacgatgttgaactgaacggcctttatttcgacactatgattgccgaatacctgatagattccataagaaacggctatcctatagcaagcctttctcacaaatacctgaatcgcagcgttccgtcgctggacgaacttttgggcaagggaaagggagcaaaaaagtactctgaaattccgcccgaaaggctgaaagattacagcgcttataacgtcaaagccatttttgacatatggccgatgcagaaaaaagttcttcaggaaaaccggcaggaggagctttttaatgacatagagcttcctcttataaccgtacttgccagtatggaataccacggtttcaaagttgacgccgcaaaacttcacgaatacggcgaagttcttctgtcacgcataaaagacctggaaaaggtaatttacatgctggccggtgaagaattcaacatcaattcaacgaagcagcttggtaccatattattcgaaaaactgaagcttcccgttgtaaaaagtacaaagaccggatactccaccgacgtcgaggttcttgaagagctttattacaagcatgatataataccatgcataatagaataccgccagcttacaaaactttacaccacctacgccgaaggtcttgaaaaagtgataaatcctgtaaccggtaaaattcattcaagttttaaccagacggttacggctacaggccgcatcagcagtaccgaaccaaatttacagaatatcccagtcagacacgaaatgggaagggaaatacggaaagcttttattccgtcgtcggaaaacgctgtttttgttgatgccgattattcacagatagagcttcgcgtgcttgcccatataacaggcgatgaagccctgataaatgctttcgttaagggggaagatattcatacggccacggcgtcgctggtatttgacgtagctcccgaagatgtgacgccggaactgcgcagaaaggcaaaagccgtaaatttcggcatagtgtacgggatcagtgattacgggctggcacgggatttgggaattacccggaaggaagcaaagcggtatatagacgactattttgccaaataccccaaagtaaaaacctatgtggatgaaattgtgcgggtcggccaggaacaggggtatgtggaaactctgttccacagaagaagaggtcttcccgagcttgcatctaaaaattttcaccagcgttctttcggaaaaagggttgcaatgaatacgcccatacagggcactgcagccgatattattaaaattgcgatggtgaaggtatacaaggctttgaaagaatccggccttaaatccaggcttatcctccaggtccatgacgaacttgttattgagacttttgaagacgaactggagactgtcaaggaacttgtcaaaaagtgcatggaagaggccgttgaattgagtgtgccgcttgttgtcgacgtttcaatcgggaaaaactggtatgaagcctcctgatatggatcc

SEQ ID NO: 148 - DNA, 2772 bp, Artificial Sequence
  Description of Artificial Sequence: Synthetic Clostridium stercorarium DNA Polymerase Y816H
atgaaatacctgctgccgaccgctgctgctggtctgctgctcctcgctgcccagccggcgatggccatggatccaaaaataatccttatagacggaaacagtattttaaaccgcggtttttatgccctgtcggggcgatccatgctgactacgtccacaggtctgtataccaatgcggttttcgcttttgtaaatatattgaacaaatatatcgaagaggaaaaccctgattatattgccgttgctttcgatcttagggcaaaaactttccggcacggtctatatgagggatacaaagcgcagcggaaaggcatgcccgatgaacttgcaatgcagatacccctcgcgaaggaagtactgagggcgatgaatattgccataatagagcatgaaggttatgaagccgacgatataatcggcagcctttcgttaaaggccgaaaaagagaattttgacgtaataatccttacgggggacagggattctttccagctgatcagcgacagggtgaaagttatcctgccttcgacgaaagccggaaaaacagagaccaacgtatatgataaacaggccatcattgacaaatacggagttttaccccatcagcttattgacgttaaaggcttaatgggagattcgtcagataatatacccggcgttccgggagtgggtgagaaaacggcgttaagccttatttcagcctacggtacactggaaggtgtttacgagcatattgatgaaataaaacagcctaagctgaaagcatcgctgattgaatataaggatcaggcgtttttaagccgtaagctgggtactattgtaagaaatctggagctgtgtgcttcgctggaggatctgaaaagaaaagaaataaaccgcaaagagcttttgaatgttttcagaaaactcgaatttgaaagtatcatatcaaaaatgaatcttgcttccgctgaggtgacagaattacctcccgcgccggaagagcttaaaataacccatatttcagcggcagaggatcttaagaaatggattgcttacctgcttaaccagaaaaacatttccgtccttcaactgattgaccgggaggattcatacagttcccgtctttcagggctggctttgtgcaccggggatgaggttttttatatcgagaccgggactgcactccccgagaatttgattgcaacagagctgaaagaactgtggcagaatgaaaatattcacaaaatcggacacaatataaaagaatttataacctggctgctgaaacacgatgttgaactgaacggcctttatttcgacactatgattgccgaatacctgatagattccataagaaacggctatcctatagcaagcctttctcacaaatacctgaatcgcagcgttccgtcgctggacgaacttttgggcaagggaaagggagcaaaaaagtactctgaaattccgcccgaaaggctgaaagattacagcgcttataacgtcaaagccatttttgacatatggccgatgcagaaaaaagttcttcaggaaaaccggcaggaggagctttttaatgacatagagcttcctcttataaccgtacttgccagtatggaataccacggtttcaaagttgacgccgcaaaacttcacgaatacggcgaagttcttctgtcacgcataaaagacctggaaaaggtaatttacatgctggccggtgaagaattcaacatcaattcaacgaagcagcttggtaccatattattcgaaaaactgaagcttcccgttgtaaaaagtacaaagaccggatactccaccgacgtcgaggttcttgaagagctttattacaagcatgatataataccatgcataatagaataccgccagcttacaaaactttacaccacctacgccgaaggtcttgaaaaagtgataaatcctgtaaccggtaaaattcattcaagttttaaccagacggttacggctacaggccgcatcagcagtaccgaaccaaatttacagaatatcccagtcagacacgaaatgggaagggaaatacggaaagcttttattccgtcgtcggaaaacgctgtttttgttgatgccgattattcacagatagagcttcgcgtgcttgcccatataacaggcgatgaagccctgataaatgctttcgttaagggggaagatattcatacggccacggcgtcgctggtatttgacgtagctcccgaagatgtgacgccggaactgcgcagaaaggcaaaagccgtaaatttcggcatagtgtacgggatcagtgattacgggctggcacgggatttgggaattacccggaaggaagcaaagcggtatatagacgactattttgccaaataccccaaagtaaaaacctatgtggatgaaattgtgcgggtcggccaggaacaggggtatgtggaaactctgttccacagaagaagacatcttcccgagcttgcatctaaaaattttcaccagcgttctttcggaaaaagggttgcaatgaatacgcccatacagggcactgcagccgatattattaaaattgcgatggtgaaggtatacaaggctttgaaagaatccggccttaaatccaggcttatcctccaggtccatgacgaacttgttattgagacttttgaagacgaactggagactgtcaaggaacttgtcaaaaagtgcatggaagaggccgttgaattgagtgtgccgcttgttgtcgacgtttcaatcgggaaaaactggtatgaagcctcctgatatggatcc

SEQ ID NO: 149 - DNA, 2772 bp, Artificial Sequence
  Description of Artificial Sequence: Synthetic Clostridium stercorarium DNA Polymerase Y816I
atgaaatacctgctgccgaccgctgctgctggtctgctgctcctcgctgcccagccggcgatggccatggatccaaaaataatccttatagacggaaacagtattttaaaccgcggtttttatgccctgtcggggcgatccatgctgactacgtccacaggtctgtataccaatgcggttttcgcttttgtaaatatattgaacaaatatatcgaagaggaaaaccctgattatattgccgttgctttcgatcttagggcaaaaactttccggcacggtctatatgagggatacaaagcgcagcggaaaggcatgcccgatgaacttgcaatgcagatacccctcgcgaaggaagtactgagggcgatgaatattgccataatagagcatgaaggttatgaagccgacgatataatcggcagcctttcgttaaaggccgaaaaagagaattttgacgtaataatccttacgggggacagggattctttccagctgatcagcgacagggtgaaagttatcctgccttcgacgaaagccggaaaaacagagaccaacgtatatgataaacaggccatcattgacaaatacggagttttaccccatcagcttattgacgttaaaggcttaatgggagattcgtcagataatatacccggcgttccgggagtgggtgagaaaacggcgttaagccttatttcagcctacggtacactggaaggtgtttacgagcatattgatgaaataaaacagcctaagctgaaagcatcgctgattgaatataaggatcaggcgtttttaagccgtaagctgggtactattgtaagaaatctggagctgtgtgcttcgctggaggatctgaaaagaaaagaaataaaccgcaaagagcttttgaatgttttcagaaaactcgaatttgaaagtatcatatcaaaaatgaatcttgcttccgctgaggtgacagaattacctcccgcgccggaagagcttaaaataacccatatttcagcggcagaggatcttaagaaatggattgcttacctgcttaaccagaaaaacatttccgtccttcaactgattgaccgggaggattcatacagttcccgtctttcagggctggctttgtgcaccggggatgaggttttttatatcgagaccgggactgcactccccgagaatttgattgcaacagagctgaaagaactgtggcagaatgaaaatattcacaaaatcggacacaatataaaagaatttataacctggctgctgaaacacgatgttgaactgaacggcctttatttcgacactatgattgccgaatacctgatagattccataagaaacggctatcctatagcaagcctttctcacaaatacctgaatcgcagcgttccgtcgctggacgaacttttgggcaagggaaagggagcaaaaaagtactctgaaattccgcccgaaaggctgaaagattacagcgcttataacgtcaaagccatttttgacatatggccgatgcagaaaaaagttcttcaggaaaaccggcaggaggagctttttaatgacatagagcttcctcttataaccgtacttgccagtatggaataccacggtttcaaagttgacgccgcaaaacttcacgaatacggcgaagttcttctgtcacgcataaaagacctggaaaaggtaatttacatgctggccggtgaagaattcaacatcaattcaacgaagcagcttggtaccatattattcgaaaaactgaagcttcccgttgtaaaaagtacaaagaccggatactccaccgacgtcgaggttcttgaagagctttattacaagcatgatataataccatgcataatagaataccgccagcttacaaaactttacaccacctacgccgaaggtcttgaaaaagtgataaatcctgtaaccggtaaaattcattcaagttttaaccagacggttacggctacaggccgcatcagcagtaccgaaccaaatttacagaatatcccagtcagacacgaaatgggaagggaaatacggaaagcttttattccgtcgtcggaaaacgctgtttttgttgatgccgattattcacagatagagcttcgcgtgcttgcccatataacaggcgatgaagccctgataaatgctttcgttaagggggaagatattcatacggccacggcgtcgctggtatttgacgtagctcccgaagatgtgacgccggaactgcgcagaaaggcaaaagccgtaaatttcggcatagtgtacgggatcagtgattacgggctggcacgggatttgggaattacccggaaggaagcaaagcggtatatagacgactattttgccaaataccccaaagtaaaaacctatgtggatgaaattgtgcgggtcggccaggaacaggggtatgtggaaactctgttccacagaagaagaattcttcccgagcttgcatctaaaaattttcaccagcgttctttcggaaaaagggttgcaatgaatacgcccatacagggcactgcagccgatattattaaaattgcgatggtgaaggtatacaaggctttgaaagaatccggccttaaatccaggcttatcctccaggtccatgacgaacttgttattgagacttttgaagacgaactggagactgtcaaggaacttgtcaaaaagtgcatggaagaggccgttgaattgagtgtgccgcttgttgtcgacgtttcaatcgggaaaaactggtatgaagcctcctgatatggatcc

SEQ ID NO: 150 - DNA, 2772 bp, Artificial Sequence
  Description of Artificial Sequence: Synthetic Clostridium stercorarium DNA Polymerase Y816L
atgaaatacctgctgccgaccgctgctgctggtctgctgctcctcgctgcccagccggcgatggccatggatccaaaaataatccttatagacggaaacagtattttaaaccgcggtttttatgccctgtcggggcgatccatgctgactacgtccacaggtctgtataccaatgcggttttcgcttttgtaaatatattgaacaaatatatcgaagaggaaaaccctgattatattgccgttgctttcgatcttagggcaaaaactttccggcacggtctatatgagggatacaaagcgcagcggaaaggcatgcccgatgaacttgcaatgcagatacccctcgcgaaggaagtactgagggcgatgaatattgccataatagagcatgaaggttatgaagccgacgatataatcggcagcctttcgttaaaggccgaaaaagagaattttgacgtaataatccttacgggggacagggattctttccagctgatcagcgacagggtgaaagttatcctgccttcgacgaaagccggaaaaacagagaccaacgtatatgataaacaggccatcattgacaaatacggagttttaccccatcagcttattgacgttaaaggcttaatgggagattcgtcagataatatacccggcgttccgggagtgggtgagaaaacggcgttaagccttatttcagcctacggtacactggaaggtgtttacgagcatattgatgaaataaaacagcctaagctgaaagcatcgctgattgaatataaggatcaggcgtttttaagccgtaagctgggtactattgtaagaaatctggagctgtgtgcttcgctggaggatctgaaaagaaaagaaataaaccgcaaagagcttttgaatgttttcagaaaactcgaatttgaaagtatcatatcaaaaatgaatcttgcttccgctgaggtgacagaattacctcccgcgccggaagagcttaaaataacccatatttcagcggcagaggatcttaagaaatggattgcttacctgcttaaccagaaaaacatttccgtccttcaactgattgaccgggaggattcatacagttcccgtctttcagggctggctttgtgcaccggggatgaggttttttatatcgagaccgggactgcactccccgagaatttgattgcaacagagctgaaagaactgtggcagaatgaaaatattcacaaaatcggacacaatataaaagaatttataacctggctgctgaaacacgatgttgaactgaacggcctttatttcgacactatgattgccgaatacctgatagattccataagaaacggctatcctatagcaagcctttctcacaaatacctgaatcgcagcgttccgtcgctggacgaacttttgggcaagggaaagggagcaaaaaagtactctgaaattccgcccgaaaggctgaaagattacagcgcttataacgtcaaagccatttttgacatatggccgatgcagaaaaaagttcttcaggaaaaccggcaggaggagctttttaatgacatagagcttcctcttataaccgtacttgccagtatggaataccacggtttcaaagttgacgccgcaaaacttcacgaatacggcgaagttcttctgtcacgcataaaagacctggaaaaggtaatttacatgctggccggtgaagaattcaacatcaattcaacgaagcagcttggtaccatattattcgaaaaactgaagcttcccgttgtaaaaagtacaaagaccggatactccaccgacgtcgaggttcttgaagagctttattacaagcatgatataataccatgcataatagaataccgccagcttacaaaactttacaccacctacgccgaaggtcttgaaaaagtgataaatcctgtaaccggtaaaattcattcaagttttaaccagacggttacggctacaggccgcatcagcagtaccgaaccaaatttacagaatatcccagtcagacacgaaatgggaagggaaatacggaaagcttttattccgtcgtcggaaaacgctgtttttgttgatgccgattattcacagatagagcttcgcgtgcttgcccatataacaggcgatgaagccctgataaatgctttcgttaagggggaagatattcatacggccacggcgtcgctggtatttgacgtagctcccgaagatgtgacgccggaactgcgcagaaaggcaaaagccgtaaatttcggcatagtgtacgggatcagtgattacgggctggcacgggatttgggaattacccggaaggaagcaaagcggtatatagacgactattttgccaaataccccaaagtaaaaacctatgtggatgaaattgtgcgggtcggccaggaacaggggtatgtggaaactctgttccacagaagaagacttcttcccgagcttgcatctaaaaattttcaccagcgttctttcggaaaaagggttgcaatgaatacgcccatacagggcactgcagccgatattattaaaattgcgatggtgaaggtatacaaggctttgaaagaatccggccttaaatccaggcttatcctccaggtccatgacgaacttgttattgagacttttgaagacgaactggagactgtcaaggaacttgtcaaaaagtgcatggaagaggccgttgaattgagtgtgccgcttgttgtcgacgtttcaatcgggaaaaactggtatgaagcctcctgatatggatcc

SEQ ID NO: 151 - DNA, 2772 bp, Artificial Sequence
  Description of Artificial Sequence: Synthetic Clostridium stercorarium DNA Polymerase Y816K
atgaaatacctgctgccgaccgctgctgctggtctgctgctcctcgctgcccagccggcgatggccatggatccaaaaataatccttatagacggaaacagtattttaaaccgcggtttttatgccctgtcggggcgatccatgctgactacgtccacaggtctgtataccaatgcggttttcgcttttgtaaatatattgaacaaatatatcgaagaggaaaaccctgattatattgccgttgctttcgatcttagggcaaaaactttccggcacggtctatatgagggatacaaagcgcagcggaaaggcatgcccgatgaacttgcaatgcagatacccctcgcgaaggaagtactgagggcgatgaatattgccataatagagcatgaaggttatgaagccgacgatataatcggcagcctttcgttaaaggccgaaaaagagaattttgacgtaataatccttacgggggacagggattctttccagctgatcagcgacagggtgaaagttatcctgccttcgacgaaagccggaaaaacagagaccaacgtatatgataaacaggccatcattgacaaatacggagttttaccccatcagcttattgacgttaaaggcttaatgggagattcgtcagataatatacccggcgttccgggagtgggtgagaaaacggcgttaagccttatttcagcctacggtacactggaaggtgtttacgagcatattgatgaaataaaacagcctaagctgaaagcatcgctgattgaatataaggatcaggcgtttttaagccgtaagctgggtactattgtaagaaatctggagctgtgtgcttcgctggaggatctgaaaagaaaagaaataaaccgcaaagagcttttgaatgttttcagaaaactcgaatttgaaagtatcatatcaaaaatgaatcttgcttccgctgaggtgacagaattacctcccgcgccggaagagcttaaaataacccatatttcagcggcagaggatcttaagaaatggattgcttacctgcttaaccagaaaaacatttccgtccttcaactgattgaccgggaggattcatacagttcccgtctttcagggctggctttgtgcaccggggatgaggttttttatatcgagaccgggactgcactccccgagaatttgattgcaacagagctgaaagaactgtggcagaatgaaaatattcacaaaatcggacacaatataaaagaatttataacctggctgctgaaacacgatgttgaactgaacggcctttatttcgacactatgattgccgaatacctgatagattccataagaaacggctatcctatagcaagcctttctcacaaatacctgaatcgcagcgttccgtcgctggacgaacttttgggcaagggaaagggagcaaaaaagtactctgaaattccgcccgaaaggctgaaagattacagcgcttataacgtcaaagccatttttgacatatggccgatgcagaaaaaagttcttcaggaaaaccggcaggaggagctttttaatgacatagagcttcctcttataaccgtacttgccagtatggaataccacggtttcaaagttgacgccgcaaaacttcacgaatacggcgaagttcttctgtcacgcataaaagacctggaaaaggtaatttacatgctggccggtgaagaattcaacatcaattcaacgaagcagcttggtaccatattattcgaaaaactgaagcttcccgttgtaaaaagtacaaagaccggatactccaccgacgtcgaggttcttgaagagctttattacaagcatgatataataccatgcataatagaataccgccagcttacaaaactttacaccacctacgccgaaggtcttgaaaaagtgataaatcctgtaaccggtaaaattcattcaagttttaaccagacggttacggctacaggccgcatcagcagtaccgaaccaaatttacagaatatcccagtcagacacgaaatgggaagggaaatacggaaagcttttattccgtcgtcggaaaacgctgtttttgttgatgccgattattcacagatagagcttcgcgtgcttgcccatataacaggcgatgaagccctgataaatgctttcgttaagggggaagatattcatacggccacggcgtcgctggtatttgacgtagctcccgaagatgtgacgccggaactgcgcagaaaggcaaaagccgtaaatttcggcatagtgtacgggatcagtgattacgggctggcacgggatttgggaattacccggaaggaagcaaagcggtatatagacgactattttgccaaataccccaaagtaaaaacctatgtggatgaaattgtgcgggtcggccaggaacaggggtatgtggaaactctgttccacagaagaagaaaacttcccgagcttgcatctaaaaattttcaccagcgttctttcggaaaaagggttgcaatgaatacgcccatacagggcactgcagccgatattattaaaattgcgatggtgaaggtatacaaggctttgaaagaatccggccttaaatccaggcttatcctccaggtccatgacgaacttgttattgagacttttgaagacgaactggagactgtcaaggaacttgtcaaaaagtgcatggaagaggccgttgaattgagtgtgccgcttgttgtcgacgtttcaatcgggaaaaactggtatgaagcctcctgatatggatcc

SEQ ID NO: 152 - DNA, 2772 bp, Artificial Sequence
  Description of Artificial Sequence: Synthetic Clostridium stercorarium DNA Polymerase Y816M
atgaaatacctgctgccgaccgctgctgctggtctgctgctcctcgctgcccagccggcgatggccatggatccaaaaataatccttatagacggaaacagtattttaaaccgcggtttttatgccctgtcggggcgatccatgctgactacgtccacaggtctgtataccaatgcggttttcgcttttgtaaatatattgaacaaatatatcgaagaggaaaaccctgattatattgccgttgctttcgatcttagggcaaaaactttccggcacggtctatatgagggatacaaagcgcagcggaaaggcatgcccgatgaacttgcaatgcagatacccctcgcgaaggaagtactgagggcgatgaatattgccataatagagcatgaaggttatgaagccgacgatataatcggcagcctttcgttaaaggccgaaaaagagaattttgacgtaataatccttacgggggacagggattctttccagctgatcagcgacagggtgaaagttatcctgccttcgacgaaagccggaaaaacagagaccaacgtatatgataaacaggccatcattgacaaatacggagttttaccccatcagcttattgacgttaaaggcttaatgggagattcgtcagataatatacccggcgttccgggagtgggtgagaaaacggcgttaagccttatttcagcctacggtacactggaaggtgtttacgagcatattgatgaaataaaacagcctaagctgaaagcatcgctgattgaatataaggatcaggcgtttttaagccgtaagctgggtactattgtaagaaatctggagctgtgtgcttcgctggaggatctgaaaagaaaagaaataaaccgcaaagagcttttgaatgttttcagaaaactcgaatttgaaagtatcatatcaaaaatgaatcttgcttccgctgaggtgacagaattacctcccgcgccggaagagcttaaaataacccatatttcagcggcagaggatcttaagaaatggattgcttacctgcttaaccagaaaaacatttccgtccttcaactgattgaccgggaggattcatacagttcccgtctttcagggctggctttgtgcaccggggatgaggttttttatatcgagaccgggactgcactccccgagaatttgattgcaacagagctgaaagaactgtggcagaatgaaaatattcacaaaatcggacacaatataaaagaatttataacctggctgctgaaacacgatgttgaactgaacggcctttatttcgacactatgattgccgaatacctgatagattccataagaaacggctatcctatagcaagcctttctcacaaatacctgaatcgcagcgttccgtcgctggacgaacttttgggcaagggaaagggagcaaaaaagtactctgaaattccgcccgaaaggctgaaagattacagcgcttataacgtcaaagccatttttgacatatggccgatgcagaaaaaagttcttcaggaaaaccggcaggaggagctttttaatgacatagagcttcctcttataaccgtacttgccagtatggaataccacggtttcaaagttgacgccgcaaaacttcacgaatacggcgaagttcttctgtcacgcataaaagacctggaaaaggtaatttacatgctggccggtgaagaattcaacatcaattcaacgaagcagcttggtaccatattattcgaaaaactgaagcttcccgttgtaaaaagtacaaagaccggatactccaccgacgtcgaggttcttgaagagctttattacaagcatgatataataccatgcataatagaataccgccagcttacaaaactttacaccacctacgccgaaggtcttgaaaaagtgataaatcctgtaaccggtaaaattcattcaagttttaaccagacggttacggctacaggccgcatcagcagtaccgaaccaaatttacagaatatcccagtcagacacgaaatgggaagggaaatacggaaagcttttattccgtcgtcggaaaacgctgtttttgttgatgccgattattcacagatagagcttcgcgtgcttgcccatataacaggcgatgaagccctgataaatgctttcgttaagggggaagatattcatacggccacggcgtcgctggtatttgacgtagctcccgaagatgtgacgccggaactgcgcagaaaggcaaaagccgtaaatttcggcatagtgtacgggatcagtgattacgggctggcacgggatttgggaattacccggaaggaagcaaagcggtatatagacgactattttgccaaataccccaaagtaaaaacctatgtggatgaaattgtgcgggtcggccaggaacaggggtatgtggaaactctgttccacagaagaagaatgcttcccgagcttgcatctaaaaattttcaccagcgttctttcggaaaaagggttgcaatgaatacgcccatacagggcactgcagccgatattattaaaattgcgatggtgaaggtatacaaggctttgaaagaatccggccttaaatccaggcttatcctccaggtccatgacgaacttgttattgagacttttgaagacgaactggagactgtcaaggaacttgtcaaaaagtgcatggaagaggccgttgaattgagtgtgccgcttgttgtcgacgtttcaatcgggaaaaactggtatgaagcctcctgatatggatcc

SEQ ID NO: 153 - DNA, 2772 bp, Artificial Sequence
  Description of Artificial Sequence: Synthetic Clostridium stercorarium DNA Polymerase Y816F
atgaaatacctgctgccgaccgctgctgctggtctgctgctcctcgctgcccagccggcgatggccatggatccaaaaataatccttatagacggaaacagtattttaaaccgcggtttttatgccctgtcggggcgatccatgctgactacgtccacaggtctgtataccaatgcggttttcgcttttgtaaatatattgaacaaatatatcgaagaggaaaaccctgattatattgccgttgctttcgatcttagggcaaaaactttccggcacggtctatatgagggatacaaagcgcagcggaaaggcatgcccgatgaacttgcaatgcagatacccctcgcgaaggaagtactgagggcgatgaatattgccataatagagcatgaaggttatgaagccgacgatataatcggcagcctttcgttaaaggccgaaaaagagaattttgacgtaataatccttacgggggacagggattctttccagctgatcagcgacagggtgaaagttatcctgccttcgacgaaagccggaaaaacagagaccaacgtatatgataaacaggccatcattgacaaatacggagttttaccccatcagcttattgacgttaaaggcttaatgggagattcgtcagataatatacccggcgttccgggagtgggtgagaaaacggcgttaagccttatttcagcctacggtacactggaaggtgtttacgagcatattgatgaaataaaacagcctaagctgaaagcatcgctgattgaatataaggatcaggcgtttttaagccgtaagctgggtactattgtaagaaatctggagctgtgtgcttcgctggaggatctgaaaagaaaagaaataaaccgcaaagagcttttgaatgttttcagaaaactcgaatttgaaagtatcatatcaaaaatgaatcttgcttccgctgaggtgacagaattacctcccgcgccggaagagcttaaaataacccatatttcagcggcagaggatcttaagaaatggattgcttacctgcttaaccagaaaaacatttccgtccttcaactgattgaccgggaggattcatacagttcccgtctttcagggctggctttgtgcaccggggatgaggttttttatatcgagaccgggactgcactccccgagaatttgattgcaacagagctgaaagaactgtggcagaatgaaaatattcacaaaatcggacacaatataaaagaatttataacctggctgctgaaacacgatgttgaactgaacggcctttatttcgacactatgattgccgaatacctgatagattccataagaaacggctatcctatagcaagcctttctcacaaatacctgaatcgcagcgttccgtcgctggacgaacttttgggcaagggaaagggagcaaaaaagtactctgaaattccgcccgaaaggctgaaagattacagcgcttataacgtcaaagccatttttgacatatggccgatgcagaaaaaagttcttcaggaaaaccggcaggaggagctttttaatgacatagagcttcctcttataaccgtacttgccagtatggaataccacggtttcaaagttgacgccgcaaaacttcacgaatacggcgaagttcttctgtcacgcataaaagacctggaaaaggtaatttacatgctggccggtgaagaattcaacatcaattcaacgaagcagcttggtaccatattattcgaaaaactgaagcttcccgttgtaaaaagtacaaagaccggatactccaccgacgtcgaggttcttgaagagctttattacaagcatgatataataccatgcataatagaataccgccagcttacaaaactttacaccacctacgccgaaggtcttgaaaaagtgataaatcctgtaaccggtaaaattcattcaagttttaaccagacggttacggctacaggccgcatcagcagtaccgaaccaaatttacagaatatcccagtcagacacgaaatgggaagggaaatacggaaagcttttattccgtcgtcggaaaacgctgtttttgttgatgccgattattcacagatagagcttcgcgtgcttgcccatataacaggcgatgaagccctgataaatgctttcgttaagggggaagatattcatacggccacggcgtcgctggtatttgacgtagctcccgaagatgtgacgccggaactgcgcagaaaggcaaaagccgtaaatttcggcatagtgtacgggatcagtgattacgggctggcacgggatttgggaattacccggaaggaagcaaagcggtatatagacgactattttgccaaataccccaaagtaaaaacctatgtggatgaaattgtgcgggtcggccaggaacaggggtatgtggaaactctgttccacagaagaagatttcttcccgagcttgcatctaaaaattttcaccagcgttctttcggaaaaagggttgcaatgaatacgcccatacagggcactgcagccgatattattaaaattgcgatggtgaaggtatacaaggctttgaaagaatccggccttaaatccaggcttatcctccaggtccatgacgaacttgttattgagacttttgaagacgaactggagactgtcaaggaacttgtcaaaaagtgcatggaagaggccgttgaattgagtgtgccgcttgttgtcgacgtttcaatcgggaaaaactggtatgaagcctcctgatatggatcc

SEQ ID NO: 154 - DNA, 2772 bp, Artificial Sequence
  Description of Artificial Sequence: Synthetic Clostridium stercorarium DNA Polymerase Y816P
atgaaatacctgctgccgaccgctgctgctggtctgctgctcctcgctgcccagccggcgatggccatggatccaaaaataatccttatagacggaaacagtattttaaaccgcggtttttatgccctgtcggggcgatccatgctgactacgtccacaggtctgtataccaatgcggttttcgcttttgtaaatatattgaacaaatatatcgaagaggaaaaccctgattatattgccgttgctttcgatcttagggcaaaaactttccggcacggtctatatgagggatacaaagcgcagcggaaaggcatgcccgatgaacttgcaatgcagatacccctcgcgaaggaagtactgagggcgatgaatattgccataatagagcatgaaggttatgaagccgacgatataatcggcagcctttcgttaaaggccgaaaaagagaattttgacgtaataatccttacgggggacagggattctttccagctgatcagcgacagggtgaaagttatcctgccttcgacgaaagccggaaaaacagagaccaacgtatatgataaacaggccatcattgacaaatacggagttttaccccatcagcttattgacgttaaaggcttaatgggagattcgtcagataatatacccggcgttccgggagtgggtgagaaaacggcgttaagccttatttcagcctacggtacactggaaggtgtttacgagcatattgatgaaataaaacagcctaagctgaaagcatcgctgattgaatataaggatcaggcgtttttaagccgtaagctgggtactattgtaagaaatctggagctgtgtgcttcgctggaggatctgaaaagaaaagaaataaaccgcaaagagcttttgaatgttttcagaaaactcgaatttgaaagtatcatatcaaaaatgaatcttgcttccgctgaggtgacagaattacctcccgcgccggaagagcttaaaataacccatatttcagcggcagaggatcttaagaaatggattgcttacctgcttaaccagaaaaacatttccgtccttcaactgattgaccgggaggattcatacagttcccgtctttcagggctggctttgtgcaccggggatgaggttttttatatcgagaccgggactgcactccccgagaatttgattgcaacagagctgaaagaactgtggcagaatgaaaatattcacaaaatcggacacaatataaaagaatttataacctggctgctgaaacacgatgttgaactgaacggcctttatttcgacactatgattgccgaatacctgatagattccataagaaacggctatcctatagcaagcctttctcacaaatacctgaatcgcagcgttccgtcgctggacgaacttttgggcaagggaaagggagcaaaaaagtactctgaaattccgcccgaaaggctgaaagattacagcgcttataacgtcaaagccatttttgacatatggccgatgcagaaaaaagttcttcaggaaaaccggcaggaggagctttttaatgacatagagcttcctcttataaccgtacttgccagtatggaataccacggtttcaaagttgacgccgcaaaacttcacgaatacggcgaagttcttctgtcacgcataaaagacctggaaaaggtaatttacatgctggccggtgaagaattcaacatcaattcaacgaagcagcttggtaccatattattcgaaaaactgaagcttcccgttgtaaaaagtacaaagaccggatactccaccgacgtcgaggttcttgaagagctttattacaagcatgatataataccatgcataatagaataccgccagcttacaaaactttacaccacctacgccgaaggtcttgaaaaagtgataaatcctgtaaccggtaaaattcattcaagttttaaccagacggttacggctacaggccgcatcagcagtaccgaaccaaatttacagaatatcccagtcagacacgaaatgggaagggaaatacggaaagcttttattccgtcgtcggaaaacgctgtttttgttgatgccgattattcacagatagagcttcgcgtgcttgcccatataacaggcgatgaagccctgataaatgctttcgttaagggggaagatattcatacggccacggcgtcgctggtatttgacgtagctcccgaagatgtgacgccggaactgcgcagaaaggcaaaagccgtaaatttcggcatagtgtacgggatcagtgattacgggctggcacgggatttgggaattacccggaaggaagcaaagcggtatatagacgactattttgccaaataccccaaagtaaaaacctatgtggatgaaattgtgcgggtcggccaggaacaggggtatgtggaaactctgttccacagaagaagacctcttcccgagcttgcatctaaaaattttcaccagcgttctttcggaaaaagggttgcaatgaatacgcccatacagggcactgcagccgatattattaaaattgcgatggtgaaggtatacaaggctttgaaagaatccggccttaaatccaggcttatcctccaggtccatgacgaacttgttattgagacttttgaagacgaactggagactgtcaaggaacttgtcaaaaagtgcatggaagaggccgttgaattgagtgtgccgcttgttgtcgacgtttcaatcgggaaaaactggtatgaagcctcctgatatggatcc

SEQ ID NO: 155 - DNA, 2772 bp, Artificial Sequence
  Description of Artificial Sequence: Synthetic Clostridium stercorarium DNA Polymerase Y816S
atgaaatacctgctgccgaccgctgctgctggtctgctgctcctcgctgcccagccggcgatggccatggatccaaaaataatccttatagacggaaacagtattttaaaccgcggtttttatgccctgtcggggcgatccatgctgactacgtccacaggtctgtataccaatgcggttttcgcttttgtaaatatattgaacaaatatatcgaagaggaaaaccctgattatattgccgttgctttcgatcttagggcaaaaactttccggcacggtctatatgagggatacaaagcgcagcggaaaggcatgcccgatgaacttgcaatgcagatacccctcgcgaaggaagtactgagggcgatgaatattgccataatagagcatgaaggttatgaagccgacgatataatcggcagcctttcgttaaaggccgaaaaagagaattttgacgtaataatccttacgggggacagggattctttccagctgatcagcgacagggtgaaagttatcctgccttcgacgaaagccggaaaaacagagaccaacgtatatgataaacaggccatcattgacaaatacggagttttaccccatcagcttattgacgttaaaggcttaatgggagattcgtcagataatatacccggcgttccgggagtgggtgagaaaacggcgttaagccttatttcagcctacggtacactggaaggtgtttacgagcatattgatgaaataaaacagcctaagctgaaagcatcgctgattgaatataaggatcaggcgtttttaagccgtaagctgggtactattgtaagaaatctggagctgtgtgcttcgctggaggatctgaaaagaaaagaaataaaccgcaaagagcttttgaatgttttcagaaaactcgaatttgaaagtatcatatcaaaaatgaatcttgcttccgctgaggtgacagaattacctcccgcgccggaagagcttaaaataacccatatttcagcggcagaggatcttaagaaatggattgcttacctgcttaaccagaaaaacatttccgtccttcaactgattgaccgggaggattcatacagttcccgtctttcagggctggctttgtgcaccggggatgaggttttttatatcgagaccgggactgcactccccgagaatttgattgcaacagagctgaaagaactgtggcagaatgaaaatattcacaaaatcggacacaatataaaagaatttataacctggctgctgaaacacgatgttgaactgaacggcctttatttcgacactatgattgccgaatacctgatagattccataagaaacggctatcctatagcaagcctttctcacaaatacctgaatcgcagcgttccgtcgctggacgaacttttgggcaagggaaagggagcaaaaaagtactctgaaattccgcccgaaaggctgaaagattacagcgcttataacgtcaaagccatttttgacatatggccgatgcagaaaaaagttcttcaggaaaaccggcaggaggagctttttaatgacatagagcttcctcttataaccgtacttgccagtatggaataccacggtttcaaagttgacgccgcaaaacttcacgaatacggcgaagttcttctgtcacgcataaaagacctggaaaaggtaatttacatgctggccggtgaagaattcaacatcaattcaacgaagcagcttggtaccatattattcgaaaaactgaagcttcccgttgtaaaaagtacaaagaccggatactccaccgacgtcgaggttcttgaagagctttattacaagcatgatataataccatgcataatagaataccgccagcttacaaaactttacaccacctacgccgaaggtcttgaaaaagtgataaatcctgtaaccggtaaaattcattcaagttttaaccagacggttacggctacaggccgcatcagcagtaccgaaccaaatttacagaatatcccagtcagacacgaaatgggaagggaaatacggaaagcttttattccgtcgtcggaaaacgctgtttttgttgatgccgattattcacagatagagcttcgcgtgcttgcccatataacaggcgatgaagccctgataaatgctttcgttaagggggaagatattcatacggccacggcgtcgctggtatttgacgtagctcccgaagatgtgacgccggaactgcgcagaaaggcaaaagccgtaaatttcggcatagtgtacgggatcagtgattacgggctggcacgggatttgggaattacccggaaggaagcaaagcggtatatagacgactattttgccaaataccccaaagtaaaaacctatgtggatgaaattgtgcgggtcggccaggaacaggggtatgtggaaactctgttccacagaagaagatctcttcccgagcttgcatctaaaaattttcaccagcgttctttcggaaaaagggttgcaatgaatacgcccatacagggcactgcagccgatattattaaaattgcgatggtgaaggtatacaaggctttgaaagaatccggccttaaatccaggcttatcctccaggtccatgacgaacttgttattgagacttttgaagacgaactggagactgtcaaggaacttgtcaaaaagtgcatggaagaggccgttgaattgagtgtgccgcttgttgtcgacgtttcaatcgggaaaaactggtatgaagcctcctgatatggatcc

SEQ ID NO: 156 - DNA, 2772 bp, Artificial Sequence
  Description of Artificial Sequence: Synthetic Clostridium stercorarium DNA Polymerase Y816T
atgaaatacctgctgccgaccgctgctgctggtctgctgctcctcgctgcccagccggcgatggccatggatccaaaaataatccttatagacggaaacagtattttaaaccgcggtttttatgccctgtcggggcgatccatgctgactacgtccacaggtctgtataccaatgcggttttcgcttttgtaaatatattgaacaaatatatcgaagaggaaaaccctgattatattgccgttgctttcgatcttagggcaaaaactttccggcacggtctatatgagggatacaaagcgcagcggaaaggcatgcccgatgaacttgcaatgcagatacccctcgcgaaggaagtactgagggcgatgaatattgccataatagagcatgaaggttatgaagccgacgatataatcggcagcctttcgttaaaggccgaaaaagagaattttgacgtaataatccttacgggggacagggattctttccagctgatcagcgacagggtgaaagttatcctgccttcgacgaaagccggaaaaacagagaccaacgtatatgataaacaggccatcattgacaaatacggagttttaccccatcagcttattgacgttaaaggcttaatgggagattcgtcagataatatacccggcgttccgggagtgggtgagaaaacggcgttaagccttatttcagcctacggtacactggaaggtgtttacgagcatattgatgaaataaaacagcctaagctgaaagcatcgctgattgaatataaggatcaggcgtttttaagccgtaagctgggtactattgtaagaaatctggagctgtgtgcttcgctggaggatctgaaaagaaaagaaataaaccgcaaagagcttttgaatgttttcagaaaactcgaatttgaaagtatcatatcaaaaatgaatcttgcttccgctgaggtgacagaattacctcccgcgccggaagagcttaaaataacccatatttcagcggcagaggatcttaagaaatggattgcttacctgcttaaccagaaaaacatttccgtccttcaactgattgaccgggaggattcatacagttcccgtctttcagggctggctttgtgcaccggggatgaggttttttatatcgagaccgggactgcactccccgagaatttgattgcaacagagctgaaagaactgtggcagaatgaaaatattcacaaaatcggacacaatataaaagaatttataacctggctgctgaaacacgatgttgaactgaacggcctttatttcgacactatgattgccgaatacctgatagattccataagaaacggctatcctatagcaagcctttctcacaaatacctgaatcgcagcgttccgtcgctggacgaacttttgggcaagggaaagggagcaaaaaagtactctgaaattccgcccgaaaggctgaaagattacagcgcttataacgtcaaagccatttttgacatatggccgatgcagaaaaaagttcttcaggaaaaccggcaggaggagctttttaatgacatagagcttcctcttataaccgtacttgccagtatggaataccacggtttcaaagttgacgccgcaaaacttcacgaatacggcgaagttcttctgtcacgcataaaagacctggaaaaggtaatttacatgctggccggtgaagaattcaacatcaattcaacgaagcagcttggtaccatattattcgaaaaactgaagcttcccgttgtaaaaagtacaaagaccggatactccaccgacgtcgaggttcttgaagagctttattacaagcatgatataataccatgcataatagaataccgccagcttacaaaactttacaccacctacgccgaaggtcttgaaaaagtgataaatcctgtaaccggtaaaattcattcaagttttaaccagacggttacggctacaggccgcatcagcagtaccgaaccaaatttacagaatatcccagtcagacacgaaatgggaagggaaatacggaaagcttttattccgtcgtcggaaaacgctgtttttgttgatgccgattattcacagatagagcttcgcgtgcttgcccatataacaggcgatgaagccctgataaatgctttcgttaagggggaagatattcatacggccacggcgtcgctggtatttgacgtagctcccgaagatgtgacgccggaactgcgcagaaaggcaaaagccgtaaatttcggcatagtgtacgggatcagtgattacgggctggcacgggatttgggaattacccggaaggaagcaaagcggtatatagacgactattttgccaaataccccaaagtaaaaacctatgtggatgaaattgtgcgggtcggccaggaacaggggtatgtggaaactctgttccacagaagaagaactcttcccgagcttgcatctaaaaattttcaccagcgttctttcggaaaaagggttgcaatgaatacgcccatacagggcactgcagccgatattattaaaattgcgatggtgaaggtatacaaggctttgaaagaatccggccttaaatccaggcttatcctccaggtccatgacgaacttgttattgagacttttgaagacgaactggagactgtcaaggaacttgtcaaaaagtgcatggaagaggccgttgaattgagtgtgccgcttgttgtcgacgtttcaatcgggaaaaactggtatgaagcctcctgatatggatcc

SEQ ID NO: 157 - DNA, 2772 bp, Artificial Sequence
  Description of Artificial Sequence: Synthetic Clostridium stercorarium DNA Polymerase Y816W
atgaaatacctgctgccgaccgctgctgctggtctgctgctcctcgctgcccagccggcgatggccatggatccaaaaataatccttatagacggaaacagtattttaaaccgcggtttttatgccctgtcggggcgatccatgctgactacgtccacaggtctgtataccaatgcggttttcgcttttgtaaatatattgaacaaatatatcgaagaggaaaaccctgattatattgccgttgctttcgatcttagggcaaaaactttccggcacggtctatatgagggatacaaagcgcagcggaaaggcatgcccgatgaacttgcaatgcagatacccctcgcgaaggaagtactgagggcgatgaatattgccataatagagcatgaaggttatgaagccgacgatataatcggcagcctttcgttaaaggccgaaaaagagaattttgacgtaataatccttacgggggacagggattctttccagctgatcagcgacagggtgaaagttatcctgccttcgacgaaagccggaaaaacagagaccaacgtatatgataaacaggccatcattgacaaatacggagttttaccccatcagcttattgacgttaaaggcttaatgggagattcgtcagataatatacccggcgttccgggagtgggtgagaaaacggcgttaagccttatttcagcctacggtacactggaaggtgtttacgagcatattgatgaaataaaacagcctaagctgaaagcatcgctgattgaatataaggatcaggcgtttttaagccgtaagctgggtactattgtaagaaatctggagctgtgtgcttcgctggaggatctgaaaagaaaagaaataaaccgcaaagagcttttgaatgttttcagaaaactcgaatttgaaagtatcatatcaaaaatgaatcttgcttccgctgaggtgacagaattacctcccgcgccggaagagcttaaaataacccatatttcagcggcagaggatcttaagaaatggattgcttacctgcttaaccagaaaaacatttccgtccttcaactgattgaccgggaggattcatacagttcccgtctttcagggctggctttgtgcaccggggatgaggttttttatatcgagaccgggactgcactccccgagaatttgattgcaacagagctgaaagaactgtggcagaatgaaaatattcacaaaatcggacacaatataaaagaatttataacctggctgctgaaacacgatgttgaactgaacggcctttatttcgacactatgattgccgaatacctgatagattccataagaaacggctatcctatagcaagcctttctcacaaatacctgaatcgcagcgttccgtcgctggacgaacttttgggcaagggaaagggagcaaaaaagtactctgaaattccgcccgaaaggctgaaagattacagcgcttataacgtcaaagccatttttgacatatggccgatgcagaaaaaagttcttcaggaaaaccggcaggaggagctttttaatgacatagagcttcctcttataaccgtacttgccagtatggaataccacggtttcaaagttgacgccgcaaaacttcacgaatacggcgaagttcttctgtcacgcataaaagacctggaaaaggtaatttacatgctggccggtgaagaattcaacatcaattcaacgaagcagcttggtaccatattattcgaaaaactgaagcttcccgttgtaaaaagtacaaagaccggatactccaccgacgtcgaggttcttgaagagctttattacaagcatgatataataccatgcataatagaataccgccagcttacaaaactttacaccacctacgccgaaggtcttgaaaaagtgataaatcctgtaaccggtaaaattcattcaagttttaaccagacggttacggctacaggccgcatcagcagtaccgaaccaaatttacagaatatcccagtcagacacgaaatgggaagggaaatacggaaagcttttattccgtcgtcggaaaacgctgtttttgttgatgccgattattcacagatagagcttcgcgtgcttgcccatataacaggcgatgaagccctgataaatgctttcgttaagggggaagatattcatacggccacggcgtcgctggtatttgacgtagctcccgaagatgtgacgccggaactgcgcagaaaggcaaaagccgtaaatttcggcatagtgtacgggatcagtgattacgggctggcacgggatttgggaattacccggaaggaagcaaagcggtatatagacgactattttgccaaataccccaaagtaaaaacctatgtggatgaaattgtgcgggtcggccaggaacaggggtatgtggaaactctgttccacagaagaagatggcttcccgagcttgcatctaaaaattttcaccagcgttctttcggaaaaagggttgcaatgaatacgcccatacagggcactgcagccgatattattaaaattgcgatggtgaaggtatacaaggctttgaaagaatccggccttaaatccaggcttatcctccaggtccatgacgaacttgttattgagacttttgaagacgaactggagactgtcaaggaacttgtcaaaaagtgcatggaagaggccgttgaattgagtgtgccgcttgttgtcgacgtttcaatcgggaaaaactggtatgaagcctcctgatatggatcc

SEQ ID NO: 158 - DNA, 2772 bp, Artificial Sequence
  Description of Artificial Sequence: Synthetic Clostridium stercorarium DNA Polymerase Y816V
atgaaatacctgctgccgaccgctgctgctggtctgctgctcctcgctgcccagccggcgatggccatggatccaaaaataatccttatagacggaaacagtattttaaaccgcggtttttatgccctgtcggggcgatccatgctgactacgtccacaggtctgtataccaatgcggttttcgcttttgtaaatatattgaacaaatatatcgaagaggaaaaccctgattatattgccgttgctttcgatcttagggcaaaaactttccggcacggtctatatgagggatacaaagcgcagcggaaaggcatgcccgatgaacttgcaatgcagatacccctcgcgaaggaagtactgagggcgatgaatattgccataatagagcatgaaggttatgaagccgacgatataatcggcagcctttcgttaaaggccgaaaaagagaattttgacgtaataatccttacgggggacagggattctttccagctgatcagcgacagggtgaaagttatcctgccttcgacgaaagccggaaaaacagagaccaacgtatatgataaacaggccatcattgacaaatacggagttttaccccatcagcttattgacgttaaaggcttaatgggagattcgtcagataatatacccggcgttccgggagtgggtgagaaaacggcgttaagccttatttcagcctacggtacactggaaggtgtttacgagcatattgatgaaataaaacagcctaagctgaaagcatcgctgattgaatataaggatcaggcgtttttaagccgtaagctgggtactattgtaagaaatctggagctgtgtgcttcgctggaggatctgaaaagaaaagaaataaaccgcaaagagcttttgaatgttttcagaaaactcgaatttgaaagtatcatatcaaaaatgaatcttgcttccgctgaggtgacagaattacctcccgcgccggaagagcttaaaataacccatatttcagcggcagaggatcttaagaaatggattgcttacctgcttaaccagaaaaacatttccgtccttcaactgattgaccgggaggattcatacagttcccgtctttcagggctggctttgtgcaccggggatgaggttttttatatcgagaccgggactgcactccccgagaatttgattgcaacagagctgaaagaactgtggcagaatgaaaatattcacaaaatcggacacaatataaaagaatttataacctggctgctgaaacacgatgttgaactgaacggcctttatttcgacactatgattgccgaatacctgatagattccataagaaacggctatcctatagcaagcctttctcacaaatacctgaatcgcagcgttccgtcgctggacgaacttttgggcaagggaaagggagcaaaaaagtactctgaaattccgcccgaaaggctgaaagattacagcgcttataacgtcaaagccatttttgacatatggccgatgcagaaaaaagttcttcaggaaaaccggcaggaggagctttttaatgacatagagcttcctcttataaccgtacttgccagtatggaataccacggtttcaaagttgacgccgcaaaacttcacgaatacggcgaagttcttctgtcacgcataaaagacctggaaaaggtaatttacatgctggccggtgaagaattcaacatcaattcaacgaagcagcttggtaccatattattcgaaaaactgaagcttcccgttgtaaaaagtacaaagaccggatactccaccgacgtcgaggttcttgaagagctttattacaagcatgatataataccatgcataatagaataccgccagcttacaaaactttacaccacctacgccgaaggtcttgaaaaagtgataaatcctgtaaccggtaaaattcattcaagttttaaccagacggttacggctacaggccgcatcagcagtaccgaaccaaatttacagaatatcccagtcagacacgaaatgggaagggaaatacggaaagcttttattccgtcgtcggaaaacgctgtttttgttgatgccgattattcacagatagagcttcgcgtgcttgcccatataacaggcgatgaagccctgataaatgctttcgttaagggggaagatattcatacggccacggcgtcgctggtatttgacgtagctcccgaagatgtgacgccggaactgcgcagaaaggcaaaagccgtaaatttcggcatagtgtacgggatcagtgattacgggctggcacgggatttgggaattacccggaaggaagcaaagcggtatatagacgactattttgccaaataccccaaagtaaaaacctatgtggatgaaattgtgcgggtcggccaggaacaggggtatgtggaaactctgttccacagaagaagagttcttcccgagcttgcatctaaaaattttcaccagcgttctttcggaaaaagggttgcaatgaatacgcccatacagggcactgcagccgatattattaaaattgcgatggtgaaggtatacaaggctttgaaagaatccggccttaaatccaggcttatcctccaggtccatgacgaacttgttattgagacttttgaagacgaactggagactgtcaaggaacttgtcaaaaagtgcatggaagaggccgttgaattgagtgtgccgcttgttgtcgacgtttcaatcgggaaaaactggtatgaagcctcctgatatggatcc

SEQ ID NO: 159 - DNA, 2772 bp, Artificial Sequence
  Description of Artificial Sequence: Synthetic Clostridium stercorarium DNA Polymerase L817A
atgaaatacctgctgccgaccgctgctgctggtctgctgctcctcgctgcccagccggcgatggccatggatccaaaaataatccttatagacggaaacagtattttaaaccgcggtttttatgccctgtcggggcgatccatgctgactacgtccacaggtctgtataccaatgcggttttcgcttttgtaaatatattgaacaaatatatcgaagaggaaaaccctgattatattgccgttgctttcgatcttagggcaaaaactttccggcacggtctatatgagggatacaaagcgcagcggaaaggcatgcccgatgaacttgcaatgcagatacccctcgcgaaggaagtactgagggcgatgaatattgccataatagagcatgaaggttatgaagccgacgatataatcggcagcctttcgttaaaggccgaaaaagagaattttgacgtaataatccttacgggggacagggattctttccagctgatcagcgacagggtgaaagttatcctgccttcgacgaaagccggaaaaacagagaccaacgtatatgataaacaggccatcattgacaaatacggagttttaccccatcagcttattgacgttaaaggcttaatgggagattcgtcagataatatacccggcgttccgggagtgggtgagaaaacggcgttaagccttatttcagcctacggtacactggaaggtgtttacgagcatattgatgaaataaaacagcctaagctgaaagcatcgctgattgaatataaggatcaggcgtttttaagccgtaagctgggtactattgtaagaaatctggagctgtgtgcttcgctggaggatctgaaaagaaaagaaataaaccgcaaagagcttttgaatgttttcagaaaactcgaatttgaaagtatcatatcaaaaatgaatcttgcttccgctgaggtgacagaattacctcccgcgccggaagagcttaaaataacccatatttcagcggcagaggatcttaagaaatggattgcttacctgcttaaccagaaaaacatttccgtccttcaactgattgaccgggaggattcatacagttcccgtctttcagggctggctttgtgcaccggggatgaggttttttatatcgagaccgggactgcactccccgagaatttgattgcaacagagctgaaagaactgtggcagaatgaaaatattcacaaaatcggacacaatataaaagaatttataacctggctgctgaaacacgatgttgaactgaacggcctttatttcgacactatgattgccgaatacctgatagattccataagaaacggctatcctatagcaagcctttctcacaaatacctgaatcgcagcgttccgtcgctggacgaacttttgggcaagggaaagggagcaaaaaagtactctgaaattccgcccgaaaggctgaaagattacagcgcttataacgtcaaagccatttttgacatatggccgatgcagaaaaaagttcttcaggaaaaccggcaggaggagctttttaatgacatagagcttcctcttataaccgtacttgccagtatggaataccacggtttcaaagttgacgccgcaaaacttcacgaatacggcgaagttcttctgtcacgcataaaagacctggaaaaggtaatttacatgctggccggtgaagaattcaacatcaattcaacgaagcagcttggtaccatattattcgaaaaactgaagcttcccgttgtaaaaagtacaaagaccggatactccaccgacgtcgaggttcttgaagagctttattacaagcatgatataataccatgcataatagaataccgccagcttacaaaactttacaccacctacgccgaaggtcttgaaaaagtgataaatcctgtaaccggtaaaattcattcaagttttaaccagacggttacggctacaggccgcatcagcagtaccgaaccaaatttacagaatatcccagtcagacacgaaatgggaagggaaatacggaaagcttttattccgtcgtcggaaaacgctgtttttgttgatgccgattattcacagatagagcttcgcgtgcttgcccatataacaggcgatgaagccctgataaatgctttcgttaagggggaagatattcatacggccacggcgtcgctggtatttgacgtagctcccgaagatgtgacgccggaactgcgcagaaaggcaaaagccgtaaatttcggcatagtgtacgggatcagtgattacgggctggcacgggatttgggaattacccggaaggaagcaaagcggtatatagacgactattttgccaaataccccaaagtaaaaacctatgtggatgaaattgtgcgggtcggccaggaacaggggtatgtggaaactctgttccacagaagaagatacgctcccgagcttgcatctaaaaattttcaccagcgttctttcggaaaaagggttgcaatgaatacgcccatacagggcactgcagccgatattattaaaattgcgatggtgaaggtatacaaggctttgaaagaatccggccttaaatccaggcttatcctccaggtccatgacgaacttgttattgagacttttgaagacgaactggagactgtcaaggaacttgtcaaaaagtgcatggaagaggccgttgaattgagtgtgccgcttgttgtcgacgtttcaatcgggaaaaactggtatgaagcctcctgatatggatcc

SEQ ID NO: 160 - DNA, 2772 bp, Artificial Sequence
  Description of Artificial Sequence: Synthetic Clostridium stercorarium DNA Polymerase L817R
atgaaatacctgctgccgaccgctgctgctggtctgctgctcctcgctgcccagccggcgatggccatggatccaaaaataatccttatagacggaaacagtattttaaaccgcggtttttatgccctgtcggggcgatccatgctgactacgtccacaggtctgtataccaatgcggttttcgcttttgtaaatatattgaacaaatatatcgaagaggaaaaccctgattatattgccgttgctttcgatcttagggcaaaaactttccggcacggtctatatgagggatacaaagcgcagcggaaaggcatgcccgatgaacttgcaatgcagatacccctcgcgaaggaagtactgagggcgatgaatattgccataatagagcatgaaggttatgaagccgacgatataatcggcagcctttcgttaaaggccgaaaaagagaattttgacgtaataatccttacgggggacagggattctttccagctgatcagcgacagggtgaaagttatcctgccttcgacgaaagccggaaaaacagagaccaacgtatatgataaacaggccatcattgacaaatacggagttttaccccatcagcttattgacgttaaaggcttaatgggagattcgtcagataatatacccggcgttccgggagtgggtgagaaaacggcgttaagccttatttcagcctacggtacactggaaggtgtttacgagcatattgatgaaataaaacagcctaagctgaaagcatcgctgattgaatataaggatcaggcgtttttaagccgtaagctgggtactattgtaagaaatctggagctgtgtgcttcgctggaggatctgaaaagaaaagaaataaaccgcaaagagcttttgaatgttttcagaaaactcgaatttgaaagtatcatatcaaaaatgaatcttgcttccgctgaggtgacagaattacctcccgcgccggaagagcttaaaataacccatatttcagcggcagaggatcttaagaaatggattgcttacctgcttaaccagaaaaacatttccgtccttcaactgattgaccgggaggattcatacagttcccgtctttcagggctggctttgtgcaccggggatgaggttttttatatcgagaccgggactgcactccccgagaatttgattgcaacagagctgaaagaactgtggcagaatgaaaatattcacaaaatcggacacaatataaaagaatttataacctggctgctgaaacacgatgttgaactgaacggcctttatttcgacactatgattgccgaatacctgatagattccataagaaacggctatcctatagcaagcctttctcacaaatacctgaatcgcagcgttccgtcgctggacgaacttttgggcaagggaaagggagcaaaaaagtactctgaaattccgcccgaaaggctgaaagattacagcgcttataacgtcaaagccatttttgacatatggccgatgcagaaaaaagttcttcaggaaaaccggcaggaggagctttttaatgacatagagcttcctcttataaccgtacttgccagtatggaataccacggtttcaaagttgacgccgcaaaacttcacgaatacggcgaagttcttctgtcacgcataaaagacctggaaaaggtaatttacatgctggccggtgaagaattcaacatcaattcaacgaagcagcttggtaccatattattcgaaaaactgaagcttcccgttgtaaaaagtacaaagaccggatactccaccgacgtcgaggttcttgaagagctttattacaagcatgatataataccatgcataatagaataccgccagcttacaaaactttacaccacctacgccgaaggtcttgaaaaagtgataaatcctgtaaccggtaaaattcattcaagttttaaccagacggttacggctacaggccgcatcagcagtaccgaaccaaatttacagaatatcccagtcagacacgaaatgggaagggaaatacggaaagcttttattccgtcgtcggaaaacgctgtttttgttgatgccgattattcacagatagagcttcgcgtgcttgcccatataacaggcgatgaagccctgataaatgctttcgttaagggggaagatattcatacggccacggcgtcgctggtatttgacgtagctcccgaagatgtgacgccggaactgcgcagaaaggcaaaagccgtaaatttcggcatagtgtacgggatcagtgattacgggctggcacgggatttgggaattacccggaaggaagcaaagcggtatatagacgactattttgccaaataccccaaagtaaaaacctatgtggatgaaattgtgcgggtcggccaggaacaggggtatgtggaaactctgttccacagaagaagataccgtcccgagcttgcatctaaaaattttcaccagcgttctttcggaaaaagggttgcaatgaatacgcccatacagggcactgcagccgatattattaaaattgcgatggtgaaggtatacaaggctttgaaagaatccggccttaaatccaggcttatcctccaggtccatgacgaacttgttattgagacttttgaagacgaactggagactgtcaaggaacttgtcaaaaagtgcatggaagaggccgttgaattgagtgtgccgcttgttgtcgacgtttcaatcgggaaaaactggtatgaagcctcctgatatggatcc

SEQ ID NO: 161 - DNA, 2772 bp, Artificial Sequence
  Description of Artificial Sequence: Synthetic Clostridium stercorarium DNA Polymerase L817N
atgaaatacctgctgccgaccgctgctgctggtctgctgctcctcgctgcccagccggcgatggccatggatccaaaaataatccttatagacggaaacagtattttaaaccgcggtttttatgccctgtcggggcgatccatgctgactacgtccacaggtctgtataccaatgcggttttcgcttttgtaaatatattgaacaaatatatcgaagaggaaaaccctgattatattgccgttgctttcgatcttagggcaaaaactttccggcacggtctatatgagggatacaaagcgcagcggaaaggcatgcccgatgaacttgcaatgcagatacccctcgcgaaggaagtactgagggcgatgaatattgccataatagagcatgaaggttatgaagccgacgatataatcggcagcctttcgttaaaggccgaaaaagagaattttgacgtaataatccttacgggggacagggattctttccagctgatcagcgacagggtgaaagttatcctgccttcgacgaaagccggaaaaacagagaccaacgtatatgataaacaggccatcattgacaaatacggagttttaccccatcagcttattgacgttaaaggcttaatgggagattcgtcagataatatacccggcgttccgggagtgggtgagaaaacggcgttaagccttatttcagcctacggtacactggaaggtgtttacgagcatattgatgaaataaaacagcctaagctgaaagcatcgctgattgaatataaggatcaggcgtttttaagccgtaagctgggtactattgtaagaaatctggagctgtgtgcttcgctggaggatctgaaaagaaaagaaataaaccgcaaagagcttttgaatgttttcagaaaactcgaatttgaaagtatcatatcaaaaatgaatcttgcttccgctgaggtgacagaattacctcccgcgccggaagagcttaaaataacccatatttcagcggcagaggatcttaagaaatggattgcttacctgcttaaccagaaaaacatttccgtccttcaactgattgaccgggaggattcatacagttcccgtctttcagggctggctttgtgcaccggggatgaggttttttatatcgagaccgggactgcactccccgagaatttgattgcaacagagctgaaagaactgtggcagaatgaaaatattcacaaaatcggacacaatataaaagaatttataacctggctgctgaaacacgatgttgaactgaacggcctttatttcgacactatgattgccgaatacctgatagattccataagaaacggctatcctatagcaagcctttctcacaaatacctgaatcgcagcgttccgtcgctggacgaacttttgggcaagggaaagggagcaaaaaagtactctgaaattccgcccgaaaggctgaaagattacagcgcttataacgtcaaagccatttttgacatatggccgatgcagaaaaaagttcttcaggaaaaccggcaggaggagctttttaatgacatagagcttcctcttataaccgtacttgccagtatggaataccacggtttcaaagttgacgccgcaaaacttcacgaatacggcgaagttcttctgtcacgcataaaagacctggaaaaggtaatttacatgctggccggtgaagaattcaacatcaattcaacgaagcagcttggtaccatattattcgaaaaactgaagcttcccgttgtaaaaagtacaaagaccggatactccaccgacgtcgaggttcttgaagagctttattacaagcatgatataataccatgcataatagaataccgccagcttacaaaactttacaccacctacgccgaaggtcttgaaaaagtgataaatcctgtaaccggtaaaattcattcaagttttaaccagacggttacggctacaggccgcatcagcagtaccgaaccaaatttacagaatatcccagtcagacacgaaatgggaagggaaatacggaaagcttttattccgtcgtcggaaaacgctgtttttgttgatgccgattattcacagatagagcttcgcgtgcttgcccatataacaggcgatgaagccctgataaatgctttcgttaagggggaagatattcatacggccacggcgtcgctggtatttgacgtagctcccgaagatgtgacgccggaactgcgcagaaaggcaaaagccgtaaatttcggcatagtgtacgggatcagtgattacgggctggcacgggatttgggaattacccggaaggaagcaaagcggtatatagacgactattttgccaaataccccaaagtaaaaacctatgtggatgaaattgtgcgggtcggccaggaacaggggtatgtggaaactctgttccacagaagaagatacaatcccgagcttgcatctaaaaattttcaccagcgttctttcggaaaaagggttgcaatgaatacgcccatacagggcactgcagccgatattattaaaattgcgatggtgaaggtatacaaggctttgaaagaatccggccttaaatccaggcttatcctccaggtccatgacgaacttgttattgagacttttgaagacgaactggagactgtcaaggaacttgtcaaaaagtgcatggaagaggccgttgaattgagtgtgccgcttgttgtcgacgtttcaatcgggaaaaactggtatgaagcctcctgatatggatcc

SEQ ID NO: 162 - DNA, 2772 bp, Artificial Sequence
  Description of Artificial Sequence: Synthetic Clostridium stercorarium DNA Polymerase L817D
atgaaatacctgctgccgaccgctgctgctggtctgctgctcctcgctgcccagccggcgatggccatggatccaaaaataatccttatagacggaaacagtattttaaaccgcggtttttatgccctgtcggggcgatccatgctgactacgtccacaggtctgtataccaatgcggttttcgcttttgtaaatatattgaacaaatatatcgaagaggaaaaccctgattatattgccgttgctttcgatcttagggcaaaaactttccggcacggtctatatgagggatacaaagcgcagcggaaaggcatgcccgatgaacttgcaatgcagatacccctcgcgaaggaagtactgagggcgatgaatattgccataatagagcatgaaggttatgaagccgacgatataatcggcagcctttcgttaaaggccgaaaaagagaattttgacgtaataatccttacgggggacagggattctttccagctgatcagcgacagggtgaaagttatcctgccttcgacgaaagccggaaaaacagagaccaacgtatatgataaacaggccatcattgacaaatacggagttttaccccatcagcttattgacgttaaaggcttaatgggagattcgtcagataatatacccggcgttccgggagtgggtgagaaaacggcgttaagccttatttcagcctacggtacactggaaggtgtttacgagcatattgatgaaataaaacagcctaagctgaaagcatcgctgattgaatataaggatcaggcgtttttaagccgtaagctgggtactattgtaagaaatctggagctgtgtgcttcgctggaggatctgaaaagaaaagaaataaaccgcaaagagcttttgaatgttttcagaaaactcgaatttgaaagtatcatatcaaaaatgaatcttgcttccgctgaggtgacagaattacctcccgcgccggaagagcttaaaataacccatatttcagcggcagaggatcttaagaaatggattgcttacctgcttaaccagaaaaacatttccgtccttcaactgattgaccgggaggattcatacagttcccgtctttcagggctggctttgtgcaccggggatgaggttttttatatcgagaccgggactgcactccccgagaatttgattgcaacagagctgaaagaactgtggcagaatgaaaatattcacaaaatcggacacaatataaaagaatttataacctggctgctgaaacacgatgttgaactgaacggcctttatttcgacactatgattgccgaatacctgatagattccataagaaacggctatcctatagcaagcctttctcacaaatacctgaatcgcagcgttccgtcgctggacgaacttttgggcaagggaaagggagcaaaaaagtactctgaaattccgcccgaaaggctgaaagattacagcgcttataacgtcaaagccatttttgacatatggccgatgcagaaaaaagttcttcaggaaaaccggcaggaggagctttttaatgacatagagcttcctcttataaccgtacttgccagtatggaataccacggtttcaaagttgacgccgcaaaacttcacgaatacggcgaagttcttctgtcacgcataaaagacctggaaaaggtaatttacatgctggccggtgaagaattcaacatcaattcaacgaagcagcttggtaccatattattcgaaaaactgaagcttcccgttgtaaaaagtacaaagaccggatactccaccgacgtcgaggttcttgaagagctttattacaagcatgatataataccatgcataatagaataccgccagcttacaaaactttacaccacctacgccgaaggtcttgaaaaagtgataaatcctgtaaccggtaaaattcattcaagttttaaccagacggttacggctacaggccgcatcagcagtaccgaaccaaatttacagaatatcccagtcagacacgaaatgggaagggaaatacggaaagcttttattccgtcgtcggaaaacgctgtttttgttgatgccgattattcacagatagagcttcgcgtgcttgcccatataacaggcgatgaagccctgataaatgctttcgttaagggggaagatattcatacggccacggcgtcgctggtatttgacgtagctcccgaagatgtgacgccggaactgcgcagaaaggcaaaagccgtaaatttcggcatagtgtacgggatcagtgattacgggctggcacgggatttgggaattacccggaaggaagcaaagcggtatatagacgactattttgccaaataccccaaagtaaaaacctatgtggatgaaattgtgcgggtcggccaggaacaggggtatgtggaaactctgttccacagaagaagatacgatcccgagcttgcatctaaaaattttcaccagcgttctttcggaaaaagggttgcaatgaatacgcccatacagggcactgcagccgatattattaaaattgcgatggtgaaggtatacaaggctttgaaagaatccggccttaaatccaggcttatcctccaggtccatgacgaacttgttattgagacttttgaagacgaactggagactgtcaaggaacttgtcaaaaagtgcatggaagaggccgttgaattgagtgtgccgcttgttgtcgacgtttcaatcgggaaaaactggtatgaagcctcctgatatggatcc

SEQ ID NO: 163 - DNA, 2772 bp, Artificial Sequence
  Description of Artificial Sequence: Synthetic Clostridium stercorarium DNA Polymerase L817C
atgaaatacctgctgccgaccgctgctgctggtctgctgctcctcgctgcccagccggcgatggccatggatccaaaaataatccttatagacggaaacagtattttaaaccgcggtttttatgccctgtcggggcgatccatgctgactacgtccacaggtctgtataccaatgcggttttcgcttttgtaaatatattgaacaaatatatcgaagaggaaaaccctgattatattgccgttgctttcgatcttagggcaaaaactttccggcacggtctatatgagggatacaaagcgcagcggaaaggcatgcccgatgaacttgcaatgcagatacccctcgcgaaggaagtactgagggcgatgaatattgccataatagagcatgaaggttatgaagccgacgatataatcggcagcctttcgttaaaggccgaaaaagagaattttgacgtaataatccttacgggggacagggattctttccagctgatcagcgacagggtgaaagttatcctgccttcgacgaaagccggaaaaacagagaccaacgtatatgataaacaggccatcattgacaaatacggagttttaccccatcagcttattgacgttaaaggcttaatgggagattcgtcagataatatacccggcgttccgggagtgggtgagaaaacggcgttaagccttatttcagcctacggtacactggaaggtgtttacgagcatattgatgaaataaaacagcctaagctgaaagcatcgctgattgaatataaggatcaggcgtttttaagccgtaagctgggtactattgtaagaaatctggagctgtgtgcttcgctggaggatctgaaaagaaaagaaataaaccgcaaagagcttttgaatgttttcagaaaactcgaatttgaaagtatcatatcaaaaatgaatcttgcttccgctgaggtgacagaattacctcccgcgccggaagagcttaaaataacccatatttcagcggcagaggatcttaagaaatggattgcttacctgcttaaccagaaaaacatttccgtccttcaactgattgaccgggaggattcatacagttcccgtctttcagggctggctttgtgcaccggggatgaggttttttatatcgagaccgggactgcactccccgagaatttgattgcaacagagctgaaagaactgtggcagaatgaaaatattcacaaaatcggacacaatataaaagaatttataacctggctgctgaaacacgatgttgaactgaacggcctttatttcgacactatgattgccgaatacctgatagattccataagaaacggctatcctatagcaagcctttctcacaaatacctgaatcgcagcgttccgtcgctggacgaacttttgggcaagggaaagggagcaaaaaagtactctgaaattccgcccgaaaggctgaaagattacagcgcttataacgtcaaagccatttttgacatatggccgatgcagaaaaaagttcttcaggaaaaccggcaggaggagctttttaatgacatagagcttcctcttataaccgtacttgccagtatggaataccacggtttcaaagttgacgccgcaaaacttcacgaatacggcgaagttcttctgtcacgcataaaagacctggaaaaggtaatttacatgctggccggtgaagaattcaacatcaattcaacgaagcagcttggtaccatattattcgaaaaactgaagcttcccgttgtaaaaagtacaaagaccggatactccaccgacgtcgaggttcttgaagagctttattacaagcatgatataataccatgcataatagaataccgccagcttacaaaactttacaccacctacgccgaaggtcttgaaaaagtgataaatcctgtaaccggtaaaattcattcaagttttaaccagacggttacggctacaggccgcatcagcagtaccgaaccaaatttacagaatatcccagtcagacacgaaatgggaagggaaatacggaaagcttttattccgtcgtcggaaaacgctgtttttgttgatgccgattattcacagatagagcttcgcgtgcttgcccatataacaggcgatgaagccctgataaatgctttcgttaagggggaagatattcatacggccacggcgtcgctggtatttgacgtagctcccgaagatgtgacgccggaactgcgcagaaaggcaaaagccgtaaatttcggcatagtgtacgggatcagtgattacgggctggcacgggatttgggaattacccggaaggaagcaaagcggtatatagacgactattttgccaaataccccaaagtaaaaacctatgtggatgaaattgtgcgggtcggccaggaacaggggtatgtggaaactctgttccacagaagaagatactgtcccgagcttgcatctaaaaattttcaccagcgttctttcggaaaaagggttgcaatgaatacgcccatacagggcactgcagccgatattattaaaattgcgatggtgaaggtatacaaggctttgaaagaatccggccttaaatccaggcttatcctccaggtccatgacgaacttgttattgagacttttgaagacgaactggagactgtcaaggaacttgtcaaaaagtgcatggaagaggccgttgaattgagtgtgccgcttgttgtcgacgtttcaatcgggaaaaactggtatgaagcctcctgatatggatcc

SEQ ID NO: 164 - DNA, 2772 bp, Artificial Sequence
  Description of Artificial Sequence: Synthetic Clostridium stercorarium DNA Polymerase L817E
atgaaatacctgctgccgaccgctgctgctggtctgctgctcctcgctgcccagccggcgatggccatggatccaaaaataatccttatagacggaaacagtattttaaaccgcggtttttatgccctgtcggggcgatccatgctgactacgtccacaggtctgtataccaatgcggttttcgcttttgtaaatatattgaacaaatatatcgaagaggaaaaccctgattatattgccgttgctttcgatcttagggcaaaaactttccggcacggtctatatgagggatacaaagcgcagcggaaaggcatgcccgatgaacttgcaatgcagatacccctcgcgaaggaagtactgagggcgatgaatattgccataatagagcatgaaggttatgaagccgacgatataatcggcagcctttcgttaaaggccgaaaaagagaattttgacgtaataatccttacgggggacagggattctttccagctgatcagcgacagggtgaaagttatcctgccttcgacgaaagccggaaaaacagagaccaacgtatatgataaacaggccatcattgacaaatacggagttttaccccatcagcttattgacgttaaaggcttaatgggagattcgtcagataatatacccggcgttccgggagtgggtgagaaaacggcgttaagccttatttcagcctacggtacactggaaggtgtttacgagcatattgatgaaataaaacagcctaagctgaaagcatcgctgattgaatataaggatcaggcgtttttaagccgtaagctgggtactattgtaagaaatctggagctgtgtgcttcgctggaggatctgaaaagaaaagaaataaaccgcaaagagcttttgaatgttttcagaaaactcgaatttgaaagtatcatatcaaaaatgaatcttgcttccgctgaggtgacagaattacctcccgcgccggaagagcttaaaataacccatatttcagcggcagaggatcttaagaaatggattgcttacctgcttaaccagaaaaacatttccgtccttcaactgattgaccgggaggattcatacagttcccgtctttcagggctggctttgtgcaccggggatgaggttttttatatcgagaccgggactgcactccccgagaatttgattgcaacagagctgaaagaactgtggcagaatgaaaatattcacaaaatcggacacaatataaaagaatttataacctggctgctgaaacacgatgttgaactgaacggcctttatttcgacactatgattgccgaatacctgatagattccataagaaacggctatcctatagcaagcctttctcacaaatacctgaatcgcagcgttccgtcgctggacgaacttttgggcaagggaaagggagcaaaaaagtactctgaaattccgcccgaaaggctgaaagattacagcgcttataacgtcaaagccatttttgacatatggccgatgcagaaaaaagttcttcaggaaaaccggcaggaggagctttttaatgacatagagcttcctcttataaccgtacttgccagtatggaataccacggtttcaaagttgacgccgcaaaacttcacgaatacggcgaagttcttctgtcacgcataaaagacctggaaaaggtaatttacatgctggccggtgaagaattcaacatcaattcaacgaagcagcttggtaccatattattcgaaaaactgaagcttcccgttgtaaaaagtacaaagaccggatactccaccgacgtcgaggttcttgaagagctttattacaagcatgatataataccatgcataatagaataccgccagcttacaaaactttacaccacctacgccgaaggtcttgaaaaagtgataaatcctgtaaccggtaaaattcattcaagttttaaccagacggttacggctacaggccgcatcagcagtaccgaaccaaatttacagaatatcccagtcagacacgaaatgggaagggaaatacggaaagcttttattccgtcgtcggaaaacgctgtttttgttgatgccgattattcacagatagagcttcgcgtgcttgcccatataacaggcgatgaagccctgataaatgctttcgttaagggggaagatattcatacggccacggcgtcgctggtatttgacgtagctcccgaagatgtgacgccggaactgcgcagaaaggcaaaagccgtaaatttcggcatagtgtacgggatcagtgattacgggctggcacgggatttgggaattacccggaaggaagcaaagcggtatatagacgactattttgccaaataccccaaagtaaaaacctatgtggatgaaattgtgcgggtcggccaggaacaggggtatgtggaaactctgttccacagaagaagatacgaacccgagcttgcatctaaaaattttcaccagcgttctttcggaaaaagggttgcaatgaatacgcccatacagggcactgcagccgatattattaaaattgcgatggtgaaggtatacaaggctttgaaagaatccggccttaaatccaggcttatcctccaggtccatgacgaacttgttattgagacttttgaagacgaactggagactgtcaaggaacttgtcaaaaagtgcatggaagaggccgttgaattgagtgtgccgcttgttgtcgacgtttcaatcgggaaaaactggtatgaagcctcctgatatggatcc

SEQ ID NO: 165 - DNA, 2772 bp, Artificial Sequence
  Description of Artificial Sequence: Synthetic Clostridium stercorarium DNA Polymerase L817Q
atgaaatacctgctgccgaccgctgctgctggtctgctgctcctcgctgcccagccggcgatggccatggatccaaaaataatccttatagacggaaacagtattttaaaccgcggtttttatgccctgtcggggcgatccatgctgactacgtccacaggtctgtataccaatgcggttttcgcttttgtaaatatattgaacaaatatatcgaagaggaaaaccctgattatattgccgttgctttcgatcttagggcaaaaactttccggcacggtctatatgagggatacaaagcgcagcggaaaggcatgcccgatgaacttgcaatgcagatacccctcgcgaaggaagtactgagggcgatgaatattgccataatagagcatgaaggttatgaagccgacgatataatcggcagcctttcgttaaaggccgaaaaagagaattttgacgtaataatccttacgggggacagggattctttccagctgatcagcgacagggtgaaagttatcctgccttcgacgaaagccggaaaaacagagaccaacgtatatgataaacaggccatcattgacaaatacggagttttaccccatcagcttattgacgttaaaggcttaatgggagattcgtcagataatatacccggcgttccgggagtgggtgagaaaacggcgttaagccttatttcagcctacggtacactggaaggtgtttacgagcatattgatgaaataaaacagcctaagctgaaagcatcgctgattgaatataaggatcaggcgtttttaagccgtaagctgggtactattgtaagaaatctggagctgtgtgcttcgctggaggatctgaaaagaaaagaaataaaccgcaaagagcttttgaatgttttcagaaaactcgaatttgaaagtatcatatcaaaaatgaatcttgcttccgctgaggtgacagaattacctcccgcgccggaagagcttaaaataacccatatttcagcggcagaggatcttaagaaatggattgcttacctgcttaaccagaaaaacatttccgtccttcaactgattgaccgggaggattcatacagttcccgtctttcagggctggctttgtgcaccggggatgaggttttttatatcgagaccgggactgcactccccgagaatttgattgcaacagagctgaaagaactgtggcagaatgaaaatattcacaaaatcggacacaatataaaagaatttataacctggctgctgaaacacgatgttgaactgaacggcctttatttcgacactatgattgccgaatacctgatagattccataagaaacggctatcctatagcaagcctttctcacaaatacctgaatcgcagcgttccgtcgctggacgaacttttgggcaagggaaagggagcaaaaaagtactctgaaattccgcccgaaaggctgaaagattacagcgcttataacgtcaaagccatttttgacatatggccgatgcagaaaaaagttcttcaggaaaaccggcaggaggagctttttaatgacatagagcttcctcttataaccgtacttgccagtatggaataccacggtttcaaagttgacgccgcaaaacttcacgaatacggcgaagttcttctgtcacgcataaaagacctggaaaaggtaatttacatgctggccggtgaagaattcaacatcaattcaacgaagcagcttggtaccatattattcgaaaaactgaagcttcccgttgtaaaaagtacaaagaccggatactccaccgacgtcgaggttcttgaagagctttattacaagcatgatataataccatgcataatagaataccgccagcttacaaaactttacaccacctacgccgaaggtcttgaaaaagtgataaatcctgtaaccggtaaaattcattcaagttttaaccagacggttacggctacaggccgcatcagcagtaccgaaccaaatttacagaatatcccagtcagacacgaaatgggaagggaaatacggaaagcttttattccgtcgtcggaaaacgctgtttttgttgatgccgattattcacagatagagcttcgcgtgcttgcccatataacaggcgatgaagccctgataaatgctttcgttaagggggaagatattcatacggccacggcgtcgctggtatttgacgtagctcccgaagatgtgacgccggaactgcgcagaaaggcaaaagccgtaaatttcggcatagtgtacgggatcagtgattacgggctggcacgggatttgggaattacccggaaggaagcaaagcggtatatagacgactattttgccaaataccccaaagtaaaaacctatgtggatgaaattgtgcgggtcggccaggaacaggggtatgtggaaactctgttccacagaagaagataccaacccgagcttgcatctaaaaattttcaccagcgttctttcggaaaaagggttgcaatgaatacgcccatacagggcactgcagccgatattattaaaattgcgatggtgaaggtatacaaggctttgaaagaatccggccttaaatccaggcttatcctccaggtccatgacgaacttgttattgagacttttgaagacgaactggagactgtcaaggaacttgtcaaaaagtgcatggaagaggccgttgaattgagtgtgccgcttgttgtcgacgtttcaatcgggaaaaactggtatgaagcctcctgatatggatcc

SEQ ID NO: 166 - DNA, 2772 bp, Artificial Sequence
  Description of Artificial Sequence: Synthetic Clostridium stercorarium DNA Polymerase L817G
atgaaatacctgctgccgaccgctgctgctggtctgctgctcctcgctgcccagccggcgatggccatggatccaaaaataatccttatagacggaaacagtattttaaaccgcggtttttatgccctgtcggggcgatccatgctgactacgtccacaggtctgtataccaatgcggttttcgcttttgtaaatatattgaacaaatatatcgaagaggaaaaccctgattatattgccgttgctttcgatcttagggcaaaaactttccggcacggtctatatgagggatacaaagcgcagcggaaaggcatgcccgatgaacttgcaatgcagatacccctcgcgaaggaagtactgagggcgatgaatattgccataatagagcatgaaggttatgaagccgacgatataatcggcagcctttcgttaaaggccgaaaaagagaattttgacgtaataatccttacgggggacagggattctttccagctgatcagcgacagggtgaaagttatcctgccttcgacgaaagccggaaaaacagagaccaacgtatatgataaacaggccatcattgacaaatacggagttttaccccatcagcttattgacgttaaaggcttaatgggagattcgtcagataatatacccggcgttccgggagtgggtgagaaaacggcgttaagccttatttcagcctacggtacactggaaggtgtttacgagcatattgatgaaataaaacagcctaagctgaaagcatcgctgattgaatataaggatcaggcgtttttaagccgtaagctgggtactattgtaagaaatctggagctgtgtgcttcgctggaggatctgaaaagaaaagaaataaaccgcaaagagcttttgaatgttttcagaaaactcgaatttgaaagtatcatatcaaaaatgaatcttgcttccgctgaggtgacagaattacctcccgcgccggaagagcttaaaataacccatatttcagcggcagaggatcttaagaaatggattgcttacctgcttaaccagaaaaacatttccgtccttcaactgattgaccgggaggattcatacagttcccgtctttcagggctggctttgtgcaccggggatgaggttttttatatcgagaccgggactgcactccccgagaatttgattgcaacagagctgaaagaactgtggcagaatgaaaatattcacaaaatcggacacaatataaaagaatttataacctggctgctgaaacacgatgttgaactgaacggcctttatttcgacactatgattgccgaatacctgatagattccataagaaacggctatcctatagcaagcctttctcacaaatacctgaatcgcagcgttccgtcgctggacgaacttttgggcaagggaaagggagcaaaaaagtactctgaaattccgcccgaaaggctgaaagattacagcgcttataacgtcaaagccatttttgacatatggccgatgcagaaaaaagttcttcaggaaaaccggcaggaggagctttttaatgacatagagcttcctcttataaccgtacttgccagtatggaataccacggtttcaaagttgacgccgcaaaacttcacgaatacggcgaagttcttctgtcacgcataaaagacctggaaaaggtaatttacatgctggccggtgaagaattcaacatcaattcaacgaagcagcttggtaccatattattcgaaaaactgaagcttcccgttgtaaaaagtacaaagaccggatactccaccgacgtcgaggttcttgaagagctttattacaagcatgatataataccatgcataatagaataccgccagcttacaaaactttacaccacctacgccgaaggtcttgaaaaagtgataaatcctgtaaccggtaaaattcattcaagttttaaccagacggttacggctacaggccgcatcagcagtaccgaaccaaatttacagaatatcccagtcagacacgaaatgggaagggaaatacggaaagcttttattccgtcgtcggaaaacgctgtttttgttgatgccgattattcacagatagagcttcgcgtgcttgcccatataacaggcgatgaagccctgataaatgctttcgttaagggggaagatattcatacggccacggcgtcgctggtatttgacgtagctcccgaagatgtgacgccggaactgcgcagaaaggcaaaagccgtaaatttcggcatagtgtacgggatcagtgattacgggctggcacgggatttgggaattacccggaaggaagcaaagcggtatatagacgactattttgccaaataccccaaagtaaaaacctatgtggatgaaattgtgcgggtcggccaggaacaggggtatgtggaaactctgttccacagaagaagatacggtcccgagcttgcatctaaaaattttcaccagcgttctttcggaaaaagggttgcaatgaatacgcccatacagggcactgcagccgatattattaaaattgcgatggtgaaggtatacaaggctttgaaagaatccggccttaaatccaggcttatcctccaggtccatgacgaacttgttattgagacttttgaagacgaactggagactgtcaaggaacttgtcaaaaagtgcatggaagaggccgttgaattgagtgtgccgcttgttgtcgacgtttcaatcgggaaaaactggtatgaagcctcctgatatggatcc

SEQ ID NO: 167 - DNA, 2772 bp, Artificial Sequence
  Description of Artificial Sequence: Synthetic Clostridium stercorarium DNA Polymerase L817H
atgaaatacctgctgccgaccgctgctgctggtctgctgctcctcgctgcccagccggcgatggccatggatccaaaaataatccttatagacggaaacagtattttaaaccgcggtttttatgccctgtcggggcgatccatgctgactacgtccacaggtctgtataccaatgcggttttcgcttttgtaaatatattgaacaaatatatcgaagaggaaaaccctgattatattgccgttgctttcgatcttagggcaaaaactttccggcacggtctatatgagggatacaaagcgcagcggaaaggcatgcccgatgaacttgcaatgcagatacccctcgcgaaggaagtactgagggcgatgaatattgccataatagagcatgaaggttatgaagccgacgatataatcggcagcctttcgttaaaggccgaaaaagagaattttgacgtaataatccttacgggggacagggattctttccagctgatcagcgacagggtgaaagttatcctgccttcgacgaaagccggaaaaacagagaccaacgtatatgataaacaggccatcattgacaaatacggagttttaccccatcagcttattgacgttaaaggcttaatgggagattcgtcagataatatacccggcgttccgggagtgggtgagaaaacggcgttaagccttatttcagcctacggtacactggaaggtgtttacgagcatattgatgaaataaaacagcctaagctgaaagcatcgctgattgaatataaggatcaggcgtttttaagccgtaagctgggtactattgtaagaaatctggagctgtgtgcttcgctggaggatctgaaaagaaaagaaataaaccgcaaagagcttttgaatgttttcagaaaactcgaatttgaaagtatcatatcaaaaatgaatcttgcttccgctgaggtgacagaattacctcccgcgccggaagagcttaaaataacccatatttcagcggcagaggatcttaagaaatggattgcttacctgcttaaccagaaaaacatttccgtccttcaactgattgaccgggaggattcatacagttcccgtctttcagggctggctttgtgcaccggggatgaggttttttatatcgagaccgggactgcactccccgagaatttgattgcaacagagctgaaagaactgtggcagaatgaaaatattcacaaaatcggacacaatataaaagaatttataacctggctgctgaaacacgatgttgaactgaacggcctttatttcgacactatgattgccgaatacctgatagattccataagaaacggctatcctatagcaagcctttctcacaaatacctgaatcgcagcgttccgtcgctggacgaacttttgggcaagggaaagggagcaaaaaagtactctgaaattccgcccgaaaggctgaaagattacagcgcttataacgtcaaagccatttttgacatatggccgatgcagaaaaaagttcttcaggaaaaccggcaggaggagctttttaatgacatagagcttcctcttataaccgtacttgccagtatggaataccacggtttcaaagttgacgccgcaaaacttcacgaatacggcgaagttcttctgtcacgcataaaagacctggaaaaggtaatttacatgctggccggtgaagaattcaacatcaattcaacgaagcagcttggtaccatattattcgaaaaactgaagcttcccgttgtaaaaagtacaaagaccggatactccaccgacgtcgaggttcttgaagagctttattacaagcatgatataataccatgcataatagaataccgccagcttacaaaactttacaccacctacgccgaaggtcttgaaaaagtgataaatcctgtaaccggtaaaattcattcaagttttaaccagacggttacggctacaggccgcatcagcagtaccgaaccaaatttacagaatatcccagtcagacacgaaatgggaagggaaatacggaaagcttttattccgtcgtcggaaaacgctgtttttgttgatgccgattattcacagatagagcttcgcgtgcttgcccatataacaggcgatgaagccctgataaatgctttcgttaagggggaagatattcatacggccacggcgtcgctggtatttgacgtagctcccgaagatgtgacgccggaactgcgcagaaaggcaaaagccgtaaatttcggcatagtgtacgggatcagtgattacgggctggcacgggatttgggaattacccggaaggaagcaaagcggtatatagacgactattttgccaaataccccaaagtaaaaacctatgtggatgaaattgtgcgggtcggccaggaacaggggtatgtggaaactctgttccacagaagaagataccatcccgagcttgcatctaaaaattttcaccagcgttctttcggaaaaagggttgcaatgaatacgcccatacagggcactgcagccgatattattaaaattgcgatggtgaaggtatacaaggctttgaaagaatccggccttaaatccaggcttatcctccaggtccatgacgaacttgttattgagacttttgaagacgaactggagactgtcaaggaacttgtcaaaaagtgcatggaagaggccgttgaattgagtgtgccgcttgttgtcgacgtttcaatcgggaaaaactggtatgaagcctcctgatatggatcc

SEQ ID NO: 168 - DNA, 2772 bp, Artificial Sequence
  Description of Artificial Sequence: Synthetic Clostridium stercorarium DNA Polymerase L817I
atgaaatacctgctgccgaccgctgctgctggtctgctgctcctcgctgcccagccggcgatggccatggatccaaaaataatccttatagacggaaacagtattttaaaccgcggtttttatgccctgtcggggcgatccatgctgactacgtccacaggtctgtataccaatgcggttttcgcttttgtaaatatattgaacaaatatatcgaagaggaaaaccctgattatattgccgttgctttcgatcttagggcaaaaactttccggcacggtctatatgagggatacaaagcgcagcggaaaggcatgcccgatgaacttgcaatgcagatacccctcgcgaaggaagtactgagggcgatgaatattgccataatagagcatgaaggttatgaagccgacgatataatcggcagcctttcgttaaaggccgaaaaagagaattttgacgtaataatccttacgggggacagggattctttccagctgatcagcgacagggtgaaagttatcctgccttcgacgaaagccggaaaaacagagaccaacgtatatgataaacaggccatcattgacaaatacggagttttaccccatcagcttattgacgttaaaggcttaatgggagattcgtcagataatatacccggcgttccgggagtgggtgagaaaacggcgttaagccttatttcagcctacggtacactggaaggtgtttacgagcatattgatgaaataaaacagcctaagctgaaagcatcgctgattgaatataaggatcaggcgtttttaagccgtaagctgggtactattgtaagaaatctggagctgtgtgcttcgctggaggatctgaaaagaaaagaaataaaccgcaaagagcttttgaatgttttcagaaaactcgaatttgaaagtatcatatcaaaaatgaatcttgcttccgctgaggtgacagaattacctcccgcgccggaagagcttaaaataacccatatttcagcggcagaggatcttaagaaatggattgcttacctgcttaaccagaaaaacatttccgtccttcaactgattgaccgggaggattcatacagttcccgtctttcagggctggctttgtgcaccggggatgaggttttttatatcgagaccgggactgcactccccgagaatttgattgcaacagagctgaaagaactgtggcagaatgaaaatattcacaaaatcggacacaatataaaagaatttataacctggctgctgaaacacgatgttgaactgaacggcctttatttcgacactatgattgccgaatacctgatagattccataagaaacggctatcctatagcaagcctttctcacaaatacctgaatcgcagcgttccgtcgctggacgaacttttgggcaagggaaagggagcaaaaaagtactctgaaattccgcccgaaaggctgaaagattacagcgcttataacgtcaaagccatttttgacatatggccgatgcagaaaaaagttcttcaggaaaaccggcaggaggagctttttaatgacatagagcttcctcttataaccgtacttgccagtatggaataccacggtttcaaagttgacgccgcaaaacttcacgaatacggcgaagttcttctgtcacgcataaaagacctggaaaaggtaatttacatgctggccggtgaagaattcaacatcaattcaacgaagcagcttggtaccatattattcgaaaaactgaagcttcccgttgtaaaaagtacaaagaccggatactccaccgacgtcgaggttcttgaagagctttattacaagcatgatataataccatgcataatagaataccgccagcttacaaaactttacaccacctacgccgaaggtcttgaaaaagtgataaatcctgtaaccggtaaaattcattcaagttttaaccagacggttacggctacaggccgcatcagcagtaccgaaccaaatttacagaatatcccagtcagacacgaaatgggaagggaaatacggaaagcttttattccgtcgtcggaaaacgctgtttttgttgatgccgattattcacagatagagcttcgcgtgcttgcccatataacaggcgatgaagccctgataaatgctttcgttaagggggaagatattcatacggccacggcgtcgctggtatttgacgtagctcccgaagatgtgacgccggaactgcgcagaaaggcaaaagccgtaaatttcggcatagtgtacgggatcagtgattacgggctggcacgggatttgggaattacccggaaggaagcaaagcggtatatagacgactattttgccaaataccccaaagtaaaaacctatgtggatgaaattgtgcgggtcggccaggaacaggggtatgtggaaactctgttccacagaagaagatacattcccgagcttgcatctaaaaattttcaccagcgttctttcggaaaaagggttgcaatgaatacgcccatacagggcactgcagccgatattattaaaattgcgatggtgaaggtatacaaggctttgaaagaatccggccttaaatccaggcttatcctccaggtccatgacgaacttgttattgagacttttgaagacgaactggagactgtcaaggaacttgtcaaaaagtgcatggaagaggccgttgaattgagtgtgccgcttgttgtcgacgtttcaatcgggaaaaactggtatgaagcctcctgatatggatcc

SEQ ID NO: 169 - DNA, 2772 bp, Artificial Sequence
  Description of Artificial Sequence: Synthetic Clostridium stercorarium DNA Polymerase L817K
atgaaatacctgctgccgaccgctgctgctggtctgctgctcctcgctgcccagccggcgatggccatggatccaaaaataatccttatagacggaaacagtattttaaaccgcggtttttatgccctgtcggggcgatccatgctgactacgtccacaggtctgtataccaatgcggttttcgcttttgtaaatatattgaacaaatatatcgaagaggaaaaccctgattatattgccgttgctttcgatcttagggcaaaaactttccggcacggtctatatgagggatacaaagcgcagcggaaaggcatgcccgatgaacttgcaatgcagatacccctcgcgaaggaagtactgagggcgatgaatattgccataatagagcatgaaggttatgaagccgacgatataatcggcagcctttcgttaaaggccgaaaaagagaattttgacgtaataatccttacgggggacagggattctttccagctgatcagcgacagggtgaaagttatcctgccttcgacgaaagccggaaaaacagagaccaacgtatatgataaacaggccatcattgacaaatacggagttttaccccatcagcttattgacgttaaaggcttaatgggagattcgtcagataatatacccggcgttccgggagtgggtgagaaaacggcgttaagccttatttcagcctacggtacactggaaggtgtttacgagcatattgatgaaataaaacagcctaagctgaaagcatcgctgattgaatataaggatcaggcgtttttaagccgtaagctgggtactattgtaagaaatctggagctgtgtgcttcgctggaggatctgaaaagaaaagaaataaaccgcaaagagcttttgaatgttttcagaaaactcgaatttgaaagtatcatatcaaaaatgaatcttgcttccgctgaggtgacagaattacctcccgcgccggaagagcttaaaataacccatatttcagcggcagaggatcttaagaaatggattgcttacctgcttaaccagaaaaacatttccgtccttcaactgattgaccgggaggattcatacagttcccgtctttcagggctggctttgtgcaccggggatgaggttttttatatcgagaccgggactgcactccccgagaatttgattgcaacagagctgaaagaactgtggcagaatgaaaatattcacaaaatcggacacaatataaaagaatttataacctggctgctgaaacacgatgttgaactgaacggcctttatttcgacactatgattgccgaatacctgatagattccataagaaacggctatcctatagcaagcctttctcacaaatacctgaatcgcagcgttccgtcgctggacgaacttttgggcaagggaaagggagcaaaaaagtactctgaaattccgcccgaaaggctgaaagattacagcgcttataacgtcaaagccatttttgacatatggccgatgcagaaaaaagttcttcaggaaaaccggcaggaggagctttttaatgacatagagcttcctcttataaccgtacttgccagtatggaataccacggtttcaaagttgacgccgcaaaacttcacgaatacggcgaagttcttctgtcacgcataaaagacctggaaaaggtaatttacatgctggccggtgaagaattcaacatcaattcaacgaagcagcttggtaccatattattcgaaaaactgaagcttcccgttgtaaaaagtacaaagaccggatactccaccgacgtcgaggttcttgaagagctttattacaagcatgatataataccatgcataatagaataccgccagcttacaaaactttacaccacctacgccgaaggtcttgaaaaagtgataaatcctgtaaccggtaaaattcattcaagttttaaccagacggttacggctacaggccgcatcagcagtaccgaaccaaatttacagaatatcccagtcagacacgaaatgggaagggaaatacggaaagcttttattccgtcgtcggaaaacgctgtttttgttgatgccgattattcacagatagagcttcgcgtgcttgcccatataacaggcgatgaagccctgataaatgctttcgttaagggggaagatattcatacggccacggcgtcgctggtatttgacgtagctcccgaagatgtgacgccggaactgcgcagaaaggcaaaagccgtaaatttcggcatagtgtacgggatcagtgattacgggctggcacgggatttgggaattacccggaaggaagcaaagcggtatatagacgactattttgccaaataccccaaagtaaaaacctatgtggatgaaattgtgcgggtcggccaggaacaggggtatgtggaaactctgttccacagaagaagatacaaacccgagcttgcatctaaaaattttcaccagcgttctttcggaaaaagggttgcaatgaatacgcccatacagggcactgcagccgatattattaaaattgcgatggtgaaggtatacaaggctttgaaagaatccggccttaaatccaggcttatcctccaggtccatgacgaacttgttattgagacttttgaagacgaactggagactgtcaaggaacttgtcaaaaagtgcatggaagaggccgttgaattgagtgtgccgcttgttgtcgacgtttcaatcgggaaaaactggtatgaagcctcctgatatggatcc

SEQ ID NO: 170 - DNA, 2772 bp, Artificial Sequence
  Description of Artificial Sequence: Synthetic Clostridium stercorarium DNA Polymerase L817M
atgaaatacctgctgccgaccgctgctgctggtctgctgctcctcgctgcccagccggcgatggccatggatccaaaaataatccttatagacggaaacagtattttaaaccgcggtttttatgccctgtcggggcgatccatgctgactacgtccacaggtctgtataccaatgcggttttcgcttttgtaaatatattgaacaaatatatcgaagaggaaaaccctgattatattgccgttgctttcgatcttagggcaaaaactttccggcacggtctatatgagggatacaaagcgcagcggaaaggcatgcccgatgaacttgcaatgcagatacccctcgcgaaggaagtactgagggcgatgaatattgccataatagagcatgaaggttatgaagccgacgatataatcggcagcctttcgttaaaggccgaaaaagagaattttgacgtaataatccttacgggggacagggattctttccagctgatcagcgacagggtgaaagttatcctgccttcgacgaaagccggaaaaacagagaccaacgtatatgataaacaggccatcattgacaaatacggagttttaccccatcagcttattgacgttaaaggcttaatgggagattcgtcagataatatacccggcgttccgggagtgggtgagaaaacggcgttaagccttatttcagcctacggtacactggaaggtgtttacgagcatattgatgaaataaaacagcctaagctgaaagcatcgctgattgaatataaggatcaggcgtttttaagccgtaagctgggtactattgtaagaaatctggagctgtgtgcttcgctggaggatctgaaaagaaaagaaataaaccgcaaagagcttttgaatgttttcagaaaactcgaatttgaaagtatcatatcaaaaatgaatcttgcttccgctgaggtgacagaattacctcccgcgccggaagagcttaaaataacccatatttcagcggcagaggatcttaagaaatggattgcttacctgcttaaccagaaaaacatttccgtccttcaactgattgaccgggaggattcatacagttcccgtctttcagggctggctttgtgcaccggggatgaggttttttatatcgagaccgggactgcactccccgagaatttgattgcaacagagctgaaagaactgtggcagaatgaaaatattcacaaaatcggacacaatataaaagaatttataacctggctgctgaaacacgatgttgaactgaacggcctttatttcgacactatgattgccgaatacctgatagattccataagaaacggctatcctatagcaagcctttctcacaaatacctgaatcgcagcgttccgtcgctggacgaacttttgggcaagggaaagggagcaaaaaagtactctgaaattccgcccgaaaggctgaaagattacagcgcttataacgtcaaagccatttttgacatatggccgatgcagaaaaaagttcttcaggaaaaccggcaggaggagctttttaatgacatagagcttcctcttataaccgtacttgccagtatggaataccacggtttcaaagttgacgccgcaaaacttcacgaatacggcgaagttcttctgtcacgcataaaagacctggaaaaggtaatttacatgctggccggtgaagaattcaacatcaattcaacgaagcagcttggtaccatattattcgaaaaactgaagcttcccgttgtaaaaagtacaaagaccggatactccaccgacgtcgaggttcttgaagagctttattacaagcatgatataataccatgcataatagaataccgccagcttacaaaactttacaccacctacgccgaaggtcttgaaaaagtgataaatcctgtaaccggtaaaattcattcaagttttaaccagacggttacggctacaggccgcatcagcagtaccgaaccaaatttacagaatatcccagtcagacacgaaatgggaagggaaatacggaaagcttttattccgtcgtcggaaaacgctgtttttgttgatgccgattattcacagatagagcttcgcgtgcttgcccatataacaggcgatgaagccctgataaatgctttcgttaagggggaagatattcatacggccacggcgtcgctggtatttgacgtagctcccgaagatgtgacgccggaactgcgcagaaaggcaaaagccgtaaatttcggcatagtgtacgggatcagtgattacgggctggcacgggatttgggaattacccggaaggaagcaaagcggtatatagacgactattttgccaaataccccaaagtaaaaacctatgtggatgaaattgtgcgggtcggccaggaacaggggtatgtggaaactctgttccacagaagaagatacatgcccgagcttgcatctaaaaattttcaccagcgttctttcggaaaaagggttgcaatgaatacgcccatacagggcactgcagccgatattattaaaattgcgatggtgaaggtatacaaggctttgaaagaatccggccttaaatccaggcttatcctccaggtccatgacgaacttgttattgagacttttgaagacgaactggagactgtcaaggaacttgtcaaaaagtgcatggaagaggccgttgaattgagtgtgccgcttgttgtcgacgtttcaatcgggaaaaactggtatgaagcctcctgatatggatcc

SEQ ID NO: 171 - DNA, 2772 bp, Artificial Sequence
  Description of Artificial Sequence: Synthetic Clostridium stercorarium DNA Polymerase L817F
atgaaatacctgctgccgaccgctgctgctggtctgctgctcctcgctgcccagccggcgatggccatggatccaaaaataatccttatagacggaaacagtattttaaaccgcggtttttatgccctgtcggggcgatccatgctgactacgtccacaggtctgtataccaatgcggttttcgcttttgtaaatatattgaacaaatatatcgaagaggaaaaccctgattatattgccgttgctttcgatcttagggcaaaaactttccggcacggtctatatgagggatacaaagcgcagcggaaaggcatgcccgatgaacttgcaatgcagatacccctcgcgaaggaagtactgagggcgatgaatattgccataatagagcatgaaggttatgaagccgacgatataatcggcagcctttcgttaaaggccgaaaaagagaattttgacgtaataatccttacgggggacagggattctttccagctgatcagcgacagggtgaaagttatcctgccttcgacgaaagccggaaaaacagagaccaacgtatatgataaacaggccatcattgacaaatacggagttttaccccatcagcttattgacgttaaaggcttaatgggagattcgtcagataatatacccggcgttccgggagtgggtgagaaaacggcgttaagccttatttcagcctacggtacactggaaggtgtttacgagcatattgatgaaataaaacagcctaagctgaaagcatcgctgattgaatataaggatcaggcgtttttaagccgtaagctgggtactattgtaagaaatctggagctgtgtgcttcgctggaggatctgaaaagaaaagaaataaaccgcaaagagcttttgaatgttttcagaaaactcgaatttgaaagtatcatatcaaaaatgaatcttgcttccgctgaggtgacagaattacctcccgcgccggaagagcttaaaataacccatatttcagcggcagaggatcttaagaaatggattgcttacctgcttaaccagaaaaacatttccgtccttcaactgattgaccgggaggattcatacagttcccgtctttcagggctggctttgtgcaccggggatgaggttttttatatcgagaccgggactgcactccccgagaatttgattgcaacagagctgaaagaactgtggcagaatgaaaatattcacaaaatcggacacaatataaaagaatttataacctggctgctgaaacacgatgttgaactgaacggcctttatttcgacactatgattgccgaatacctgatagattccataagaaacggctatcctatagcaagcctttctcacaaatacctgaatcgcagcgttccgtcgctggacgaacttttgggcaagggaaagggagcaaaaaagtactctgaaattccgcccgaaaggctgaaagattacagcgcttataacgtcaaagccatttttgacatatggccgatgcagaaaaaagttcttcaggaaaaccggcaggaggagctttttaatgacatagagcttcctcttataaccgtacttgccagtatggaataccacggtttcaaagttgacgccgcaaaacttcacgaatacggcgaagttcttctgtcacgcataaaagacctggaaaaggtaatttacatgctggccggtgaagaattcaacatcaattcaacgaagcagcttggtaccatattattcgaaaaactgaagcttcccgttgtaaaaagtacaaagaccggatactccaccgacgtcgaggttcttgaagagctttattacaagcatgatataataccatgcataatagaataccgccagcttacaaaactttacaccacctacgccgaaggtcttgaaaaagtgataaatcctgtaaccggtaaaattcattcaagttttaaccagacggttacggctacaggccgcatcagcagtaccgaaccaaatttacagaatatcccagtcagacacgaaatgggaagggaaatacggaaagcttttattccgtcgtcggaaaacgctgtttttgttgatgccgattattcacagatagagcttcgcgtgcttgcccatataacaggcgatgaagccctgataaatgctttcgttaagggggaagatattcatacggccacggcgtcgctggtatttgacgtagctcccgaagatgtgacgccggaactgcgcagaaaggcaaaagccgtaaatttcggcatagtgtacgggatcagtgattacgggctggcacgggatttgggaattacccggaaggaagcaaagcggtatatagacgactattttgccaaataccccaaagtaaaaacctatgtggatgaaattgtgcgggtcggccaggaacaggggtatgtggaaactctgttccacagaagaagatactttcccgagcttgcatctaaaaattttcaccagcgttctttcggaaaaagggttgcaatgaatacgcccatacagggcactgcagccgatattattaaaattgcgatggtgaaggtatacaaggctttgaaagaatccggccttaaatccaggcttatcctccaggtccatgacgaacttgttattgagacttttgaagacgaactggagactgtcaaggaacttgtcaaaaagtgcatggaagaggccgttgaattgagtgtgccgcttgttgtcgacgtttcaatcgggaaaaactggtatgaagcctcctgatatggatcc

SEQ ID NO: 172 - DNA, 2772 bp, Artificial Sequence
  Description of Artificial Sequence: Synthetic Clostridium stercorarium DNA Polymerase L817P
atgaaatacctgctgccgaccgctgctgctggtctgctgctcctcgctgcccagccggcgatggccatggatccaaaaataatccttatagacggaaacagtattttaaaccgcggtttttatgccctgtcggggcgatccatgctgactacgtccacaggtctgtataccaatgcggttttcgcttttgtaaatatattgaacaaatatatcgaagaggaaaaccctgattatattgccgttgctttcgatcttagggcaaaaactttccggcacggtctatatgagggatacaaagcgcagcggaaaggcatgcccgatgaacttgcaatgcagatacccctcgcgaaggaagtactgagggcgatgaatattgccataatagagcatgaaggttatgaagccgacgatataatcggcagcctttcgttaaaggccgaaaaagagaattttgacgtaataatccttacgggggacagggattctttccagctgatcagcgacagggtgaaagttatcctgccttcgacgaaagccggaaaaacagagaccaacgtatatgataaacaggccatcattgacaaatacggagttttaccccatcagcttattgacgttaaaggcttaatgggagattcgtcagataatatacccggcgttccgggagtgggtgagaaaacggcgttaagccttatttcagcctacggtacactggaaggtgtttacgagcatattgatgaaataaaacagcctaagctgaaagcatcgctgattgaatataaggatcaggcgtttttaagccgtaagctgggtactattgtaagaaatctggagctgtgtgcttcgctggaggatctgaaaagaaaagaaataaaccgcaaagagcttttgaatgttttcagaaaactcgaatttgaaagtatcatatcaaaaatgaatcttgcttccgctgaggtgacagaattacctcccgcgccggaagagcttaaaataacccatatttcagcggcagaggatcttaagaaatggattgcttacctgcttaaccagaaaaacatttccgtccttcaactgattgaccgggaggattcatacagttcccgtctttcagggctggctttgtgcaccggggatgaggttttttatatcgagaccgggactgcactccccgagaatttgattgcaacagagctgaaagaactgtggcagaatgaaaatattcacaaaatcggacacaatataaaagaatttataacctggctgctgaaacacgatgttgaactgaacggcctttatttcgacactatgattgccgaatacctgatagattccataagaaacggctatcctatagcaagcctttctcacaaatacctgaatcgcagcgttccgtcgctggacgaacttttgggcaagggaaagggagcaaaaaagtactctgaaattccgcccgaaaggctgaaagattacagcgcttataacgtcaaagccatttttgacatatggccgatgcagaaaaaagttcttcaggaaaaccggcaggaggagctttttaatgacatagagcttcctcttataaccgtacttgccagtatggaataccacggtttcaaagttgacgccgcaaaacttcacgaatacggcgaagttcttctgtcacgcataaaagacctggaaaaggtaatttacatgctggccggtgaagaattcaacatcaattcaacgaagcagcttggtaccatattattcgaaaaactgaagcttcccgttgtaaaaagtacaaagaccggatactccaccgacgtcgaggttcttgaagagctttattacaagcatgatataataccatgcataatagaataccgccagcttacaaaactttacaccacctacgccgaaggtcttgaaaaagtgataaatcctgtaaccggtaaaattcattcaagttttaaccagacggttacggctacaggccgcatcagcagtaccgaaccaaatttacagaatatcccagtcagacacgaaatgggaagggaaatacggaaagcttttattccgtcgtcggaaaacgctgtttttgttgatgccgattattcacagatagagcttcgcgtgcttgcccatataacaggcgatgaagccctgataaatgctttcgttaagggggaagatattcatacggccacggcgtcgctggtatttgacgtagctcccgaagatgtgacgccggaactgcgcagaaaggcaaaagccgtaaatttcggcatagtgtacgggatcagtgattacgggctggcacgggatttgggaattacccggaaggaagcaaagcggtatatagacgactattttgccaaataccccaaagtaaaaacctatgtggatgaaattgtgcgggtcggccaggaacaggggtatgtggaaactctgttccacagaagaagataccctcccgagcttgcatctaaaaattttcaccagcgttctttcggaaaaagggttgcaatgaatacgcccatacagggcactgcagccgatattattaaaattgcgatggtgaaggtatacaaggctttgaaagaatccggccttaaatccaggcttatcctccaggtccatgacgaacttgttattgagacttttgaagacgaactggagactgtcaaggaacttgtcaaaaagtgcatggaagaggccgttgaattgagtgtgccgcttgttgtcgacgtttcaatcgggaaaaactggtatgaagcctcctgatatggatcc

SEQ ID NO: 173 - DNA, 2772 bp, Artificial Sequence
  Description of Artificial Sequence: Synthetic Clostridium stercorarium DNA Polymerase L817S
atgaaatacctgctgccgaccgctgctgctggtctgctgctcctcgctgcccagccggcgatggccatggatccaaaaataatccttatagacggaaacagtattttaaaccgcggtttttatgccctgtcggggcgatccatgctgactacgtccacaggtctgtataccaatgcggttttcgcttttgtaaatatattgaacaaatatatcgaagaggaaaaccctgattatattgccgttgctttcgatcttagggcaaaaactttccggcacggtctatatgagggatacaaagcgcagcggaaaggcatgcccgatgaacttgcaatgcagatacccctcgcgaaggaagtactgagggcgatgaatattgccataatagagcatgaaggttatgaagccgacgatataatcggcagcctttcgttaaaggccgaaaaagagaattttgacgtaataatccttacgggggacagggattctttccagctgatcagcgacagggtgaaagttatcctgccttcgacgaaagccggaaaaacagagaccaacgtatatgataaacaggccatcattgacaaatacggagttttaccccatcagcttattgacgttaaaggcttaatgggagattcgtcagataatatacccggcgttccgggagtgggtgagaaaacggcgttaagccttatttcagcctacggtacactggaaggtgtttacgagcatattgatgaaataaaacagcctaagctgaaagcatcgctgattgaatataaggatcaggcgtttttaagccgtaagctgggtactattgtaagaaatctggagctgtgtgcttcgctggaggatctgaaaagaaaagaaataaaccgcaaagagcttttgaatgttttcagaaaactcgaatttgaaagtatcatatcaaaaatgaatcttgcttccgctgaggtgacagaattacctcccgcgccggaagagcttaaaataacccatatttcagcggcagaggatcttaagaaatggattgcttacctgcttaaccagaaaaacatttccgtccttcaactgattgaccgggaggattcatacagttcccgtctttcagggctggctttgtgcaccggggatgaggttttttatatcgagaccgggactgcactccccgagaatttgattgcaacagagctgaaagaactgtggcagaatgaaaatattcacaaaatcggacacaatataaaagaatttataacctggctgctgaaacacgatgttgaactgaacggcctttatttcgacactatgattgccgaatacctgatagattccataagaaacggctatcctatagcaagcctttctcacaaatacctgaatcgcagcgttccgtcgctggacgaacttttgggcaagggaaagggagcaaaaaagtactctgaaattccgcccgaaaggctgaaagattacagcgcttataacgtcaaagccatttttgacatatggccgatgcagaaaaaagttcttcaggaaaaccggcaggaggagctttttaatgacatagagcttcctcttataaccgtacttgccagtatggaataccacggtttcaaagttgacgccgcaaaacttcacgaatacggcgaagttcttctgtcacgcataaaagacctggaaaaggtaatttacatgctggccggtgaagaattcaacatcaattcaacgaagcagcttggtaccatattattcgaaaaactgaagcttcccgttgtaaaaagtacaaagaccggatactccaccgacgtcgaggttcttgaagagctttattacaagcatgatataataccatgcataatagaataccgccagcttacaaaactttacaccacctacgccgaaggtcttgaaaaagtgataaatcctgtaaccggtaaaattcattcaagttttaaccagacggttacggctacaggccgcatcagcagtaccgaaccaaatttacagaatatcccagtcagacacgaaatgggaagggaaatacggaaagcttttattccgtcgtcggaaaacgctgtttttgttgatgccgattattcacagatagagcttcgcgtgcttgcccatataacaggcgatgaagccctgataaatgctttcgttaagggggaagatattcatacggccacggcgtcgctggtatttgacgtagctcccgaagatgtgacgccggaactgcgcagaaaggcaaaagccgtaaatttcggcatagtgtacgggatcagtgattacgggctggcacgggatttgggaattacccggaaggaagcaaagcggtatatagacgactattttgccaaataccccaaagtaaaaacctatgtggatgaaattgtgcgggtcggccaggaacaggggtatgtggaaactctgttccacagaagaagatactctcccgagcttgcatctaaaaattttcaccagcgttctttcggaaaaagggttgcaatgaatacgcccatacagggcactgcagccgatattattaaaattgcgatggtgaaggtatacaaggctttgaaagaatccggccttaaatccaggcttatcctccaggtccatgacgaacttgttattgagacttttgaagacgaactggagactgtcaaggaacttgtcaaaaagtgcatggaagaggccgttgaattgagtgtgccgcttgttgtcgacgtttcaatcgggaaaaactggtatgaagcctcctgatatggatcc

SEQ ID NO: 174 - DNA, 2772 bp, Artificial Sequence
  Description of Artificial Sequence: Synthetic Clostridium stercorarium DNA Polymerase L817T
atgaaatacctgctgccgaccgctgctgctggtctgctgctcctcgctgcccagccggcgatggccatggatccaaaaataatccttatagacggaaacagtattttaaaccgcggtttttatgccctgtcggggcgatccatgctgactacgtccacaggtctgtataccaatgcggttttcgcttttgtaaatatattgaacaaatatatcgaagaggaaaaccctgattatattgccgttgctttcgatcttagggcaaaaactttccggcacggtctatatgagggatacaaagcgcagcggaaaggcatgcccgatgaacttgcaatgcagatacccctcgcgaaggaagtactgagggcgatgaatattgccataatagagcatgaaggttatgaagccgacgatataatcggcagcctttcgttaaaggccgaaaaagagaattttgacgtaataatccttacgggggacagggattctttccagctgatcagcgacagggtgaaagttatcctgccttcgacgaaagccggaaaaacagagaccaacgtatatgataaacaggccatcattgacaaatacggagttttaccccatcagcttattgacgttaaaggcttaatgggagattcgtcagataatatacccggcgttccgggagtgggtgagaaaacggcgttaagccttatttcagcctacggtacactggaaggtgtttacgagcatattgatgaaataaaacagcctaagctgaaagcatcgctgattgaatataaggatcaggcgtttttaagccgtaagctgggtactattgtaagaaatctggagctgtgtgcttcgctggaggatctgaaaagaaaagaaataaaccgcaaagagcttttgaatgttttcagaaaactcgaatttgaaagtatcatatcaaaaatgaatcttgcttccgctgaggtgacagaattacctcccgcgccggaagagcttaaaataacccatatttcagcggcagaggatcttaagaaatggattgcttacctgcttaaccagaaaaacatttccgtccttcaactgattgaccgggaggattcatacagttcccgtctttcagggctggctttgtgcaccggggatgaggttttttatatcgagaccgggactgcactccccgagaatttgattgcaacagagctgaaagaactgtggcagaatgaaaatattcacaaaatcggacacaatataaaagaatttataacctggctgctgaaacacgatgttgaactgaacggcctttatttcgacactatgattgccgaatacctgatagattccataagaaacggctatcctatagcaagcctttctcacaaatacctgaatcgcagcgttccgtcgctggacgaacttttgggcaagggaaagggagcaaaaaagtactctgaaattccgcccgaaaggctgaaagattacagcgcttataacgtcaaagccatttttgacatatggccgatgcagaaaaaagttcttcaggaaaaccggcaggaggagctttttaatgacatagagcttcctcttataaccgtacttgccagtatggaataccacggtttcaaagttgacgccgcaaaacttcacgaatacggcgaagttcttctgtcacgcataaaagacctggaaaaggtaatttacatgctggccggtgaagaattcaacatcaattcaacgaagcagcttggtaccatattattcgaaaaactgaagcttcccgttgtaaaaagtacaaagaccggatactccaccgacgtcgaggttcttgaagagctttattacaagcatgatataataccatgcataatagaataccgccagcttacaaaactttacaccacctacgccgaaggtcttgaaaaagtgataaatcctgtaaccggtaaaattcattcaagttttaaccagacggttacggctacaggccgcatcagcagtaccgaaccaaatttacagaatatcccagtcagacacgaaatgggaagggaaatacggaaagcttttattccgtcgtcggaaaacgctgtttttgttgatgccgattattcacagatagagcttcgcgtgcttgcccatataacaggcgatgaagccctgataaatgctttcgttaagggggaagatattcatacggccacggcgtcgctggtatttgacgtagctcccgaagatgtgacgccggaactgcgcagaaaggcaaaagccgtaaatttcggcatagtgtacgggatcagtgattacgggctggcacgggatttgggaattacccggaaggaagcaaagcggtatatagacgactattttgccaaataccccaaagtaaaaacctatgtggatgaaattgtgcgggtcggccaggaacaggggtatgtggaaactctgttccacagaagaagatacactcccgagcttgcatctaaaaattttcaccagcgttctttcggaaaaagggttgcaatgaatacgcccatacagggcactgcagccgatattattaaaattgcgatggtgaaggtatacaaggctttgaaagaatccggccttaaatccaggcttatcctccaggtccatgacgaacttgttattgagacttttgaagacgaactggagactgtcaaggaacttgtcaaaaagtgcatggaagaggccgttgaattgagtgtgccgcttgttgtcgacgtttcaatcgggaaaaactggtatgaagcctcctgatatggatcc

SEQ ID NO: 175 - DNA, 2772 bp, Artificial Sequence
  Description of Artificial Sequence: Synthetic Clostridium stercorarium DNA Polymerase L817W
atgaaatacctgctgccgaccgctgctgctggtctgctgctcctcgctgcccagccggcgatggccatggatccaaaaataatccttatagacggaaacagtattttaaaccgcggtttttatgccctgtcggggcgatccatgctgactacgtccacaggtctgtataccaatgcggttttcgcttttgtaaatatattgaacaaatatatcgaagaggaaaaccctgattatattgccgttgctttcgatcttagggcaaaaactttccggcacggtctatatgagggatacaaagcgcagcggaaaggcatgcccgatgaacttgcaatgcagatacccctcgcgaaggaagtactgagggcgatgaatattgccataatagagcatgaaggttatgaagccgacgatataatcggcagcctttcgttaaaggccgaaaaagagaattttgacgtaataatccttacgggggacagggattctttccagctgatcagcgacagggtgaaagttatcctgccttcgacgaaagccggaaaaacagagaccaacgtatatgataaacaggccatcattgacaaatacggagttttaccccatcagcttattgacgttaaaggcttaatgggagattcgtcagataatatacccggcgttccgggagtgggtgagaaaacggcgttaagccttatttcagcctacggtacactggaaggtgtttacgagcatattgatgaaataaaacagcctaagctgaaagcatcgctgattgaatataaggatcaggcgtttttaagccgtaagctgggtactattgtaagaaatctggagctgtgtgcttcgctggaggatctgaaaagaaaagaaataaaccgcaaagagcttttgaatgttttcagaaaactcgaatttgaaagtatcatatcaaaaatgaatcttgcttccgctgaggtgacagaattacctcccgcgccggaagagcttaaaataacccatatttcagcggcagaggatcttaagaaatggattgcttacctgcttaaccagaaaaacatttccgtccttcaactgattgaccgggaggattcatacagttcccgtctttcagggctggctttgtgcaccggggatgaggttttttatatcgagaccgggactgcactccccgagaatttgattgcaacagagctgaaagaactgtggcagaatgaaaatattcacaaaatcggacacaatataaaagaatttataacctggctgctgaaacacgatgttgaactgaacggcctttatttcgacactatgattgccgaatacctgatagattccataagaaacggctatcctatagcaagcctttctcacaaatacctgaatcgcagcgttccgtcgctggacgaacttttgggcaagggaaagggagcaaaaaagtactctgaaattccgcccgaaaggctgaaagattacagcgcttataacgtcaaagccatttttgacatatggccgatgcagaaaaaagttcttcaggaaaaccggcaggaggagctttttaatgacatagagcttcctcttataaccgtacttgccagtatggaataccacggtttcaaagttgacgccgcaaaacttcacgaatacggcgaagttcttctgtcacgcataaaagacctggaaaaggtaatttacatgctggccggtgaagaattcaacatcaattcaacgaagcagcttggtaccatattattcgaaaaactgaagcttcccgttgtaaaaagtacaaagaccggatactccaccgacgtcgaggttcttgaagagctttattacaagcatgatataataccatgcataatagaataccgccagcttacaaaactttacaccacctacgccgaaggtcttgaaaaagtgataaatcctgtaaccggtaaaattcattcaagttttaaccagacggttacggctacaggccgcatcagcagtaccgaaccaaatttacagaatatcccagtcagacacgaaatgggaagggaaatacggaaagcttttattccgtcgtcggaaaacgctgtttttgttgatgccgattattcacagatagagcttcgcgtgcttgcccatataacaggcgatgaagccctgataaatgctttcgttaagggggaagatattcatacggccacggcgtcgctggtatttgacgtagctcccgaagatgtgacgccggaactgcgcagaaaggcaaaagccgtaaatttcggcatagtgtacgggatcagtgattacgggctggcacgggatttgggaattacccggaaggaagcaaagcggtatatagacgactattttgccaaataccccaaagtaaaaacctatgtggatgaaattgtgcgggtcggccaggaacaggggtatgtggaaactctgttccacagaagaagatactggcccgagcttgcatctaaaaattttcaccagcgttctttcggaaaaagggttgcaatgaatacgcccatacagggcactgcagccgatattattaaaattgcgatggtgaaggtatacaaggctttgaaagaatccggccttaaatccaggcttatcctccaggtccatgacgaacttgttattgagacttttgaagacgaactggagactgtcaaggaacttgtcaaaaagtgcatggaagaggccgttgaattgagtgtgccgcttgttgtcgacgtttcaatcgggaaaaactggtatgaagcctcctgatatggatcc

SEQ ID NO: 176 - DNA, 2772 bp, Artificial Sequence
  Description of Artificial Sequence: Synthetic Clostridium stercorarium DNA Polymerase L817Y
atgaaatacctgctgccgaccgctgctgctggtctgctgctcctcgctgcccagccggcgatggccatggatccaaaaataatccttatagacggaaacagtattttaaaccgcggtttttatgccctgtcggggcgatccatgctgactacgtccacaggtctgtataccaatgcggttttcgcttttgtaaatatattgaacaaatatatcgaagaggaaaaccctgattatattgccgttgctttcgatcttagggcaaaaactttccggcacggtctatatgagggatacaaagcgcagcggaaaggcatgcccgatgaacttgcaatgcagatacccctcgcgaaggaagtactgagggcgatgaatattgccataatagagcatgaaggttatgaagccgacgatataatcggcagcctttcgttaaaggccgaaaaagagaattttgacgtaataatccttacgggggacagggattctttccagctgatcagcgacagggtgaaagttatcctgccttcgacgaaagccggaaaaacagagaccaacgtatatgataaacaggccatcattgacaaatacggagttttaccccatcagcttattgacgttaaaggcttaatgggagattcgtcagataatatacccggcgttccgggagtgggtgagaaaacggcgttaagccttatttcagcctacggtacactggaaggtgtttacgagcatattgatgaaataaaacagcctaagctgaaagcatcgctgattgaatataaggatcaggcgtttttaagccgtaagctgggtactattgtaagaaatctggagctgtgtgcttcgctggaggatctgaaaagaaaagaaataaaccgcaaagagcttttgaatgttttcagaaaactcgaatttgaaagtatcatatcaaaaatgaatcttgcttccgctgaggtgacagaattacctcccgcgccggaagagcttaaaataacccatatttcagcggcagaggatcttaagaaatggattgcttacctgcttaaccagaaaaacatttccgtccttcaactgattgaccgggaggattcatacagttcccgtctttcagggctggctttgtgcaccggggatgaggttttttatatcgagaccgggactgcactccccgagaatttgattgcaacagagctgaaagaactgtggcagaatgaaaatattcacaaaatcggacacaatataaaagaatttataacctggctgctgaaacacgatgttgaactgaacggcctttatttcgacactatgattgccgaatacctgatagattccataagaaacggctatcctatagcaagcctttctcacaaatacctgaatcgcagcgttccgtcgctggacgaacttttgggcaagggaaagggagcaaaaaagtactctgaaattccgcccgaaaggctgaaagattacagcgcttataacgtcaaagccatttttgacatatggccgatgcagaaaaaagttcttcaggaaaaccggcaggaggagctttttaatgacatagagcttcctcttataaccgtacttgccagtatggaataccacggtttcaaagttgacgccgcaaaacttcacgaatacggcgaagttcttctgtcacgcataaaagacctggaaaaggtaatttacatgctggccggtgaagaattcaacatcaattcaacgaagcagcttggtaccatattattcgaaaaactgaagcttcccgttgtaaaaagtacaaagaccggatactccaccgacgtcgaggttcttgaagagctttattacaagcatgatataataccatgcataatagaataccgccagcttacaaaactttacaccacctacgccgaaggtcttgaaaaagtgataaatcctgtaaccggtaaaattcattcaagttttaaccagacggttacggctacaggccgcatcagcagtaccgaaccaaatttacagaatatcccagtcagacacgaaatgggaagggaaatacggaaagcttttattccgtcgtcggaaaacgctgtttttgttgatgccgattattcacagatagagcttcgcgtgcttgcccatataacaggcgatgaagccctgataaatgctttcgttaagggggaagatattcatacggccacggcgtcgctggtatttgacgtagctcccgaagatgtgacgccggaactgcgcagaaaggcaaaagccgtaaatttcggcatagtgtacgggatcagtgattacgggctggcacgggatttgggaattacccggaaggaagcaaagcggtatatagacgactattttgccaaataccccaaagtaaaaacctatgtggatgaaattgtgcgggtcggccaggaacaggggtatgtggaaactctgttccacagaagaagatactatcccgagcttgcatctaaaaattttcaccagcgttctttcggaaaaagggttgcaatgaatacgcccatacagggcactgcagccgatattattaaaattgcgatggtgaaggtatacaaggctttgaaagaatccggccttaaatccaggcttatcctccaggtccatgacgaacttgttattgagacttttgaagacgaactggagactgtcaaggaacttgtcaaaaagtgcatggaagaggccgttgaattgagtgtgccgcttgttgtcgacgtttcaatcgggaaaaactggtatgaagcctcctgatatggatcc

SEQ ID NO: 177 - DNA, 2772 bp, Artificial Sequence
  Description of Artificial Sequence: Synthetic Clostridium stercorarium DNA Polymerase L817V
atgaaatacctgctgccgaccgctgctgctggtctgctgctcctcgctgcccagccggcgatggccatggatccaaaaataatccttatagacggaaacagtattttaaaccgcggtttttatgccctgtcggggcgatccatgctgactacgtccacaggtctgtataccaatgcggttttcgcttttgtaaatatattgaacaaatatatcgaagaggaaaaccctgattatattgccgttgctttcgatcttagggcaaaaactttccggcacggtctatatgagggatacaaagcgcagcggaaaggcatgcccgatgaacttgcaatgcagatacccctcgcgaaggaagtactgagggcgatgaatattgccataatagagcatgaaggttatgaagccgacgatataatcggcagcctttcgttaaaggccgaaaaagagaattttgacgtaataatccttacgggggacagggattctttccagctgatcagcgacagggtgaaagttatcctgccttcgacgaaagccggaaaaacagagaccaacgtatatgataaacaggccatcattgacaaatacggagttttaccccatcagcttattgacgttaaaggcttaatgggagattcgtcagataatatacccggcgttccgggagtgggtgagaaaacggcgttaagccttatttcagcctacggtacactggaaggtgtttacgagcatattgatgaaataaaacagcctaagctgaaagcatcgctgattgaatataaggatcaggcgtttttaagccgtaagctgggtactattgtaagaaatctggagctgtgtgcttcgctggaggatctgaaaagaaaagaaataaaccgcaaagagcttttgaatgttttcagaaaactcgaatttgaaagtatcatatcaaaaatgaatcttgcttccgctgaggtgacagaattacctcccgcgccggaagagcttaaaataacccatatttcagcggcagaggatcttaagaaatggattgcttacctgcttaaccagaaaaacatttccgtccttcaactgattgaccgggaggattcatacagttcccgtctttcagggctggctttgtgcaccggggatgaggttttttatatcgagaccgggactgcactccccgagaatttgattgcaacagagctgaaagaactgtggcagaatgaaaatattcacaaaatcggacacaatataaaagaatttataacctggctgctgaaacacgatgttgaactgaacggcctttatttcgacactatgattgccgaatacctgatagattccataagaaacggctatcctatagcaagcctttctcacaaatacctgaatcgcagcgttccgtcgctggacgaacttttgggcaagggaaagggagcaaaaaagtactctgaaattccgcccgaaaggctgaaagattacagcgcttataacgtcaaagccatttttgacatatggccgatgcagaaaaaagttcttcaggaaaaccggcaggaggagctttttaatgacatagagcttcctcttataaccgtacttgccagtatggaataccacggtttcaaagttgacgccgcaaaacttcacgaatacggcgaagttcttctgtcacgcataaaagacctggaaaaggtaatttacatgctggccggtgaagaattcaacatcaattcaacgaagcagcttggtaccatattattcgaaaaactgaagcttcccgttgtaaaaagtacaaagaccggatactccaccgacgtcgaggttcttgaagagctttattacaagcatgatataataccatgcataatagaataccgccagcttacaaaactttacaccacctacgccgaaggtcttgaaaaagtgataaatcctgtaaccggtaaaattcattcaagttttaaccagacggttacggctacaggccgcatcagcagtaccgaaccaaatttacagaatatcccagtcagacacgaaatgggaagggaaatacggaaagcttttattccgtcgtcggaaaacgctgtttttgttgatgccgattattcacagatagagcttcgcgtgcttgcccatataacaggcgatgaagccctgataaatgctttcgttaagggggaagatattcatacggccacggcgtcgctggtatttgacgtagctcccgaagatgtgacgccggaactgcgcagaaaggcaaaagccgtaaatttcggcatagtgtacgggatcagtgattacgggctggcacgggatttgggaattacccggaaggaagcaaagcggtatatagacgactattttgccaaataccccaaagtaaaaacctatgtggatgaaattgtgcgggtcggccaggaacaggggtatgtggaaactctgttccacagaagaagatacgttcccgagcttgcatctaaaaattttcaccagcgttctttcggaaaaagggttgcaatgaatacgcccatacagggcactgcagccgatattattaaaattgcgatggtgaaggtatacaaggctttgaaagaatccggccttaaatccaggcttatcctccaggtccatgacgaacttgttattgagacttttgaagacgaactggagactgtcaaggaacttgtcaaaaagtgcatggaagaggccgttgaattgagtgtgccgcttgttgtcgacgtttcaatcgggaaaaactggtatgaagcctcctgatatggatcc

SEQ ID NO: 178 - DNA, 2772 bp, Artificial Sequence
  Description of Artificial Sequence: Synthetic Clostridium stercorarium DNA Polymerase P818A
atgaaatacctgctgccgaccgctgctgctggtctgctgctcctcgctgcccagccggcgatggccatggatccaaaaataatccttatagacggaaacagtattttaaaccgcggtttttatgccctgtcggggcgatccatgctgactacgtccacaggtctgtataccaatgcggttttcgcttttgtaaatatattgaacaaatatatcgaagaggaaaaccctgattatattgccgttgctttcgatcttagggcaaaaactttccggcacggtctatatgagggatacaaagcgcagcggaaaggcatgcccgatgaacttgcaatgcagatacccctcgcgaaggaagtactgagggcgatgaatattgccataatagagcatgaaggttatgaagccgacgatataatcggcagcctttcgttaaaggccgaaaaagagaattttgacgtaataatccttacgggggacagggattctttccagctgatcagcgacagggtgaaagttatcctgccttcgacgaaagccggaaaaacagagaccaacgtatatgataaacaggccatcattgacaaatacggagttttaccccatcagcttattgacgttaaaggcttaatgggagattcgtcagataatatacccggcgttccgggagtgggtgagaaaacggcgttaagccttatttcagcctacggtacactggaaggtgtttacgagcatattgatgaaataaaacagcctaagctgaaagcatcgctgattgaatataaggatcaggcgtttttaagccgtaagctgggtactattgtaagaaatctggagctgtgtgcttcgctggaggatctgaaaagaaaagaaataaaccgcaaagagcttttgaatgttttcagaaaactcgaatttgaaagtatcatatcaaaaatgaatcttgcttccgctgaggtgacagaattacctcccgcgccggaagagcttaaaataacccatatttcagcggcagaggatcttaagaaatggattgcttacctgcttaaccagaaaaacatttccgtccttcaactgattgaccgggaggattcatacagttcccgtctttcagggctggctttgtgcaccggggatgaggttttttatatcgagaccgggactgcactccccgagaatttgattgcaacagagctgaaagaactgtggcagaatgaaaatattcacaaaatcggacacaatataaaagaatttataacctggctgctgaaacacgatgttgaactgaacggcctttatttcgacactatgattgccgaatacctgatagattccataagaaacggctatcctatagcaagcctttctcacaaatacctgaatcgcagcgttccgtcgctggacgaacttttgggcaagggaaagggagcaaaaaagtactctgaaattccgcccgaaaggctgaaagattacagcgcttataacgtcaaagccatttttgacatatggccgatgcagaaaaaagttcttcaggaaaaccggcaggaggagctttttaatgacatagagcttcctcttataaccgtacttgccagtatggaataccacggtttcaaagttgacgccgcaaaacttcacgaatacggcgaagttcttctgtcacgcataaaagacctggaaaaggtaatttacatgctggccggtgaagaattcaacatcaattcaacgaagcagcttggtaccatattattcgaaaaactgaagcttcccgttgtaaaaagtacaaagaccggatactccaccgacgtcgaggttcttgaagagctttattacaagcatgatataataccatgcataatagaataccgccagcttacaaaactttacaccacctacgccgaaggtcttgaaaaagtgataaatcctgtaaccggtaaaattcattcaagttttaaccagacggttacggctacaggccgcatcagcagtaccgaaccaaatttacagaatatcccagtcagacacgaaatgggaagggaaatacggaaagcttttattccgtcgtcggaaaacgctgtttttgttgatgccgattattcacagatagagcttcgcgtgcttgcccatataacaggcgatgaagccctgataaatgctttcgttaagggggaagatattcatacggccacggcgtcgctggtatttgacgtagctcccgaagatgtgacgccggaactgcgcagaaaggcaaaagccgtaaatttcggcatagtgtacgggatcagtgattacgggctggcacgggatttgggaattacccggaaggaagcaaagcggtatatagacgactattttgccaaataccccaaagtaaaaacctatgtggatgaaattgtgcgggtcggccaggaacaggggtatgtggaaactctgttccacagaagaagataccttgctgagcttgcatctaaaaattttcaccagcgttctttcggaaaaagggttgcaatgaatacgcccatacagggcactgcagccgatattattaaaattgcgatggtgaaggtatacaaggctttgaaagaatccggccttaaatccaggcttatcctccaggtccatgacgaacttgttattgagacttttgaagacgaactggagactgtcaaggaacttgtcaaaaagtgcatggaagaggccgttgaattgagtgtgccgcttgttgtcgacgtttcaatcgggaaaaactggtatgaagcctcctgatatggatcc

SEQ ID NO: 179 - DNA, 2772 bp, Artificial Sequence
  Description of Artificial Sequence: Synthetic Clostridium stercorarium DNA Polymerase P818R
atgaaatacctgctgccgaccgctgctgctggtctgctgctcctcgctgcccagccggcgatggccatggatccaaaaataatccttatagacggaaacagtattttaaaccgcggtttttatgccctgtcggggcgatccatgctgactacgtccacaggtctgtataccaatgcggttttcgcttttgtaaatatattgaacaaatatatcgaagaggaaaaccctgattatattgccgttgctttcgatcttagggcaaaaactttccggcacggtctatatgagggatacaaagcgcagcggaaaggcatgcccgatgaacttgcaatgcagatacccctcgcgaaggaagtactgagggcgatgaatattgccataatagagcatgaaggttatgaagccgacgatataatcggcagcctttcgttaaaggccgaaaaagagaattttgacgtaataatccttacgggggacagggattctttccagctgatcagcgacagggtgaaagttatcctgccttcgacgaaagccggaaaaacagagaccaacgtatatgataaacaggccatcattgacaaatacggagttttaccccatcagcttattgacgttaaaggcttaatgggagattcgtcagataatatacccggcgttccgggagtgggtgagaaaacggcgttaagccttatttcagcctacggtacactggaaggtgtttacgagcatattgatgaaataaaacagcctaagctgaaagcatcgctgattgaatataaggatcaggcgtttttaagccgtaagctgggtactattgtaagaaatctggagctgtgtgcttcgctggaggatctgaaaagaaaagaaataaaccgcaaagagcttttgaatgttttcagaaaactcgaatttgaaagtatcatatcaaaaatgaatcttgcttccgctgaggtgacagaattacctcccgcgccggaagagcttaaaataacccatatttcagcggcagaggatcttaagaaatggattgcttacctgcttaaccagaaaaacatttccgtccttcaactgattgaccgggaggattcatacagttcccgtctttcagggctggctttgtgcaccggggatgaggttttttatatcgagaccgggactgcactccccgagaatttgattgcaacagagctgaaagaactgtggcagaatgaaaatattcacaaaatcggacacaatataaaagaatttataacctggctgctgaaacacgatgttgaactgaacggcctttatttcgacactatgattgccgaatacctgatagattccataagaaacggctatcctatagcaagcctttctcacaaatacctgaatcgcagcgttccgtcgctggacgaacttttgggcaagggaaagggagcaaaaaagtactctgaaattccgcccgaaaggctgaaagattacagcgcttataacgtcaaagccatttttgacatatggccgatgcagaaaaaagttcttcaggaaaaccggcaggaggagctttttaatgacatagagcttcctcttataaccgtacttgccagtatggaataccacggtttcaaagttgacgccgcaaaacttcacgaatacggcgaagttcttctgtcacgcataaaagacctggaaaaggtaatttacatgctggccggtgaagaattcaacatcaattcaacgaagcagcttggtaccatattattcgaaaaactgaagcttcccgttgtaaaaagtacaaagaccggatactccaccgacgtcgaggttcttgaagagctttattacaagcatgatataataccatgcataatagaataccgccagcttacaaaactttacaccacctacgccgaaggtcttgaaaaagtgataaatcctgtaaccggtaaaattcattcaagttttaaccagacggttacggctacaggccgcatcagcagtaccgaaccaaatttacagaatatcccagtcagacacgaaatgggaagggaaatacggaaagcttttattccgtcgtcggaaaacgctgtttttgttgatgccgattattcacagatagagcttcgcgtgcttgcccatataacaggcgatgaagccctgataaatgctttcgttaagggggaagatattcatacggccacggcgtcgctggtatttgacgtagctcccgaagatgtgacgccggaactgcgcagaaaggcaaaagccgtaaatttcggcatagtgtacgggatcagtgattacgggctggcacgggatttgggaattacccggaaggaagcaaagcggtatatagacgactattttgccaaataccccaaagtaaaaacctatgtggatgaaattgtgcgggtcggccaggaacaggggtatgtggaaactctgttccacagaagaagataccttcgtgagcttgcatctaaaaattttcaccagcgttctttcggaaaaagggttgcaatgaatacgcccatacagggcactgcagccgatattattaaaattgcgatggtgaaggtatacaaggctttgaaagaatccggccttaaatccaggcttatcctccaggtccatgacgaacttgttattgagacttttgaagacgaactggagactgtcaaggaacttgtcaaaaagtgcatggaagaggccgttgaattgagtgtgccgcttgttgtcgacgtttcaatcgggaaaaactggtatgaagcctcctgatatggatcc

SEQ ID NO: 180 - DNA, 2772 bp, Artificial Sequence
  Description of Artificial Sequence: Synthetic Clostridium stercorarium DNA Polymerase P818N
atgaaatacctgctgccgaccgctgctgctggtctgctgctcctcgctgcccagccggcgatggccatggatccaaaaataatccttatagacggaaacagtattttaaaccgcggtttttatgccctgtcggggcgatccatgctgactacgtccacaggtctgtataccaatgcggttttcgcttttgtaaatatattgaacaaatatatcgaagaggaaaaccctgattatattgccgttgctttcgatcttagggcaaaaactttccggcacggtctatatgagggatacaaagcgcagcggaaaggcatgcccgatgaacttgcaatgcagatacccctcgcgaaggaagtactgagggcgatgaatattgccataatagagcatgaaggttatgaagccgacgatataatcggcagcctttcgttaaaggccgaaaaagagaattttgacgtaataatccttacgggggacagggattctttccagctgatcagcgacagggtgaaagttatcctgccttcgacgaaagccggaaaaacagagaccaacgtatatgataaacaggccatcattgacaaatacggagttttaccccatcagcttattgacgttaaaggcttaatgggagattcgtcagataatatacccggcgttccgggagtgggtgagaaaacggcgttaagccttatttcagcctacggtacactggaaggtgtttacgagcatattgatgaaataaaacagcctaagctgaaagcatcgctgattgaatataaggatcaggcgtttttaagccgtaagctgggtactattgtaagaaatctggagctgtgtgcttcgctggaggatctgaaaagaaaagaaataaaccgcaaagagcttttgaatgttttcagaaaactcgaatttgaaagtatcatatcaaaaatgaatcttgcttccgctgaggtgacagaattacctcccgcgccggaagagcttaaaataacccatatttcagcggcagaggatcttaagaaatggattgcttacctgcttaaccagaaaaacatttccgtccttcaactgattgaccgggaggattcatacagttcccgtctttcagggctggctttgtgcaccggggatgaggttttttatatcgagaccgggactgcactccccgagaatttgattgcaacagagctgaaagaactgtggcagaatgaaaatattcacaaaatcggacacaatataaaagaatttataacctggctgctgaaacacgatgttgaactgaacggcctttatttcgacactatgattgccgaatacctgatagattccataagaaacggctatcctatagcaagcctttctcacaaatacctgaatcgcagcgttccgtcgctggacgaacttttgggcaagggaaagggagcaaaaaagtactctgaaattccgcccgaaaggctgaaagattacagcgcttataacgtcaaagccatttttgacatatggccgatgcagaaaaaagttcttcaggaaaaccggcaggaggagctttttaatgacatagagcttcctcttataaccgtacttgccagtatggaataccacggtttcaaagttgacgccgcaaaacttcacgaatacggcgaagttcttctgtcacgcataaaagacctggaaaaggtaatttacatgctggccggtgaagaattcaacatcaattcaacgaagcagcttggtaccatattattcgaaaaactgaagcttcccgttgtaaaaagtacaaagaccggatactccaccgacgtcgaggttcttgaagagctttattacaagcatgatataataccatgcataatagaataccgccagcttacaaaactttacaccacctacgccgaaggtcttgaaaaagtgataaatcctgtaaccggtaaaattcattcaagttttaaccagacggttacggctacaggccgcatcagcagtaccgaaccaaatttacagaatatcccagtcagacacgaaatgggaagggaaatacggaaagcttttattccgtcgtcggaaaacgctgtttttgttgatgccgattattcacagatagagcttcgcgtgcttgcccatataacaggcgatgaagccctgataaatgctttcgttaagggggaagatattcatacggccacggcgtcgctggtatttgacgtagctcccgaagatgtgacgccggaactgcgcagaaaggcaaaagccgtaaatttcggcatagtgtacgggatcagtgattacgggctggcacgggatttgggaattacccggaaggaagcaaagcggtatatagacgactattttgccaaataccccaaagtaaaaacctatgtggatgaaattgtgcgggtcggccaggaacaggggtatgtggaaactctgttccacagaagaagataccttaatgagcttgcatctaaaaattttcaccagcgttctttcggaaaaagggttgcaatgaatacgcccatacagggcactgcagccgatattattaaaattgcgatggtgaaggtatacaaggctttgaaagaatccggccttaaatccaggcttatcctccaggtccatgacgaacttgttattgagacttttgaagacgaactggagactgtcaaggaacttgtcaaaaagtgcatggaagaggccgttgaattgagtgtgccgcttgttgtcgacgtttcaatcgggaaaaactggtatgaagcctcctgatatggatcc

SEQ ID NO: 181 - DNA, 2772 bp, Artificial Sequence
  Description of Artificial Sequence: Synthetic Clostridium stercorarium DNA Polymerase P818D
atgaaatacctgctgccgaccgctgctgctggtctgctgctcctcgctgcccagccggcgatggccatggatccaaaaataatccttatagacggaaacagtattttaaaccgcggtttttatgccctgtcggggcgatccatgctgactacgtccacaggtctgtataccaatgcggttttcgcttttgtaaatatattgaacaaatatatcgaagaggaaaaccctgattatattgccgttgctttcgatcttagggcaaaaactttccggcacggtctatatgagggatacaaagcgcagcggaaaggcatgcccgatgaacttgcaatgcagatacccctcgcgaaggaagtactgagggcgatgaatattgccataatagagcatgaaggttatgaagccgacgatataatcggcagcctttcgttaaaggccgaaaaagagaattttgacgtaataatccttacgggggacagggattctttccagctgatcagcgacagggtgaaagttatcctgccttcgacgaaagccggaaaaacagagaccaacgtatatgataaacaggccatcattgacaaatacggagttttaccccatcagcttattgacgttaaaggcttaatgggagattcgtcagataatatacccggcgttccgggagtgggtgagaaaacggcgttaagccttatttcagcctacggtacactggaaggtgtttacgagcatattgatgaaataaaacagcctaagctgaaagcatcgctgattgaatataaggatcaggcgtttttaagccgtaagctgggtactattgtaagaaatctggagctgtgtgcttcgctggaggatctgaaaagaaaagaaataaaccgcaaagagcttttgaatgttttcagaaaactcgaatttgaaagtatcatatcaaaaatgaatcttgcttccgctgaggtgacagaattacctcccgcgccggaagagcttaaaataacccatatttcagcggcagaggatcttaagaaatggattgcttacctgcttaaccagaaaaacatttccgtccttcaactgattgaccgggaggattcatacagttcccgtctttcagggctggctttgtgcaccggggatgaggttttttatatcgagaccgggactgcactccccgagaatttgattgcaacagagctgaaagaactgtggcagaatgaaaatattcacaaaatcggacacaatataaaagaatttataacctggctgctgaaacacgatgttgaactgaacggcctttatttcgacactatgattgccgaatacctgatagattccataagaaacggctatcctatagcaagcctttctcacaaatacctgaatcgcagcgttccgtcgctggacgaacttttgggcaagggaaagggagcaaaaaagtactctgaaattccgcccgaaaggctgaaagattacagcgcttataacgtcaaagccatttttgacatatggccgatgcagaaaaaagttcttcaggaaaaccggcaggaggagctttttaatgacatagagcttcctcttataaccgtacttgccagtatggaataccacggtttcaaagttgacgccgcaaaacttcacgaatacggcgaagttcttctgtcacgcataaaagacctggaaaaggtaatttacatgctggccggtgaagaattcaacatcaattcaacgaagcagcttggtaccatattattcgaaaaactgaagcttcccgttgtaaaaagtacaaagaccggatactccaccgacgtcgaggttcttgaagagctttattacaagcatgatataataccatgcataatagaataccgccagcttacaaaactttacaccacctacgccgaaggtcttgaaaaagtgataaatcctgtaaccggtaaaattcattcaagttttaaccagacggttacggctacaggccgcatcagcagtaccgaaccaaatttacagaatatcccagtcagacacgaaatgggaagggaaatacggaaagcttttattccgtcgtcggaaaacgctgtttttgttgatgccgattattcacagatagagcttcgcgtgcttgcccatataacaggcgatgaagccctgataaatgctttcgttaagggggaagatattcatacggccacggcgtcgctggtatttgacgtagctcccgaagatgtgacgccggaactgcgcagaaaggcaaaagccgtaaatttcggcatagtgtacgggatcagtgattacgggctggcacgggatttgggaattacccggaaggaagcaaagcggtatatagacgactattttgccaaataccccaaagtaaaaacctatgtggatgaaattgtgcgggtcggccaggaacaggggtatgtggaaactctgttccacagaagaagataccttgatgagcttgcatctaaaaattttcaccagcgttctttcggaaaaagggttgcaatgaatacgcccatacagggcactgcagccgatattattaaaattgcgatggtgaaggtatacaaggctttgaaagaatccggccttaaatccaggcttatcctccaggtccatgacgaacttgttattgagacttttgaagacgaactggagactgtcaaggaacttgtcaaaaagtgcatggaagaggccgttgaattgagtgtgccgcttgttgtcgacgtttcaatcgggaaaaactggtatgaagcctcctgatatggatcc

SEQ ID NO: 182 - DNA, 2772 bp, Artificial Sequence
  Description of Artificial Sequence: Synthetic Clostridium stercorarium DNA Polymerase P818C
atgaaatacctgctgccgaccgctgctgctggtctgctgctcctcgctgcccagccggcgatggccatggatccaaaaataatccttatagacggaaacagtattttaaaccgcggtttttatgccctgtcggggcgatccatgctgactacgtccacaggtctgtataccaatgcggttttcgcttttgtaaatatattgaacaaatatatcgaagaggaaaaccctgattatattgccgttgctttcgatcttagggcaaaaactttccggcacggtctatatgagggatacaaagcgcagcggaaaggcatgcccgatgaacttgcaatgcagatacccctcgcgaaggaagtactgagggcgatgaatattgccataatagagcatgaaggttatgaagccgacgatataatcggcagcctttcgttaaaggccgaaaaagagaattttgacgtaataatccttacgggggacagggattctttccagctgatcagcgacagggtgaaagttatcctgccttcgacgaaagccggaaaaacagagaccaacgtatatgataaacaggccatcattgacaaatacggagttttaccccatcagcttattgacgttaaaggcttaatgggagattcgtcagataatatacccggcgttccgggagtgggtgagaaaacggcgttaagccttatttcagcctacggtacactggaaggtgtttacgagcatattgatgaaataaaacagcctaagctgaaagcatcgctgattgaatataaggatcaggcgtttttaagccgtaagctgggtactattgtaagaaatctggagctgtgtgcttcgctggaggatctgaaaagaaaagaaataaaccgcaaagagcttttgaatgttttcagaaaactcgaatttgaaagtatcatatcaaaaatgaatcttgcttccgctgaggtgacagaattacctcccgcgccggaagagcttaaaataacccatatttcagcggcagaggatcttaagaaatggattgcttacctgcttaaccagaaaaacatttccgtccttcaactgattgaccgggaggattcatacagttcccgtctttcagggctggctttgtgcaccggggatgaggttttttatatcgagaccgggactgcactccccgagaatttgattgcaacagagctgaaagaactgtggcagaatgaaaatattcacaaaatcggacacaatataaaagaatttataacctggctgctgaaacacgatgttgaactgaacggcctttatttcgacactatgattgccgaatacctgatagattccataagaaacggctatcctatagcaagcctttctcacaaatacctgaatcgcagcgttccgtcgctggacgaacttttgggcaagggaaagggagcaaaaaagtactctgaaattccgcccgaaaggctgaaagattacagcgcttataacgtcaaagccatttttgacatatggccgatgcagaaaaaagttcttcaggaaaaccggcaggaggagctttttaatgacatagagcttcctcttataaccgtacttgccagtatggaataccacggtttcaaagttgacgccgcaaaacttcacgaatacggcgaagttcttctgtcacgcataaaagacctggaaaaggtaatttacatgctggccggtgaagaattcaacatcaattcaacgaagcagcttggtaccatattattcgaaaaactgaagcttcccgttgtaaaaagtacaaagaccggatactccaccgacgtcgaggttcttgaagagctttattacaagcatgatataataccatgcataatagaataccgccagcttacaaaactttacaccacctacgccgaaggtcttgaaaaagtgataaatcctgtaaccggtaaaattcattcaagttttaaccagacggttacggctacaggccgcatcagcagtaccgaaccaaatttacagaatatcccagtcagacacgaaatgggaagggaaatacggaaagcttttattccgtcgtcggaaaacgctgtttttgttgatgccgattattcacagatagagcttcgcgtgcttgcccatataacaggcgatgaagccctgataaatgctttcgttaagggggaagatattcatacggccacggcgtcgctggtatttgacgtagctcccgaagatgtgacgccggaactgcgcagaaaggcaaaagccgtaaatttcggcatagtgtacgggatcagtgattacgggctggcacgggatttgggaattacccggaaggaagcaaagcggtatatagacgactattttgccaaataccccaaagtaaaaacctatgtggatgaaattgtgcgggtcggccaggaacaggggtatgtggaaactctgttccacagaagaagatacctttgtgagcttgcatctaaaaattttcaccagcgttctttcggaaaaagggttgcaatgaatacgcccatacagggcactgcagccgatattattaaaattgcgatggtgaaggtatacaaggctttgaaagaatccggccttaaatccaggcttatcctccaggtccatgacgaacttgttattgagacttttgaagacgaactggagactgtcaaggaacttgtcaaaaagtgcatggaagaggccgttgaattgagtgtgccgcttgttgtcgacgtttcaatcgggaaaaactggtatgaagcctcctgatatggatcc

SEQ ID NO: 183 - DNA, 2772 bp, Artificial Sequence
  Description of Artificial Sequence: Synthetic Clostridium stercorarium DNA Polymerase P818E
atgaaatacctgctgccgaccgctgctgctggtctgctgctcctcgctgcccagccggcgatggccatggatccaaaaataatccttatagacggaaacagtattttaaaccgcggtttttatgccctgtcggggcgatccatgctgactacgtccacaggtctgtataccaatgcggttttcgcttttgtaaatatattgaacaaatatatcgaagaggaaaaccctgattatattgccgttgctttcgatcttagggcaaaaactttccggcacggtctatatgagggatacaaagcgcagcggaaaggcatgcccgatgaacttgcaatgcagatacccctcgcgaaggaagtactgagggcgatgaatattgccataatagagcatgaaggttatgaagccgacgatataatcggcagcctttcgttaaaggccgaaaaagagaattttgacgtaataatccttacgggggacagggattctttccagctgatcagcgacagggtgaaagttatcctgccttcgacgaaagccggaaaaacagagaccaacgtatatgataaacaggccatcattgacaaatacggagttttaccccatcagcttattgacgttaaaggcttaatgggagattcgtcagataatatacccggcgttccgggagtgggtgagaaaacggcgttaagccttatttcagcctacggtacactggaaggtgtttacgagcatattgatgaaataaaacagcctaagctgaaagcatcgctgattgaatataaggatcaggcgtttttaagccgtaagctgggtactattgtaagaaatctggagctgtgtgcttcgctggaggatctgaaaagaaaagaaataaaccgcaaagagcttttgaatgttttcagaaaactcgaatttgaaagtatcatatcaaaaatgaatcttgcttccgctgaggtgacagaattacctcccgcgccggaagagcttaaaataacccatatttcagcggcagaggatcttaagaaatggattgcttacctgcttaaccagaaaaacatttccgtccttcaactgattgaccgggaggattcatacagttcccgtctttcagggctggctttgtgcaccggggatgaggttttttatatcgagaccgggactgcactccccgagaatttgattgcaacagagctgaaagaactgtggcagaatgaaaatattcacaaaatcggacacaatataaaagaatttataacctggctgctgaaacacgatgttgaactgaacggcctttatttcgacactatgattgccgaatacctgatagattccataagaaacggctatcctatagcaagcctttctcacaaatacctgaatcgcagcgttccgtcgctggacgaacttttgggcaagggaaagggagcaaaaaagtactctgaaattccgcccgaaaggctgaaagattacagcgcttataacgtcaaagccatttttgacatatggccgatgcagaaaaaagttcttcaggaaaaccggcaggaggagctttttaatgacatagagcttcctcttataaccgtacttgccagtatggaataccacggtttcaaagttgacgccgcaaaacttcacgaatacggcgaagttcttctgtcacgcataaaagacctggaaaaggtaatttacatgctggccggtgaagaattcaacatcaattcaacgaagcagcttggtaccatattattcgaaaaactgaagcttcccgttgtaaaaagtacaaagaccggatactccaccgacgtcgaggttcttgaagagctttattacaagcatgatataataccatgcataatagaataccgccagcttacaaaactttacaccacctacgccgaaggtcttgaaaaagtgataaatcctgtaaccggtaaaattcattcaagttttaaccagacggttacggctacaggccgcatcagcagtaccgaaccaaatttacagaatatcccagtcagacacgaaatgggaagggaaatacggaaagcttttattccgtcgtcggaaaacgctgtttttgttgatgccgattattcacagatagagcttcgcgtgcttgcccatataacaggcgatgaagccctgataaatgctttcgttaagggggaagatattcatacggccacggcgtcgctggtatttgacgtagctcccgaagatgtgacgccggaactgcgcagaaaggcaaaagccgtaaatttcggcatagtgtacgggatcagtgattacgggctggcacgggatttgggaattacccggaaggaagcaaagcggtatatagacgactattttgccaaataccccaaagtaaaaacctatgtggatgaaattgtgcgggtcggccaggaacaggggtatgtggaaactctgttccacagaagaagataccttgaagagcttgcatctaaaaattttcaccagcgttctttcggaaaaagggttgcaatgaatacgcccatacagggcactgcagccgatattattaaaattgcgatggtgaaggtatacaaggctttgaaagaatccggccttaaatccaggcttatcctccaggtccatgacgaacttgttattgagacttttgaagacgaactggagactgtcaaggaacttgtcaaaaagtgcatggaagaggccgttgaattgagtgtgccgcttgttgtcgacgtttcaatcgggaaaaactggtatgaagcctcctgatatggatcc

SEQ ID NO: 184 - DNA, 2772 bp, Artificial Sequence
  Description of Artificial Sequence: Synthetic Clostridium stercorarium DNA Polymerase P818Q
atgaaatacctgctgccgaccgctgctgctggtctgctgctcctcgctgcccagccggcgatggccatggatccaaaaataatccttatagacggaaacagtattttaaaccgcggtttttatgccctgtcggggcgatccatgctgactacgtccacaggtctgtataccaatgcggttttcgcttttgtaaatatattgaacaaatatatcgaagaggaaaaccctgattatattgccgttgctttcgatcttagggcaaaaactttccggcacggtctatatgagggatacaaagcgcagcggaaaggcatgcccgatgaacttgcaatgcagatacccctcgcgaaggaagtactgagggcgatgaatattgccataatagagcatgaaggttatgaagccgacgatataatcggcagcctttcgttaaaggccgaaaaagagaattttgacgtaataatccttacgggggacagggattctttccagctgatcagcgacagggtgaaagttatcctgccttcgacgaaagccggaaaaacagagaccaacgtatatgataaacaggccatcattgacaaatacggagttttaccccatcagcttattgacgttaaaggcttaatgggagattcgtcagataatatacccggcgttccgggagtgggtgagaaaacggcgttaagccttatttcagcctacggtacactggaaggtgtttacgagcatattgatgaaataaaacagcctaagctgaaagcatcgctgattgaatataaggatcaggcgtttttaagccgtaagctgggtactattgtaagaaatctggagctgtgtgcttcgctggaggatctgaaaagaaaagaaataaaccgcaaagagcttttgaatgttttcagaaaactcgaatttgaaagtatcatatcaaaaatgaatcttgcttccgctgaggtgacagaattacctcccgcgccggaagagcttaaaataacccatatttcagcggcagaggatcttaagaaatggattgcttacctgcttaaccagaaaaacatttccgtccttcaactgattgaccgggaggattcatacagttcccgtctttcagggctggctttgtgcaccggggatgaggttttttatatcgagaccgggactgcactccccgagaatttgattgcaacagagctgaaagaactgtggcagaatgaaaatattcacaaaatcggacacaatataaaagaatttataacctggctgctgaaacacgatgttgaactgaacggcctttatttcgacactatgattgccgaatacctgatagattccataagaaacggctatcctatagcaagcctttctcacaaatacctgaatcgcagcgttccgtcgctggacgaacttttgggcaagggaaagggagcaaaaaagtactctgaaattccgcccgaaaggctgaaagattacagcgcttataacgtcaaagccatttttgacatatggccgatgcagaaaaaagttcttcaggaaaaccggcaggaggagctttttaatgacatagagcttcctcttataaccgtacttgccagtatggaataccacggtttcaaagttgacgccgcaaaacttcacgaatacggcgaagttcttctgtcacgcataaaagacctggaaaaggtaatttacatgctggccggtgaagaattcaacatcaattcaacgaagcagcttggtaccatattattcgaaaaactgaagcttcccgttgtaaaaagtacaaagaccggatactccaccgacgtcgaggttcttgaagagctttattacaagcatgatataataccatgcataatagaataccgccagcttacaaaactttacaccacctacgccgaaggtcttgaaaaagtgataaatcctgtaaccggtaaaattcattcaagttttaaccagacggttacggctacaggccgcatcagcagtaccgaaccaaatttacagaatatcccagtcagacacgaaatgggaagggaaatacggaaagcttttattccgtcgtcggaaaacgctgtttttgttgatgccgattattcacagatagagcttcgcgtgcttgcccatataacaggcgatgaagccctgataaatgctttcgttaagggggaagatattcatacggccacggcgtcgctggtatttgacgtagctcccgaagatgtgacgccggaactgcgcagaaaggcaaaagccgtaaatttcggcatagtgtacgggatcagtgattacgggctggcacgggatttgggaattacccggaaggaagcaaagcggtatatagacgactattttgccaaataccccaaagtaaaaacctatgtggatgaaattgtgcgggtcggccaggaacaggggtatgtggaaactctgttccacagaagaagataccttcaagagcttgcatctaaaaattttcaccagcgttctttcggaaaaagggttgcaatgaatacgcccatacagggcactgcagccgatattattaaaattgcgatggtgaaggtatacaaggctttgaaagaatccggccttaaatccaggcttatcctccaggtccatgacgaacttgttattgagacttttgaagacgaactggagactgtcaaggaacttgtcaaaaagtgcatggaagaggccgttgaattgagtgtgccgcttgttgtcgacgtttcaatcgggaaaaactggtatgaagcctcctgatatggatcc

SEQ ID NO: 185 - DNA, 2772 bp, Artificial Sequence
  Description of Artificial Sequence: Synthetic Clostridium stercorarium DNA Polymerase P818G
atgaaatacctgctgccgaccgctgctgctggtctgctgctcctcgctgcccagccggcgatggccatggatccaaaaataatccttatagacggaaacagtattttaaaccgcggtttttatgccctgtcggggcgatccatgctgactacgtccacaggtctgtataccaatgcggttttcgcttttgtaaatatattgaacaaatatatcgaagaggaaaaccctgattatattgccgttgctttcgatcttagggcaaaaactttccggcacggtctatatgagggatacaaagcgcagcggaaaggcatgcccgatgaacttgcaatgcagatacccctcgcgaaggaagtactgagggcgatgaatattgccataatagagcatgaaggttatgaagccgacgatataatcggcagcctttcgttaaaggccgaaaaagagaattttgacgtaataatccttacgggggacagggattctttccagctgatcagcgacagggtgaaagttatcctgccttcgacgaaagccggaaaaacagagaccaacgtatatgataaacaggccatcattgacaaatacggagttttaccccatcagcttattgacgttaaaggcttaatgggagattcgtcagataatatacccggcgttccgggagtgggtgagaaaacggcgttaagccttatttcagcctacggtacactggaaggtgtttacgagcatattgatgaaataaaacagcctaagctgaaagcatcgctgattgaatataaggatcaggcgtttttaagccgtaagctgggtactattgtaagaaatctggagctgtgtgcttcgctggaggatctgaaaagaaaagaaataaaccgcaaagagcttttgaatgttttcagaaaactcgaatttgaaagtatcatatcaaaaatgaatcttgcttccgctgaggtgacagaattacctcccgcgccggaagagcttaaaataacccatatttcagcggcagaggatcttaagaaatggattgcttacctgcttaaccagaaaaacatttccgtccttcaactgattgaccgggaggattcatacagttcccgtctttcagggctggctttgtgcaccggggatgaggttttttatatcgagaccgggactgcactccccgagaatttgattgcaacagagctgaaagaactgtggcagaatgaaaatattcacaaaatcggacacaatataaaagaatttataacctggctgctgaaacacgatgttgaactgaacggcctttatttcgacactatgattgccgaatacctgatagattccataagaaacggctatcctatagcaagcctttctcacaaatacctgaatcgcagcgttccgtcgctggacgaacttttgggcaagggaaagggagcaaaaaagtactctgaaattccgcccgaaaggctgaaagattacagcgcttataacgtcaaagccatttttgacatatggccgatgcagaaaaaagttcttcaggaaaaccggcaggaggagctttttaatgacatagagcttcctcttataaccgtacttgccagtatggaataccacggtttcaaagttgacgccgcaaaacttcacgaatacggcgaagttcttctgtcacgcataaaagacctggaaaaggtaatttacatgctggccggtgaagaattcaacatcaattcaacgaagcagcttggtaccatattattcgaaaaactgaagcttcccgttgtaaaaagtacaaagaccggatactccaccgacgtcgaggttcttgaagagctttattacaagcatgatataataccatgcataatagaataccgccagcttacaaaactttacaccacctacgccgaaggtcttgaaaaagtgataaatcctgtaaccggtaaaattcattcaagttttaaccagacggttacggctacaggccgcatcagcagtaccgaaccaaatttacagaatatcccagtcagacacgaaatgggaagggaaatacggaaagcttttattccgtcgtcggaaaacgctgtttttgttgatgccgattattcacagatagagcttcgcgtgcttgcccatataacaggcgatgaagccctgataaatgctttcgttaagggggaagatattcatacggccacggcgtcgctggtatttgacgtagctcccgaagatgtgacgccggaactgcgcagaaaggcaaaagccgtaaatttcggcatagtgtacgggatcagtgattacgggctggcacgggatttgggaattacccggaaggaagcaaagcggtatatagacgactattttgccaaataccccaaagtaaaaacctatgtggatgaaattgtgcgggtcggccaggaacaggggtatgtggaaactctgttccacagaagaagataccttggtgagcttgcatctaaaaattttcaccagcgttctttcggaaaaagggttgcaatgaatacgcccatacagggcactgcagccgatattattaaaattgcgatggtgaaggtatacaaggctttgaaagaatccggccttaaatccaggcttatcctccaggtccatgacgaacttgttattgagacttttgaagacgaactggagactgtcaaggaacttgtcaaaaagtgcatggaagaggccgttgaattgagtgtgccgcttgttgtcgacgtttcaatcgggaaaaactggtatgaagcctcctgatatggatcc

SEQ ID NO: 186 - DNA, 2772 bp, Artificial Sequence
  Description of Artificial Sequence: Synthetic Clostridium stercorarium DNA Polymerase P818H
atgaaatacctgctgccgaccgctgctgctggtctgctgctcctcgctgcccagccggcgatggccatggatccaaaaataatccttatagacggaaacagtattttaaaccgcggtttttatgccctgtcggggcgatccatgctgactacgtccacaggtctgtataccaatgcggttttcgcttttgtaaatatattgaacaaatatatcgaagaggaaaaccctgattatattgccgttgctttcgatcttagggcaaaaactttccggcacggtctatatgagggatacaaagcgcagcggaaaggcatgcccgatgaacttgcaatgcagatacccctcgcgaaggaagtactgagggcgatgaatattgccataatagagcatgaaggttatgaagccgacgatataatcggcagcctttcgttaaaggccgaaaaagagaattttgacgtaataatccttacgggggacagggattctttccagctgatcagcgacagggtgaaagttatcctgccttcgacgaaagccggaaaaacagagaccaacgtatatgataaacaggccatcattgacaaatacggagttttaccccatcagcttattgacgttaaaggcttaatgggagattcgtcagataatatacccggcgttccgggagtgggtgagaaaacggcgttaagccttatttcagcctacggtacactggaaggtgtttacgagcatattgatgaaataaaacagcctaagctgaaagcatcgctgattgaatataaggatcaggcgtttttaagccgtaagctgggtactattgtaagaaatctggagctgtgtgcttcgctggaggatctgaaaagaaaagaaataaaccgcaaagagcttttgaatgttttcagaaaactcgaatttgaaagtatcatatcaaaaatgaatcttgcttccgctgaggtgacagaattacctcccgcgccggaagagcttaaaataacccatatttcagcggcagaggatcttaagaaatggattgcttacctgcttaaccagaaaaacatttccgtccttcaactgattgaccgggaggattcatacagttcccgtctttcagggctggctttgtgcaccggggatgaggttttttatatcgagaccgggactgcactccccgagaatttgattgcaacagagctgaaagaactgtggcagaatgaaaatattcacaaaatcggacacaatataaaagaatttataacctggctgctgaaacacgatgttgaactgaacggcctttatttcgacactatgattgccgaatacctgatagattccataagaaacggctatcctatagcaagcctttctcacaaatacctgaatcgcagcgttccgtcgctggacgaacttttgggcaagggaaagggagcaaaaaagtactctgaaattccgcccgaaaggctgaaagattacagcgcttataacgtcaaagccatttttgacatatggccgatgcagaaaaaagttcttcaggaaaaccggcaggaggagctttttaatgacatagagcttcctcttataaccgtacttgccagtatggaataccacggtttcaaagttgacgccgcaaaacttcacgaatacggcgaagttcttctgtcacgcataaaagacctggaaaaggtaatttacatgctggccggtgaagaattcaacatcaattcaacgaagcagcttggtaccatattattcgaaaaactgaagcttcccgttgtaaaaagtacaaagaccggatactccaccgacgtcgaggttcttgaagagctttattacaagcatgatataataccatgcataatagaataccgccagcttacaaaactttacaccacctacgccgaaggtcttgaaaaagtgataaatcctgtaaccggtaaaattcattcaagttttaaccagacggttacggctacaggccgcatcagcagtaccgaaccaaatttacagaatatcccagtcagacacgaaatgggaagggaaatacggaaagcttttattccgtcgtcggaaaacgctgtttttgttgatgccgattattcacagatagagcttcgcgtgcttgcccatataacaggcgatgaagccctgataaatgctttcgttaagggggaagatattcatacggccacggcgtcgctggtatttgacgtagctcccgaagatgtgacgccggaactgcgcagaaaggcaaaagccgtaaatttcggcatagtgtacgggatcagtgattacgggctggcacgggatttgggaattacccggaaggaagcaaagcggtatatagacgactattttgccaaataccccaaagtaaaaacctatgtggatgaaattgtgcgggtcggccaggaacaggggtatgtggaaactctgttccacagaagaagataccttcatgagcttgcatctaaaaattttcaccagcgttctttcggaaaaagggttgcaatgaatacgcccatacagggcactgcagccgatattattaaaattgcgatggtgaaggtatacaaggctttgaaagaatccggccttaaatccaggcttatcctccaggtccatgacgaacttgttattgagacttttgaagacgaactggagactgtcaaggaacttgtcaaaaagtgcatggaagaggccgttgaattgagtgtgccgcttgttgtcgacgtttcaatcgggaaaaactggtatgaagcctcctgatatggatcc

SEQ ID NO: 187 - DNA, 2772 bp, Artificial Sequence
  Description of Artificial Sequence: Synthetic Clostridium stercorarium DNA Polymerase P818I
atgaaatacctgctgccgaccgctgctgctggtctgctgctcctcgctgcccagccggcgatggccatggatccaaaaataatccttatagacggaaacagtattttaaaccgcggtttttatgccctgtcggggcgatccatgctgactacgtccacaggtctgtataccaatgcggttttcgcttttgtaaatatattgaacaaatatatcgaagaggaaaaccctgattatattgccgttgctttcgatcttagggcaaaaactttccggcacggtctatatgagggatacaaagcgcagcggaaaggcatgcccgatgaacttgcaatgcagatacccctcgcgaaggaagtactgagggcgatgaatattgccataatagagcatgaaggttatgaagccgacgatataatcggcagcctttcgttaaaggccgaaaaagagaattttgacgtaataatccttacgggggacagggattctttccagctgatcagcgacagggtgaaagttatcctgccttcgacgaaagccggaaaaacagagaccaacgtatatgataaacaggccatcattgacaaatacggagttttaccccatcagcttattgacgttaaaggcttaatgggagattcgtcagataatatacccggcgttccgggagtgggtgagaaaacggcgttaagccttatttcagcctacggtacactggaaggtgtttacgagcatattgatgaaataaaacagcctaagctgaaagcatcgctgattgaatataaggatcaggcgtttttaagccgtaagctgggtactattgtaagaaatctggagctgtgtgcttcgctggaggatctgaaaagaaaagaaataaaccgcaaagagcttttgaatgttttcagaaaactcgaatttgaaagtatcatatcaaaaatgaatcttgcttccgctgaggtgacagaattacctcccgcgccggaagagcttaaaataacccatatttcagcggcagaggatcttaagaaatggattgcttacctgcttaaccagaaaaacatttccgtccttcaactgattgaccgggaggattcatacagttcccgtctttcagggctggctttgtgcaccggggatgaggttttttatatcgagaccgggactgcactccccgagaatttgattgcaacagagctgaaagaactgtggcagaatgaaaatattcacaaaatcggacacaatataaaagaatttataacctggctgctgaaacacgatgttgaactgaacggcctttatttcgacactatgattgccgaatacctgatagattccataagaaacggctatcctatagcaagcctttctcacaaatacctgaatcgcagcgttccgtcgctggacgaacttttgggcaagggaaagggagcaaaaaagtactctgaaattccgcccgaaaggctgaaagattacagcgcttataacgtcaaagccatttttgacatatggccgatgcagaaaaaagttcttcaggaaaaccggcaggaggagctttttaatgacatagagcttcctcttataaccgtacttgccagtatggaataccacggtttcaaagttgacgccgcaaaacttcacgaatacggcgaagttcttctgtcacgcataaaagacctggaaaaggtaatttacatgctggccggtgaagaattcaacatcaattcaacgaagcagcttggtaccatattattcgaaaaactgaagcttcccgttgtaaaaagtacaaagaccggatactccaccgacgtcgaggttcttgaagagctttattacaagcatgatataataccatgcataatagaataccgccagcttacaaaactttacaccacctacgccgaaggtcttgaaaaagtgataaatcctgtaaccggtaaaattcattcaagttttaaccagacggttacggctacaggccgcatcagcagtaccgaaccaaatttacagaatatcccagtcagacacgaaatgggaagggaaatacggaaagcttttattccgtcgtcggaaaacgctgtttttgttgatgccgattattcacagatagagcttcgcgtgcttgcccatataacaggcgatgaagccctgataaatgctttcgttaagggggaagatattcatacggccacggcgtcgctggtatttgacgtagctcccgaagatgtgacgccggaactgcgcagaaaggcaaaagccgtaaatttcggcatagtgtacgggatcagtgattacgggctggcacgggatttgggaattacccggaaggaagcaaagcggtatatagacgactattttgccaaataccccaaagtaaaaacctatgtggatgaaattgtgcgggtcggccaggaacaggggtatgtggaaactctgttccacagaagaagataccttattgagcttgcatctaaaaattttcaccagcgttctttcggaaaaagggttgcaatgaatacgcccatacagggcactgcagccgatattattaaaattgcgatggtgaaggtatacaaggctttgaaagaatccggccttaaatccaggcttatcctccaggtccatgacgaacttgttattgagacttttgaagacgaactggagactgtcaaggaacttgtcaaaaagtgcatggaagaggccgttgaattgagtgtgccgcttgttgtcgacgtttcaatcgggaaaaactggtatgaagcctcctgatatggatcc

SEQ ID NO: 188 - DNA, 2772 bp, Artificial Sequence
  Description of Artificial Sequence: Synthetic Clostridium stercorarium DNA Polymerase P818L
atgaaatacctgctgccgaccgctgctgctggtctgctgctcctcgctgcccagccggcgatggccatggatccaaaaataatccttatagacggaaacagtattttaaaccgcggtttttatgccctgtcggggcgatccatgctgactacgtccacaggtctgtataccaatgcggttttcgcttttgtaaatatattgaacaaatatatcgaagaggaaaaccctgattatattgccgttgctttcgatcttagggcaaaaactttccggcacggtctatatgagggatacaaagcgcagcggaaaggcatgcccgatgaacttgcaatgcagatacccctcgcgaaggaagtactgagggcgatgaatattgccataatagagcatgaaggttatgaagccgacgatataatcggcagcctttcgttaaaggccgaaaaagagaattttgacgtaataatccttacgggggacagggattctttccagctgatcagcgacagggtgaaagttatcctgccttcgacgaaagccggaaaaacagagaccaacgtatatgataaacaggccatcattgacaaatacggagttttaccccatcagcttattgacgttaaaggcttaatgggagattcgtcagataatatacccggcgttccgggagtgggtgagaaaacggcgttaagccttatttcagcctacggtacactggaaggtgtttacgagcatattgatgaaataaaacagcctaagctgaaagcatcgctgattgaatataaggatcaggcgtttttaagccgtaagctgggtactattgtaagaaatctggagctgtgtgcttcgctggaggatctgaaaagaaaagaaataaaccgcaaagagcttttgaatgttttcagaaaactcgaatttgaaagtatcatatcaaaaatgaatcttgcttccgctgaggtgacagaattacctcccgcgccggaagagcttaaaataacccatatttcagcggcagaggatcttaagaaatggattgcttacctgcttaaccagaaaaacatttccgtccttcaactgattgaccgggaggattcatacagttcccgtctttcagggctggctttgtgcaccggggatgaggttttttatatcgagaccgggactgcactccccgagaatttgattgcaacagagctgaaagaactgtggcagaatgaaaatattcacaaaatcggacacaatataaaagaatttataacctggctgctgaaacacgatgttgaactgaacggcctttatttcgacactatgattgccgaatacctgatagattccataagaaacggctatcctatagcaagcctttctcacaaatacctgaatcgcagcgttccgtcgctggacgaacttttgggcaagggaaagggagcaaaaaagtactctgaaattccgcccgaaaggctgaaagattacagcgcttataacgtcaaagccatttttgacatatggccgatgcagaaaaaagttcttcaggaaaaccggcaggaggagctttttaatgacatagagcttcctcttataaccgtacttgccagtatggaataccacggtttcaaagttgacgccgcaaaacttcacgaatacggcgaagttcttctgtcacgcataaaagacctggaaaaggtaatttacatgctggccggtgaagaattcaacatcaattcaacgaagcagcttggtaccatattattcgaaaaactgaagcttcccgttgtaaaaagtacaaagaccggatactccaccgacgtcgaggttcttgaagagctttattacaagcatgatataataccatgcataatagaataccgccagcttacaaaactttacaccacctacgccgaaggtcttgaaaaagtgataaatcctgtaaccggtaaaattcattcaagttttaaccagacggttacggctacaggccgcatcagcagtaccgaaccaaatttacagaatatcccagtcagacacgaaatgggaagggaaatacggaaagcttttattccgtcgtcggaaaacgctgtttttgttgatgccgattattcacagatagagcttcgcgtgcttgcccatataacaggcgatgaagccctgataaatgctttcgttaagggggaagatattcatacggccacggcgtcgctggtatttgacgtagctcccgaagatgtgacgccggaactgcgcagaaaggcaaaagccgtaaatttcggcatagtgtacgggatcagtgattacgggctggcacgggatttgggaattacccggaaggaagcaaagcggtatatagacgactattttgccaaataccccaaagtaaaaacctatgtggatgaaattgtgcgggtcggccaggaacaggggtatgtggaaactctgttccacagaagaagataccttcttgagcttgcatctaaaaattttcaccagcgttctttcggaaaaagggttgcaatgaatacgcccatacagggcactgcagccgatattattaaaattgcgatggtgaaggtatacaaggctttgaaagaatccggccttaaatccaggcttatcctccaggtccatgacgaacttgttattgagacttttgaagacgaactggagactgtcaaggaacttgtcaaaaagtgcatggaagaggccgttgaattgagtgtgccgcttgttgtcgacgtttcaatcgggaaaaactggtatgaagcctcctgatatggatcc

SEQ ID NO: 189 - DNA, 2772 bp, Artificial Sequence
  Description of Artificial Sequence: Synthetic Clostridium stercorarium DNA Polymerase P818K
atgaaatacctgctgccgaccgctgctgctggtctgctgctcctcgctgcccagccggcgatggccatggatccaaaaataatccttatagacggaaacagtattttaaaccgcggtttttatgccctgtcggggcgatccatgctgactacgtccacaggtctgtataccaatgcggttttcgcttttgtaaatatattgaacaaatatatcgaagaggaaaaccctgattatattgccgttgctttcgatcttagggcaaaaactttccggcacggtctatatgagggatacaaagcgcagcggaaaggcatgcccgatgaacttgcaatgcagatacccctcgcgaaggaagtactgagggcgatgaatattgccataatagagcatgaaggttatgaagccgacgatataatcggcagcctttcgttaaaggccgaaaaagagaattttgacgtaataatccttacgggggacagggattctttccagctgatcagcgacagggtgaaagttatcctgccttcgacgaaagccggaaaaacagagaccaacgtatatgataaacaggccatcattgacaaatacggagttttaccccatcagcttattgacgttaaaggcttaatgggagattcgtcagataatatacccggcgttccgggagtgggtgagaaaacggcgttaagccttatttcagcctacggtacactggaaggtgtttacgagcatattgatgaaataaaacagcctaagctgaaagcatcgctgattgaatataaggatcaggcgtttttaagccgtaagctgggtactattgtaagaaatctggagctgtgtgcttcgctggaggatctgaaaagaaaagaaataaaccgcaaagagcttttgaatgttttcagaaaactcgaatttgaaagtatcatatcaaaaatgaatcttgcttccgctgaggtgacagaattacctcccgcgccggaagagcttaaaataacccatatttcagcggcagaggatcttaagaaatggattgcttacctgcttaaccagaaaaacatttccgtccttcaactgattgaccgggaggattcatacagttcccgtctttcagggctggctttgtgcaccggggatgaggttttttatatcgagaccgggactgcactccccgagaatttgattgcaacagagctgaaagaactgtggcagaatgaaaatattcacaaaatcggacacaatataaaagaatttataacctggctgctgaaacacgatgttgaactgaacggcctttatttcgacactatgattgccgaatacctgatagattccataagaaacggctatcctatagcaagcctttctcacaaatacctgaatcgcagcgttccgtcgctggacgaacttttgggcaagggaaagggagcaaaaaagtactctgaaattccgcccgaaaggctgaaagattacagcgcttataacgtcaaagccatttttgacatatggccgatgcagaaaaaagttcttcaggaaaaccggcaggaggagctttttaatgacatagagcttcctcttataaccgtacttgccagtatggaataccacggtttcaaagttgacgccgcaaaacttcacgaatacggcgaagttcttctgtcacgcataaaagacctggaaaaggtaatttacatgctggccggtgaagaattcaacatcaattcaacgaagcagcttggtaccatattattcgaaaaactgaagcttcccgttgtaaaaagtacaaagaccggatactccaccgacgtcgaggttcttgaagagctttattacaagcatgatataataccatgcataatagaataccgccagcttacaaaactttacaccacctacgccgaaggtcttgaaaaagtgataaatcctgtaaccggtaaaattcattcaagttttaaccagacggttacggctacaggccgcatcagcagtaccgaaccaaatttacagaatatcccagtcagacacgaaatgggaagggaaatacggaaagcttttattccgtcgtcggaaaacgctgtttttgttgatgccgattattcacagatagagcttcgcgtgcttgcccatataacaggcgatgaagccctgataaatgctttcgttaagggggaagatattcatacggccacggcgtcgctggtatttgacgtagctcccgaagatgtgacgccggaactgcgcagaaaggcaaaagccgtaaatttcggcatagtgtacgggatcagtgattacgggctggcacgggatttgggaattacccggaaggaagcaaagcggtatatagacgactattttgccaaataccccaaagtaaaaacctatgtggatgaaattgtgcgggtcggccaggaacaggggtatgtggaaactctgttccacagaagaagataccttaaagagcttgcatctaaaaattttcaccagcgttctttcggaaaaagggttgcaatgaatacgcccatacagggcactgcagccgatattattaaaattgcgatggtgaaggtatacaaggctttgaaagaatccggccttaaatccaggcttatcctccaggtccatgacgaacttgttattgagacttttgaagacgaactggagactgtcaaggaacttgtcaaaaagtgcatggaagaggccgttgaattgagtgtgccgcttgttgtcgacgtttcaatcgggaaaaactggtatgaagcctcctgatatggatcc

SEQ ID NO: 190 - DNA, 2772 bp, Artificial Sequence
  Description of Artificial Sequence: Synthetic Clostridium stercorarium DNA Polymerase P818M
atgaaatacctgctgccgaccgctgctgctggtctgctgctcctcgctgcccagccggcgatggccatggatccaaaaataatccttatagacggaaacagtattttaaaccgcggtttttatgccctgtcggggcgatccatgctgactacgtccacaggtctgtataccaatgcggttttcgcttttgtaaatatattgaacaaatatatcgaagaggaaaaccctgattatattgccgttgctttcgatcttagggcaaaaactttccggcacggtctatatgagggatacaaagcgcagcggaaaggcatgcccgatgaacttgcaatgcagatacccctcgcgaaggaagtactgagggcgatgaatattgccataatagagcatgaaggttatgaagccgacgatataatcggcagcctttcgttaaaggccgaaaaagagaattttgacgtaataatccttacgggggacagggattctttccagctgatcagcgacagggtgaaagttatcctgccttcgacgaaagccggaaaaacagagaccaacgtatatgataaacaggccatcattgacaaatacggagttttaccccatcagcttattgacgttaaaggcttaatgggagattcgtcagataatatacccggcgttccgggagtgggtgagaaaacggcgttaagccttatttcagcctacggtacactggaaggtgtttacgagcatattgatgaaataaaacagcctaagctgaaagcatcgctgattgaatataaggatcaggcgtttttaagccgtaagctgggtactattgtaagaaatctggagctgtgtgcttcgctggaggatctgaaaagaaaagaaataaaccgcaaagagcttttgaatgttttcagaaaactcgaatttgaaagtatcatatcaaaaatgaatcttgcttccgctgaggtgacagaattacctcccgcgccggaagagcttaaaataacccatatttcagcggcagaggatcttaagaaatggattgcttacctgcttaaccagaaaaacatttccgtccttcaactgattgaccgggaggattcatacagttcccgtctttcagggctggctttgtgcaccggggatgaggttttttatatcgagaccgggactgcactccccgagaatttgattgcaacagagctgaaagaactgtggcagaatgaaaatattcacaaaatcggacacaatataaaagaatttataacctggctgctgaaacacgatgttgaactgaacggcctttatttcgacactatgattgccgaatacctgatagattccataagaaacggctatcctatagcaagcctttctcacaaatacctgaatcgcagcgttccgtcgctggacgaacttttgggcaagggaaagggagcaaaaaagtactctgaaattccgcccgaaaggctgaaagattacagcgcttataacgtcaaagccatttttgacatatggccgatgcagaaaaaagttcttcaggaaaaccggcaggaggagctttttaatgacatagagcttcctcttataaccgtacttgccagtatggaataccacggtttcaaagttgacgccgcaaaacttcacgaatacggcgaagttcttctgtcacgcataaaagacctggaaaaggtaatttacatgctggccggtgaagaattcaacatcaattcaacgaagcagcttggtaccatattattcgaaaaactgaagcttcccgttgtaaaaagtacaaagaccggatactccaccgacgtcgaggttcttgaagagctttattacaagcatgatataataccatgcataatagaataccgccagcttacaaaactttacaccacctacgccgaaggtcttgaaaaagtgataaatcctgtaaccggtaaaattcattcaagttttaaccagacggttacggctacaggccgcatcagcagtaccgaaccaaatttacagaatatcccagtcagacacgaaatgggaagggaaatacggaaagcttttattccgtcgtcggaaaacgctgtttttgttgatgccgattattcacagatagagcttcgcgtgcttgcccatataacaggcgatgaagccctgataaatgctttcgttaagggggaagatattcatacggccacggcgtcgctggtatttgacgtagctcccgaagatgtgacgccggaactgcgcagaaaggcaaaagccgtaaatttcggcatagtgtacgggatcagtgattacgggctggcacgggatttgggaattacccggaaggaagcaaagcggtatatagacgactattttgccaaataccccaaagtaaaaacctatgtggatgaaattgtgcgggtcggccaggaacaggggtatgtggaaactctgttccacagaagaagataccttatggagcttgcatctaaaaattttcaccagcgttctttcggaaaaagggttgcaatgaatacgcccatacagggcactgcagccgatattattaaaattgcgatggtgaaggtatacaaggctttgaaagaatccggccttaaatccaggcttatcctccaggtccatgacgaacttgttattgagacttttgaagacgaactggagactgtcaaggaacttgtcaaaaagtgcatggaagaggccgttgaattgagtgtgccgcttgttgtcgacgtttcaatcgggaaaaactggtatgaagcctcctgatatggatcc

SEQ ID NO: 191 - DNA, 2772 bp, Artificial Sequence
  Description of Artificial Sequence: Synthetic Clostridium stercorarium DNA Polymerase P818F
atgaaatacctgctgccgaccgctgctgctggtctgctgctcctcgctgcccagccggcgatggccatggatccaaaaataatccttatagacggaaacagtattttaaaccgcggtttttatgccctgtcggggcgatccatgctgactacgtccacaggtctgtataccaatgcggttttcgcttttgtaaatatattgaacaaatatatcgaagaggaaaaccctgattatattgccgttgctttcgatcttagggcaaaaactttccggcacggtctatatgagggatacaaagcgcagcggaaaggcatgcccgatgaacttgcaatgcagatacccctcgcgaaggaagtactgagggcgatgaatattgccataatagagcatgaaggttatgaagccgacgatataatcggcagcctttcgttaaaggccgaaaaagagaattttgacgtaataatccttacgggggacagggattctttccagctgatcagcgacagggtgaaagttatcctgccttcgacgaaagccggaaaaacagagaccaacgtatatgataaacaggccatcattgacaaatacggagttttaccccatcagcttattgacgttaaaggcttaatgggagattcgtcagataatatacccggcgttccgggagtgggtgagaaaacggcgttaagccttatttcagcctacggtacactggaaggtgtttacgagcatattgatgaaataaaacagcctaagctgaaagcatcgctgattgaatataaggatcaggcgtttttaagccgtaagctgggtactattgtaagaaatctggagctgtgtgcttcgctggaggatctgaaaagaaaagaaataaaccgcaaagagcttttgaatgttttcagaaaactcgaatttgaaagtatcatatcaaaaatgaatcttgcttccgctgaggtgacagaattacctcccgcgccggaagagcttaaaataacccatatttcagcggcagaggatcttaagaaatggattgcttacctgcttaaccagaaaaacatttccgtccttcaactgattgaccgggaggattcatacagttcccgtctttcagggctggctttgtgcaccggggatgaggttttttatatcgagaccgggactgcactccccgagaatttgattgcaacagagctgaaagaactgtggcagaatgaaaatattcacaaaatcggacacaatataaaagaatttataacctggctgctgaaacacgatgttgaactgaacggcctttatttcgacactatgattgccgaatacctgatagattccataagaaacggctatcctatagcaagcctttctcacaaatacctgaatcgcagcgttccgtcgctggacgaacttttgggcaagggaaagggagcaaaaaagtactctgaaattccgcccgaaaggctgaaagattacagcgcttataacgtcaaagccatttttgacatatggccgatgcagaaaaaagttcttcaggaaaaccggcaggaggagctttttaatgacatagagcttcctcttataaccgtacttgccagtatggaataccacggtttcaaagttgacgccgcaaaacttcacgaatacggcgaagttcttctgtcacgcataaaagacctggaaaaggtaatttacatgctggccggtgaagaattcaacatcaattcaacgaagcagcttggtaccatattattcgaaaaactgaagcttcccgttgtaaaaagtacaaagaccggatactccaccgacgtcgaggttcttgaagagctttattacaagcatgatataataccatgcataatagaataccgccagcttacaaaactttacaccacctacgccgaaggtcttgaaaaagtgataaatcctgtaaccggtaaaattcattcaagttttaaccagacggttacggctacaggccgcatcagcagtaccgaaccaaatttacagaatatcccagtcagacacgaaatgggaagggaaatacggaaagcttttattccgtcgtcggaaaacgctgtttttgttgatgccgattattcacagatagagcttcgcgtgcttgcccatataacaggcgatgaagccctgataaatgctttcgttaagggggaagatattcatacggccacggcgtcgctggtatttgacgtagctcccgaagatgtgacgccggaactgcgcagaaaggcaaaagccgtaaatttcggcatagtgtacgggatcagtgattacgggctggcacgggatttgggaattacccggaaggaagcaaagcggtatatagacgactattttgccaaataccccaaagtaaaaacctatgtggatgaaattgtgcgggtcggccaggaacaggggtatgtggaaactctgttccacagaagaagatacctttttgagcttgcatctaaaaattttcaccagcgttctttcggaaaaagggttgcaatgaatacgcccatacagggcactgcagccgatattattaaaattgcgatggtgaaggtatacaaggctttgaaagaatccggccttaaatccaggcttatcctccaggtccatgacgaacttgttattgagacttttgaagacgaactggagactgtcaaggaacttgtcaaaaagtgcatggaagaggccgttgaattgagtgtgccgcttgttgtcgacgtttcaatcgggaaaaactggtatgaagcctcctgatatggatcc

SEQ ID NO: 192 - DNA, 2772 bp, Artificial Sequence
  Description of Artificial Sequence: Synthetic Clostridium stercorarium DNA Polymerase P818S
atgaaatacctgctgccgaccgctgctgctggtctgctgctcctcgctgcccagccggcgatggccatggatccaaaaataatccttatagacggaaacagtattttaaaccgcggtttttatgccctgtcggggcgatccatgctgactacgtccacaggtctgtataccaatgcggttttcgcttttgtaaatatattgaacaaatatatcgaagaggaaaaccctgattatattgccgttgctttcgatcttagggcaaaaactttccggcacggtctatatgagggatacaaagcgcagcggaaaggcatgcccgatgaacttgcaatgcagatacccctcgcgaaggaagtactgagggcgatgaatattgccataatagagcatgaaggttatgaagccgacgatataatcggcagcctttcgttaaaggccgaaaaagagaattttgacgtaataatccttacgggggacagggattctttccagctgatcagcgacagggtgaaagttatcctgccttcgacgaaagccggaaaaacagagaccaacgtatatgataaacaggccatcattgacaaatacggagttttaccccatcagcttattgacgttaaaggcttaatgggagattcgtcagataatatacccggcgttccgggagtgggtgagaaaacggcgttaagccttatttcagcctacggtacactggaaggtgtttacgagcatattgatgaaataaaacagcctaagctgaaagcatcgctgattgaatataaggatcaggcgtttttaagccgtaagctgggtactattgtaagaaatctggagctgtgtgcttcgctggaggatctgaaaagaaaagaaataaaccgcaaagagcttttgaatgttttcagaaaactcgaatttgaaagtatcatatcaaaaatgaatcttgcttccgctgaggtgacagaattacctcccgcgccggaagagcttaaaataacccatatttcagcggcagaggatcttaagaaatggattgcttacctgcttaaccagaaaaacatttccgtccttcaactgattgaccgggaggattcatacagttcccgtctttcagggctggctttgtgcaccggggatgaggttttttatatcgagaccgggactgcactccccgagaatttgattgcaacagagctgaaagaactgtggcagaatgaaaatattcacaaaatcggacacaatataaaagaatttataacctggctgctgaaacacgatgttgaactgaacggcctttatttcgacactatgattgccgaatacctgatagattccataagaaacggctatcctatagcaagcctttctcacaaatacctgaatcgcagcgttccgtcgctggacgaacttttgggcaagggaaagggagcaaaaaagtactctgaaattccgcccgaaaggctgaaagattacagcgcttataacgtcaaagccatttttgacatatggccgatgcagaaaaaagttcttcaggaaaaccggcaggaggagctttttaatgacatagagcttcctcttataaccgtacttgccagtatggaataccacggtttcaaagttgacgccgcaaaacttcacgaatacggcgaagttcttctgtcacgcataaaagacctggaaaaggtaatttacatgctggccggtgaagaattcaacatcaattcaacgaagcagcttggtaccatattattcgaaaaactgaagcttcccgttgtaaaaagtacaaagaccggatactccaccgacgtcgaggttcttgaagagctttattacaagcatgatataataccatgcataatagaataccgccagcttacaaaactttacaccacctacgccgaaggtcttgaaaaagtgataaatcctgtaaccggtaaaattcattcaagttttaaccagacggttacggctacaggccgcatcagcagtaccgaaccaaatttacagaatatcccagtcagacacgaaatgggaagggaaatacggaaagcttttattccgtcgtcggaaaacgctgtttttgttgatgccgattattcacagatagagcttcgcgtgcttgcccatataacaggcgatgaagccctgataaatgctttcgttaagggggaagatattcatacggccacggcgtcgctggtatttgacgtagctcccgaagatgtgacgccggaactgcgcagaaaggcaaaagccgtaaatttcggcatagtgtacgggatcagtgattacgggctggcacgggatttgggaattacccggaaggaagcaaagcggtatatagacgactattttgccaaataccccaaagtaaaaacctatgtggatgaaattgtgcgggtcggccaggaacaggggtatgtggaaactctgttccacagaagaagatacctttctgagcttgcatctaaaaattttcaccagcgttctttcggaaaaagggttgcaatgaatacgcccatacagggcactgcagccgatattattaaaattgcgatggtgaaggtatacaaggctttgaaagaatccggccttaaatccaggcttatcctccaggtccatgacgaacttgttattgagacttttgaagacgaactggagactgtcaaggaacttgtcaaaaagtgcatggaagaggccgttgaattgagtgtgccgcttgttgtcgacgtttcaatcgggaaaaactggtatgaagcctcctgatatggatcc

SEQ ID NO: 193 - DNA, 2772 bp, Artificial Sequence
  Description of Artificial Sequence: Synthetic Clostridium stercorarium DNA Polymerase P818T
atgaaatacctgctgccgaccgctgctgctggtctgctgctcctcgctgcccagccggcgatggccatggatccaaaaataatccttatagacggaaacagtattttaaaccgcggtttttatgccctgtcggggcgatccatgctgactacgtccacaggtctgtataccaatgcggttttcgcttttgtaaatatattgaacaaatatatcgaagaggaaaaccctgattatattgccgttgctttcgatcttagggcaaaaactttccggcacggtctatatgagggatacaaagcgcagcggaaaggcatgcccgatgaacttgcaatgcagatacccctcgcgaaggaagtactgagggcgatgaatattgccataatagagcatgaaggttatgaagccgacgatataatcggcagcctttcgttaaaggccgaaaaagagaattttgacgtaataatccttacgggggacagggattctttccagctgatcagcgacagggtgaaagttatcctgccttcgacgaaagccggaaaaacagagaccaacgtatatgataaacaggccatcattgacaaatacggagttttaccccatcagcttattgacgttaaaggcttaatgggagattcgtcagataatatacccggcgttccgggagtgggtgagaaaacggcgttaagccttatttcagcctacggtacactggaaggtgtttacgagcatattgatgaaataaaacagcctaagctgaaagcatcgctgattgaatataaggatcaggcgtttttaagccgtaagctgggtactattgtaagaaatctggagctgtgtgcttcgctggaggatctgaaaagaaaagaaataaaccgcaaagagcttttgaatgttttcagaaaactcgaatttgaaagtatcatatcaaaaatgaatcttgcttccgctgaggtgacagaattacctcccgcgccggaagagcttaaaataacccatatttcagcggcagaggatcttaagaaatggattgcttacctgcttaaccagaaaaacatttccgtccttcaactgattgaccgggaggattcatacagttcccgtctttcagggctggctttgtgcaccggggatgaggttttttatatcgagaccgggactgcactccccgagaatttgattgcaacagagctgaaagaactgtggcagaatgaaaatattcacaaaatcggacacaatataaaagaatttataacctggctgctgaaacacgatgttgaactgaacggcctttatttcgacactatgattgccgaatacctgatagattccataagaaacggctatcctatagcaagcctttctcacaaatacctgaatcgcagcgttccgtcgctggacgaacttttgggcaagggaaagggagcaaaaaagtactctgaaattccgcccgaaaggctgaaagattacagcgcttataacgtcaaagccatttttgacatatggccgatgcagaaaaaagttcttcaggaaaaccggcaggaggagctttttaatgacatagagcttcctcttataaccgtacttgccagtatggaataccacggtttcaaagttgacgccgcaaaacttcacgaatacggcgaagttcttctgtcacgcataaaagacctggaaaaggtaatttacatgctggccggtgaagaattcaacatcaattcaacgaagcagcttggtaccatattattcgaaaaactgaagcttcccgttgtaaaaagtacaaagaccggatactccaccgacgtcgaggttcttgaagagctttattacaagcatgatataataccatgcataatagaataccgccagcttacaaaactttacaccacctacgccgaaggtcttgaaaaagtgataaatcctgtaaccggtaaaattcattcaagttttaaccagacggttacggctacaggccgcatcagcagtaccgaaccaaatttacagaatatcccagtcagacacgaaatgggaagggaaatacggaaagcttttattccgtcgtcggaaaacgctgtttttgttgatgccgattattcacagatagagcttcgcgtgcttgcccatataacaggcgatgaagccctgataaatgctttcgttaagggggaagatattcatacggccacggcgtcgctggtatttgacgtagctcccgaagatgtgacgccggaactgcgcagaaaggcaaaagccgtaaatttcggcatagtgtacgggatcagtgattacgggctggcacgggatttgggaattacccggaaggaagcaaagcggtatatagacgactattttgccaaataccccaaagtaaaaacctatgtggatgaaattgtgcgggtcggccaggaacaggggtatgtggaaactctgttccacagaagaagataccttactgagcttgcatctaaaaattttcaccagcgttctttcggaaaaagggttgcaatgaatacgcccatacagggcactgcagccgatattattaaaattgcgatggtgaaggtatacaaggctttgaaagaatccggccttaaatccaggcttatcctccaggtccatgacgaacttgttattgagacttttgaagacgaactggagactgtcaaggaacttgtcaaaaagtgcatggaagaggccgttgaattgagtgtgccgcttgttgtcgacgtttcaatcgggaaaaactggtatgaagcctcctgatatggatcc

SEQ ID NO: 194 - DNA, 2772 bp, Artificial Sequence
  Description of Artificial Sequence: Synthetic Clostridium stercorarium DNA Polymerase P818W
atgaaatacctgctgccgaccgctgctgctggtctgctgctcctcgctgcccagccggcgatggccatggatccaaaaataatccttatagacggaaacagtattttaaaccgcggtttttatgccctgtcggggcgatccatgctgactacgtccacaggtctgtataccaatgcggttttcgcttttgtaaatatattgaacaaatatatcgaagaggaaaaccctgattatattgccgttgctttcgatcttagggcaaaaactttccggcacggtctatatgagggatacaaagcgcagcggaaaggcatgcccgatgaacttgcaatgcagatacccctcgcgaaggaagtactgagggcgatgaatattgccataatagagcatgaaggttatgaagccgacgatataatcggcagcctttcgttaaaggccgaaaaagagaattttgacgtaataatccttacgggggacagggattctttccagctgatcagcgacagggtgaaagttatcctgccttcgacgaaagccggaaaaacagagaccaacgtatatgataaacaggccatcattgacaaatacggagttttaccccatcagcttattgacgttaaaggcttaatgggagattcgtcagataatatacccggcgttccgggagtgggtgagaaaacggcgttaagccttatttcagcctacggtacactggaaggtgtttacgagcatattgatgaaataaaacagcctaagctgaaagcatcgctgattgaatataaggatcaggcgtttttaagccgtaagctgggtactattgtaagaaatctggagctgtgtgcttcgctggaggatctgaaaagaaaagaaataaaccgcaaagagcttttgaatgttttcagaaaactcgaatttgaaagtatcatatcaaaaatgaatcttgcttccgctgaggtgacagaattacctcccgcgccggaagagcttaaaataacccatatttcagcggcagaggatcttaagaaatggattgcttacctgcttaaccagaaaaacatttccgtccttcaactgattgaccgggaggattcatacagttcccgtctttcagggctggctttgtgcaccggggatgaggttttttatatcgagaccgggactgcactccccgagaatttgattgcaacagagctgaaagaactgtggcagaatgaaaatattcacaaaatcggacacaatataaaagaatttataacctggctgctgaaacacgatgttgaactgaacggcctttatttcgacactatgattgccgaatacctgatagattccataagaaacggctatcctatagcaagcctttctcacaaatacctgaatcgcagcgttccgtcgctggacgaacttttgggcaagggaaagggagcaaaaaagtactctgaaattccgcccgaaaggctgaaagattacagcgcttataacgtcaaagccatttttgacatatggccgatgcagaaaaaagttcttcaggaaaaccggcaggaggagctttttaatgacatagagcttcctcttataaccgtacttgccagtatggaataccacggtttcaaagttgacgccgcaaaacttcacgaatacggcgaagttcttctgtcacgcataaaagacctggaaaaggtaatttacatgctggccggtgaagaattcaacatcaattcaacgaagcagcttggtaccatattattcgaaaaactgaagcttcccgttgtaaaaagtacaaagaccggatactccaccgacgtcgaggttcttgaagagctttattacaagcatgatataataccatgcataatagaataccgccagcttacaaaactttacaccacctacgccgaaggtcttgaaaaagtgataaatcctgtaaccggtaaaattcattcaagttttaaccagacggttacggctacaggccgcatcagcagtaccgaaccaaatttacagaatatcccagtcagacacgaaatgggaagggaaatacggaaagcttttattccgtcgtcggaaaacgctgtttttgttgatgccgattattcacagatagagcttcgcgtgcttgcccatataacaggcgatgaagccctgataaatgctttcgttaagggggaagatattcatacggccacggcgtcgctggtatttgacgtagctcccgaagatgtgacgccggaactgcgcagaaaggcaaaagccgtaaatttcggcatagtgtacgggatcagtgattacgggctggcacgggatttgggaattacccggaaggaagcaaagcggtatatagacgactattttgccaaataccccaaagtaaaaacctatgtggatgaaattgtgcgggtcggccaggaacaggggtatgtggaaactctgttccacagaagaagatacctttgggagcttgcatctaaaaattttcaccagcgttctttcggaaaaagggttgcaatgaatacgcccatacagggcactgcagccgatattattaaaattgcgatggtgaaggtatacaaggctttgaaagaatccggccttaaatccaggcttatcctccaggtccatgacgaacttgttattgagacttttgaagacgaactggagactgtcaaggaacttgtcaaaaagtgcatggaagaggccgttgaattgagtgtgccgcttgttgtcgacgtttcaatcgggaaaaactggtatgaagcctcctgatatggatcc

SEQ ID NO: 195 - DNA, 2772 bp, Artificial Sequence
  Description of Artificial Sequence: Synthetic Clostridium stercorarium DNA Polymerase P818Y
atgaaatacctgctgccgaccgctgctgctggtctgctgctcctcgctgcccagccggcgatggccatggatccaaaaataatccttatagacggaaacagtattttaaaccgcggtttttatgccctgtcggggcgatccatgctgactacgtccacaggtctgtataccaatgcggttttcgcttttgtaaatatattgaacaaatatatcgaagaggaaaaccctgattatattgccgttgctttcgatcttagggcaaaaactttccggcacggtctatatgagggatacaaagcgcagcggaaaggcatgcccgatgaacttgcaatgcagatacccctcgcgaaggaagtactgagggcgatgaatattgccataatagagcatgaaggttatgaagccgacgatataatcggcagcctttcgttaaaggccgaaaaagagaattttgacgtaataatccttacgggggacagggattctttccagctgatcagcgacagggtgaaagttatcctgccttcgacgaaagccggaaaaacagagaccaacgtatatgataaacaggccatcattgacaaatacggagttttaccccatcagcttattgacgttaaaggcttaatgggagattcgtcagataatatacccggcgttccgggagtgggtgagaaaacggcgttaagccttatttcagcctacggtacactggaaggtgtttacgagcatattgatgaaataaaacagcctaagctgaaagcatcgctgattgaatataaggatcaggcgtttttaagccgtaagctgggtactattgtaagaaatctggagctgtgtgcttcgctggaggatctgaaaagaaaagaaataaaccgcaaagagcttttgaatgttttcagaaaactcgaatttgaaagtatcatatcaaaaatgaatcttgcttccgctgaggtgacagaattacctcccgcgccggaagagcttaaaataacccatatttcagcggcagaggatcttaagaaatggattgcttacctgcttaaccagaaaaacatttccgtccttcaactgattgaccgggaggattcatacagttcccgtctttcagggctggctttgtgcaccggggatgaggttttttatatcgagaccgggactgcactccccgagaatttgattgcaacagagctgaaagaactgtggcagaatgaaaatattcacaaaatcggacacaatataaaagaatttataacctggctgctgaaacacgatgttgaactgaacggcctttatttcgacactatgattgccgaatacctgatagattccataagaaacggctatcctatagcaagcctttctcacaaatacctgaatcgcagcgttccgtcgctggacgaacttttgggcaagggaaagggagcaaaaaagtactctgaaattccgcccgaaaggctgaaagattacagcgcttataacgtcaaagccatttttgacatatggccgatgcagaaaaaagttcttcaggaaaaccggcaggaggagctttttaatgacatagagcttcctcttataaccgtacttgccagtatggaataccacggtttcaaagttgacgccgcaaaacttcacgaatacggcgaagttcttctgtcacgcataaaagacctggaaaaggtaatttacatgctggccggtgaagaattcaacatcaattcaacgaagcagcttggtaccatattattcgaaaaactgaagcttcccgttgtaaaaagtacaaagaccggatactccaccgacgtcgaggttcttgaagagctttattacaagcatgatataataccatgcataatagaataccgccagcttacaaaactttacaccacctacgccgaaggtcttgaaaaagtgataaatcctgtaaccggtaaaattcattcaagttttaaccagacggttacggctacaggccgcatcagcagtaccgaaccaaatttacagaatatcccagtcagacacgaaatgggaagggaaatacggaaagcttttattccgtcgtcggaaaacgctgtttttgttgatgccgattattcacagatagagcttcgcgtgcttgcccatataacaggcgatgaagccctgataaatgctttcgttaagggggaagatattcatacggccacggcgtcgctggtatttgacgtagctcccgaagatgtgacgccggaactgcgcagaaaggcaaaagccgtaaatttcggcatagtgtacgggatcagtgattacgggctggcacgggatttgggaattacccggaaggaagcaaagcggtatatagacgactattttgccaaataccccaaagtaaaaacctatgtggatgaaattgtgcgggtcggccaggaacaggggtatgtggaaactctgttccacagaagaagatacctttatgagcttgcatctaaaaattttcaccagcgttctttcggaaaaagggttgcaatgaatacgcccatacagggcactgcagccgatattattaaaattgcgatggtgaaggtatacaaggctttgaaagaatccggccttaaatccaggcttatcctccaggtccatgacgaacttgttattgagacttttgaagacgaactggagactgtcaaggaacttgtcaaaaagtgcatggaagaggccgttgaattgagtgtgccgcttgttgtcgacgtttcaatcgggaaaaactggtatgaagcctcctgatatggatcc

SEQ ID NO: 196 - DNA, 2772 bp, Artificial Sequence
  Description of Artificial Sequence: Synthetic Clostridium stercorarium DNA Polymerase P818V
atgaaatacctgctgccgaccgctgctgctggtctgctgctcctcgctgcccagccggcgatggccatggatccaaaaataatccttatagacggaaacagtattttaaaccgcggtttttatgccctgtcggggcgatccatgctgactacgtccacaggtctgtataccaatgcggttttcgcttttgtaaatatattgaacaaatatatcgaagaggaaaaccctgattatattgccgttgctttcgatcttagggcaaaaactttccggcacggtctatatgagggatacaaagcgcagcggaaaggcatgcccgatgaacttgcaatgcagatacccctcgcgaaggaagtactgagggcgatgaatattgccataatagagcatgaaggttatgaagccgacgatataatcggcagcctttcgttaaaggccgaaaaagagaattttgacgtaataatccttacgggggacagggattctttccagctgatcagcgacagggtgaaagttatcctgccttcgacgaaagccggaaaaacagagaccaacgtatatgataaacaggccatcattgacaaatacggagttttaccccatcagcttattgacgttaaaggcttaatgggagattcgtcagataatatacccggcgttccgggagtgggtgagaaaacggcgttaagccttatttcagcctacggtacactggaaggtgtttacgagcatattgatgaaataaaacagcctaagctgaaagcatcgctgattgaatataaggatcaggcgtttttaagccgtaagctgggtactattgtaagaaatctggagctgtgtgcttcgctggaggatctgaaaagaaaagaaataaaccgcaaagagcttttgaatgttttcagaaaactcgaatttgaaagtatcatatcaaaaatgaatcttgcttccgctgaggtgacagaattacctcccgcgccggaagagcttaaaataacccatatttcagcggcagaggatcttaagaaatggattgcttacctgcttaaccagaaaaacatttccgtccttcaactgattgaccgggaggattcatacagttcccgtctttcagggctggctttgtgcaccggggatgaggttttttatatcgagaccgggactgcactccccgagaatttgattgcaacagagctgaaagaactgtggcagaatgaaaatattcacaaaatcggacacaatataaaagaatttataacctggctgctgaaacacgatgttgaactgaacggcctttatttcgacactatgattgccgaatacctgatagattccataagaaacggctatcctatagcaagcctttctcacaaatacctgaatcgcagcgttccgtcgctggacgaacttttgggcaagggaaagggagcaaaaaagtactctgaaattccgcccgaaaggctgaaagattacagcgcttataacgtcaaagccatttttgacatatggccgatgcagaaaaaagttcttcaggaaaaccggcaggaggagctttttaatgacatagagcttcctcttataaccgtacttgccagtatggaataccacggtttcaaagttgacgccgcaaaacttcacgaatacggcgaagttcttctgtcacgcataaaagacctggaaaaggtaatttacatgctggccggtgaagaattcaacatcaattcaacgaagcagcttggtaccatattattcgaaaaactgaagcttcccgttgtaaaaagtacaaagaccggatactccaccgacgtcgaggttcttgaagagctttattacaagcatgatataataccatgcataatagaataccgccagcttacaaaactttacaccacctacgccgaaggtcttgaaaaagtgataaatcctgtaaccggtaaaattcattcaagttttaaccagacggttacggctacaggccgcatcagcagtaccgaaccaaatttacagaatatcccagtcagacacgaaatgggaagggaaatacggaaagcttttattccgtcgtcggaaaacgctgtttttgttgatgccgattattcacagatagagcttcgcgtgcttgcccatataacaggcgatgaagccctgataaatgctttcgttaagggggaagatattcatacggccacggcgtcgctggtatttgacgtagctcccgaagatgtgacgccggaactgcgcagaaaggcaaaagccgtaaatttcggcatagtgtacgggatcagtgattacgggctggcacgggatttgggaattacccggaaggaagcaaagcggtatatagacgactattttgccaaataccccaaagtaaaaacctatgtggatgaaattgtgcgggtcggccaggaacaggggtatgtggaaactctgttccacagaagaagataccttgttgagcttgcatctaaaaattttcaccagcgttctttcggaaaaagggttgcaatgaatacgcccatacagggcactgcagccgatattattaaaattgcgatggtgaaggtatacaaggctttgaaagaatccggccttaaatccaggcttatcctccaggtccatgacgaacttgttattgagacttttgaagacgaactggagactgtcaaggaacttgtcaaaaagtgcatggaagaggccgttgaattgagtgtgccgcttgttgtcgacgtttcaatcgggaaaaactggtatgaagcctcctgatatggatcc

SEQ ID NO: 197 - DNA, 2772 bp, Artificial Sequence
  Description of Artificial Sequence: Synthetic Clostridium stercorarium DNA Polymerase E819A
atgaaatacctgctgccgaccgctgctgctggtctgctgctcctcgctgcccagccggcgatggccatggatccaaaaataatccttatagacggaaacagtattttaaaccgcggtttttatgccctgtcggggcgatccatgctgactacgtccacaggtctgtataccaatgcggttttcgcttttgtaaatatattgaacaaatatatcgaagaggaaaaccctgattatattgccgttgctttcgatcttagggcaaaaactttccggcacggtctatatgagggatacaaagcgcagcggaaaggcatgcccgatgaacttgcaatgcagatacccctcgcgaaggaagtactgagggcgatgaatattgccataatagagcatgaaggttatgaagccgacgatataatcggcagcctttcgttaaaggccgaaaaagagaattttgacgtaataatccttacgggggacagggattctttccagctgatcagcgacagggtgaaagttatcctgccttcgacgaaagccggaaaaacagagaccaacgtatatgataaacaggccatcattgacaaatacggagttttaccccatcagcttattgacgttaaaggcttaatgggagattcgtcagataatatacccggcgttccgggagtgggtgagaaaacggcgttaagccttatttcagcctacggtacactggaaggtgtttacgagcatattgatgaaataaaacagcctaagctgaaagcatcgctgattgaatataaggatcaggcgtttttaagccgtaagctgggtactattgtaagaaatctggagctgtgtgcttcgctggaggatctgaaaagaaaagaaataaaccgcaaagagcttttgaatgttttcagaaaactcgaatttgaaagtatcatatcaaaaatgaatcttgcttccgctgaggtgacagaattacctcccgcgccggaagagcttaaaataacccatatttcagcggcagaggatcttaagaaatggattgcttacctgcttaaccagaaaaacatttccgtccttcaactgattgaccgggaggattcatacagttcccgtctttcagggctggctttgtgcaccggggatgaggttttttatatcgagaccgggactgcactccccgagaatttgattgcaacagagctgaaagaactgtggcagaatgaaaatattcacaaaatcggacacaatataaaagaatttataacctggctgctgaaacacgatgttgaactgaacggcctttatttcgacactatgattgccgaatacctgatagattccataagaaacggctatcctatagcaagcctttctcacaaatacctgaatcgcagcgttccgtcgctggacgaacttttgggcaagggaaagggagcaaaaaagtactctgaaattccgcccgaaaggctgaaagattacagcgcttataacgtcaaagccatttttgacatatggccgatgcagaaaaaagttcttcaggaaaaccggcaggaggagctttttaatgacatagagcttcctcttataaccgtacttgccagtatggaataccacggtttcaaagttgacgccgcaaaacttcacgaatacggcgaagttcttctgtcacgcataaaagacctggaaaaggtaatttacatgctggccggtgaagaattcaacatcaattcaacgaagcagcttggtaccatattattcgaaaaactgaagcttcccgttgtaaaaagtacaaagaccggatactccaccgacgtcgaggttcttgaagagctttattacaagcatgatataataccatgcataatagaataccgccagcttacaaaactttacaccacctacgccgaaggtcttgaaaaagtgataaatcctgtaaccggtaaaattcattcaagttttaaccagacggttacggctacaggccgcatcagcagtaccgaaccaaatttacagaatatcccagtcagacacgaaatgggaagggaaatacggaaagcttttattccgtcgtcggaaaacgctgtttttgttgatgccgattattcacagatagagcttcgcgtgcttgcccatataacaggcgatgaagccctgataaatgctttcgttaagggggaagatattcatacggccacggcgtcgctggtatttgacgtagctcccgaagatgtgacgccggaactgcgcagaaaggcaaaagccgtaaatttcggcatagtgtacgggatcagtgattacgggctggcacgggatttgggaattacccggaaggaagcaaagcggtatatagacgactattttgccaaataccccaaagtaaaaacctatgtggatgaaattgtgcgggtcggccaggaacaggggtatgtggaaactctgttccacagaagaagataccttcccgctcttgcatctaaaaattttcaccagcgttctttcggaaaaagggttgcaatgaatacgcccatacagggcactgcagccgatattattaaaattgcgatggtgaaggtatacaaggctttgaaagaatccggccttaaatccaggcttatcctccaggtccatgacgaacttgttattgagacttttgaagacgaactggagactgtcaaggaacttgtcaaaaagtgcatggaagaggccgttgaattgagtgtgccgcttgttgtcgacgtttcaatcgggaaaaactggtatgaagcctcctgatatggatcc

SEQ ID NO: 198 - DNA, 2772 bp, Artificial Sequence
  Description of Artificial Sequence: Synthetic Clostridium stercorarium DNA Polymerase E819R
atgaaatacctgctgccgaccgctgctgctggtctgctgctcctcgctgcccagccggcgatggccatggatccaaaaataatccttatagacggaaacagtattttaaaccgcggtttttatgccctgtcggggcgatccatgctgactacgtccacaggtctgtataccaatgcggttttcgcttttgtaaatatattgaacaaatatatcgaagaggaaaaccctgattatattgccgttgctttcgatcttagggcaaaaactttccggcacggtctatatgagggatacaaagcgcagcggaaaggcatgcccgatgaacttgcaatgcagatacccctcgcgaaggaagtactgagggcgatgaatattgccataatagagcatgaaggttatgaagccgacgatataatcggcagcctttcgttaaaggccgaaaaagagaattttgacgtaataatccttacgggggacagggattctttccagctgatcagcgacagggtgaaagttatcctgccttcgacgaaagccggaaaaacagagaccaacgtatatgataaacaggccatcattgacaaatacggagttttaccccatcagcttattgacgttaaaggcttaatgggagattcgtcagataatatacccggcgttccgggagtgggtgagaaaacggcgttaagccttatttcagcctacggtacactggaaggtgtttacgagcatattgatgaaataaaacagcctaagctgaaagcatcgctgattgaatataaggatcaggcgtttttaagccgtaagctgggtactattgtaagaaatctggagctgtgtgcttcgctggaggatctgaaaagaaaagaaataaaccgcaaagagcttttgaatgttttcagaaaactcgaatttgaaagtatcatatcaaaaatgaatcttgcttccgctgaggtgacagaattacctcccgcgccggaagagcttaaaataacccatatttcagcggcagaggatcttaagaaatggattgcttacctgcttaaccagaaaaacatttccgtccttcaactgattgaccgggaggattcatacagttcccgtctttcagggctggctttgtgcaccggggatgaggttttttatatcgagaccgggactgcactccccgagaatttgattgcaacagagctgaaagaactgtggcagaatgaaaatattcacaaaatcggacacaatataaaagaatttataacctggctgctgaaacacgatgttgaactgaacggcctttatttcgacactatgattgccgaatacctgatagattccataagaaacggctatcctatagcaagcctttctcacaaatacctgaatcgcagcgttccgtcgctggacgaacttttgggcaagggaaagggagcaaaaaagtactctgaaattccgcccgaaaggctgaaagattacagcgcttataacgtcaaagccatttttgacatatggccgatgcagaaaaaagttcttcaggaaaaccggcaggaggagctttttaatgacatagagcttcctcttataaccgtacttgccagtatggaataccacggtttcaaagttgacgccgcaaaacttcacgaatacggcgaagttcttctgtcacgcataaaagacctggaaaaggtaatttacatgctggccggtgaagaattcaacatcaattcaacgaagcagcttggtaccatattattcgaaaaactgaagcttcccgttgtaaaaagtacaaagaccggatactccaccgacgtcgaggttcttgaagagctttattacaagcatgatataataccatgcataatagaataccgccagcttacaaaactttacaccacctacgccgaaggtcttgaaaaagtgataaatcctgtaaccggtaaaattcattcaagttttaaccagacggttacggctacaggccgcatcagcagtaccgaaccaaatttacagaatatcccagtcagacacgaaatgggaagggaaatacggaaagcttttattccgtcgtcggaaaacgctgtttttgttgatgccgattattcacagatagagcttcgcgtgcttgcccatataacaggcgatgaagccctgataaatgctttcgttaagggggaagatattcatacggccacggcgtcgctggtatttgacgtagctcccgaagatgtgacgccggaactgcgcagaaaggcaaaagccgtaaatttcggcatagtgtacgggatcagtgattacgggctggcacgggatttgggaattacccggaaggaagcaaagcggtatatagacgactattttgccaaataccccaaagtaaaaacctatgtggatgaaattgtgcgggtcggccaggaacaggggtatgtggaaactctgttccacagaagaagataccttccccgtcttgcatctaaaaattttcaccagcgttctttcggaaaaagggttgcaatgaatacgcccatacagggcactgcagccgatattattaaaattgcgatggtgaaggtatacaaggctttgaaagaatccggccttaaatccaggcttatcctccaggtccatgacgaacttgttattgagacttttgaagacgaactggagactgtcaaggaacttgtcaaaaagtgcatggaagaggccgttgaattgagtgtgccgcttgttgtcgacgtttcaatcgggaaaaactggtatgaagcctcctgatatggatcc

SEQ ID NO: 199 - DNA, 2772 bp, Artificial Sequence
  Description of Artificial Sequence: Synthetic Clostridium stercorarium DNA Polymerase E819N
atgaaatacctgctgccgaccgctgctgctggtctgctgctcctcgctgcccagccggcgatggccatggatccaaaaataatccttatagacggaaacagtattttaaaccgcggtttttatgccctgtcggggcgatccatgctgactacgtccacaggtctgtataccaatgcggttttcgcttttgtaaatatattgaacaaatatatcgaagaggaaaaccctgattatattgccgttgctttcgatcttagggcaaaaactttccggcacggtctatatgagggatacaaagcgcagcggaaaggcatgcccgatgaacttgcaatgcagatacccctcgcgaaggaagtactgagggcgatgaatattgccataatagagcatgaaggttatgaagccgacgatataatcggcagcctttcgttaaaggccgaaaaagagaattttgacgtaataatccttacgggggacagggattctttccagctgatcagcgacagggtgaaagttatcctgccttcgacgaaagccggaaaaacagagaccaacgtatatgataaacaggccatcattgacaaatacggagttttaccccatcagcttattgacgttaaaggcttaatgggagattcgtcagataatatacccggcgttccgggagtgggtgagaaaacggcgttaagccttatttcagcctacggtacactggaaggtgtttacgagcatattgatgaaataaaacagcctaagctgaaagcatcgctgattgaatataaggatcaggcgtttttaagccgtaagctgggtactattgtaagaaatctggagctgtgtgcttcgctggaggatctgaaaagaaaagaaataaaccgcaaagagcttttgaatgttttcagaaaactcgaatttgaaagtatcatatcaaaaatgaatcttgcttccgctgaggtgacagaattacctcccgcgccggaagagcttaaaataacccatatttcagcggcagaggatcttaagaaatggattgcttacctgcttaaccagaaaaacatttccgtccttcaactgattgaccgggaggattcatacagttcccgtctttcagggctggctttgtgcaccggggatgaggttttttatatcgagaccgggactgcactccccgagaatttgattgcaacagagctgaaagaactgtggcagaatgaaaatattcacaaaatcggacacaatataaaagaatttataacctggctgctgaaacacgatgttgaactgaacggcctttatttcgacactatgattgccgaatacctgatagattccataagaaacggctatcctatagcaagcctttctcacaaatacctgaatcgcagcgttccgtcgctggacgaacttttgggcaagggaaagggagcaaaaaagtactctgaaattccgcccgaaaggctgaaagattacagcgcttataacgtcaaagccatttttgacatatggccgatgcagaaaaaagttcttcaggaaaaccggcaggaggagctttttaatgacatagagcttcctcttataaccgtacttgccagtatggaataccacggtttcaaagttgacgccgcaaaacttcacgaatacggcgaagttcttctgtcacgcataaaagacctggaaaaggtaatttacatgctggccggtgaagaattcaacatcaattcaacgaagcagcttggtaccatattattcgaaaaactgaagcttcccgttgtaaaaagtacaaagaccggatactccaccgacgtcgaggttcttgaagagctttattacaagcatgatataataccatgcataatagaataccgccagcttacaaaactttacaccacctacgccgaaggtcttgaaaaagtgataaatcctgtaaccggtaaaattcattcaagttttaaccagacggttacggctacaggccgcatcagcagtaccgaaccaaatttacagaatatcccagtcagacacgaaatgggaagggaaatacggaaagcttttattccgtcgtcggaaaacgctgtttttgttgatgccgattattcacagatagagcttcgcgtgcttgcccatataacaggcgatgaagccctgataaatgctttcgttaagggggaagatattcatacggccacggcgtcgctggtatttgacgtagctcccgaagatgtgacgccggaactgcgcagaaaggcaaaagccgtaaatttcggcatagtgtacgggatcagtgattacgggctggcacgggatttgggaattacccggaaggaagcaaagcggtatatagacgactattttgccaaataccccaaagtaaaaacctatgtggatgaaattgtgcgggtcggccaggaacaggggtatgtggaaactctgttccacagaagaagataccttcccaatcttgcatctaaaaattttcaccagcgttctttcggaaaaagggttgcaatgaatacgcccatacagggcactgcagccgatattattaaaattgcgatggtgaaggtatacaaggctttgaaagaatccggccttaaatccaggcttatcctccaggtccatgacgaacttgttattgagacttttgaagacgaactggagactgtcaaggaacttgtcaaaaagtgcatggaagaggccgttgaattgagtgtgccgcttgttgtcgacgtttcaatcgggaaaaactggtatgaagcctcctgatatggatcc

SEQ ID NO: 200 - DNA, 2772 bp, Artificial Sequence
  Description of Artificial Sequence: Synthetic Clostridium stercorarium DNA Polymerase E819D
atgaaatacctgctgccgaccgctgctgctggtctgctgctcctcgctgcccagccggcgatggccatggatccaaaaataatccttatagacggaaacagtattttaaaccgcggtttttatgccctgtcggggcgatccatgctgactacgtccacaggtctgtataccaatgcggttttcgcttttgtaaatatattgaacaaatatatcgaagaggaaaaccctgattatattgccgttgctttcgatcttagggcaaaaactttccggcacggtctatatgagggatacaaagcgcagcggaaaggcatgcccgatgaacttgcaatgcagatacccctcgcgaaggaagtactgagggcgatgaatattgccataatagagcatgaaggttatgaagccgacgatataatcggcagcctttcgttaaaggccgaaaaagagaattttgacgtaataatccttacgggggacagggattctttccagctgatcagcgacagggtgaaagttatcctgccttcgacgaaagccggaaaaacagagaccaacgtatatgataaacaggccatcattgacaaatacggagttttaccccatcagcttattgacgttaaaggcttaatgggagattcgtcagataatatacccggcgttccgggagtgggtgagaaaacggcgttaagccttatttcagcctacggtacactggaaggtgtttacgagcatattgatgaaataaaacagcctaagctgaaagcatcgctgattgaatataaggatcaggcgtttttaagccgtaagctgggtactattgtaagaaatctggagctgtgtgcttcgctggaggatctgaaaagaaaagaaataaaccgcaaagagcttttgaatgttttcagaaaactcgaatttgaaagtatcatatcaaaaatgaatcttgcttccgctgaggtgacagaattacctcccgcgccggaagagcttaaaataacccatatttcagcggcagaggatcttaagaaatggattgcttacctgcttaaccagaaaaacatttccgtccttcaactgattgaccgggaggattcatacagttcccgtctttcagggctggctttgtgcaccggggatgaggttttttatatcgagaccgggactgcactccccgagaatttgattgcaacagagctgaaagaactgtggcagaatgaaaatattcacaaaatcggacacaatataaaagaatttataacctggctgctgaaacacgatgttgaactgaacggcctttatttcgacactatgattgccgaatacctgatagattccataagaaacggctatcctatagcaagcctttctcacaaatacctgaatcgcagcgttccgtcgctggacgaacttttgggcaagggaaagggagcaaaaaagtactctgaaattccgcccgaaaggctgaaagattacagcgcttataacgtcaaagccatttttgacatatggccgatgcagaaaaaagttcttcaggaaaaccggcaggaggagctttttaatgacatagagcttcctcttataaccgtacttgccagtatggaataccacggtttcaaagttgacgccgcaaaacttcacgaatacggcgaagttcttctgtcacgcataaaagacctggaaaaggtaatttacatgctggccggtgaagaattcaacatcaattcaacgaagcagcttggtaccatattattcgaaaaactgaagcttcccgttgtaaaaagtacaaagaccggatactccaccgacgtcgaggttcttgaagagctttattacaagcatgatataataccatgcataatagaataccgccagcttacaaaactttacaccacctacgccgaaggtcttgaaaaagtgataaatcctgtaaccggtaaaattcattcaagttttaaccagacggttacggctacaggccgcatcagcagtaccgaaccaaatttacagaatatcccagtcagacacgaaatgggaagggaaatacggaaagcttttattccgtcgtcggaaaacgctgtttttgttgatgccgattattcacagatagagcttcgcgtgcttgcccatataacaggcgatgaagccctgataaatgctttcgttaagggggaagatattcatacggccacggcgtcgctggtatttgacgtagctcccgaagatgtgacgccggaactgcgcagaaaggcaaaagccgtaaatttcggcatagtgtacgggatcagtgattacgggctggcacgggatttgggaattacccggaaggaagcaaagcggtatatagacgactattttgccaaataccccaaagtaaaaacctatgtggatgaaattgtgcgggtcggccaggaacaggggtatgtggaaactctgttccacagaagaagataccttcccgatcttgcatctaaaaattttcaccagcgttctttcggaaaaagggttgcaatgaatacgcccatacagggcactgcagccgatattattaaaattgcgatggtgaaggtatacaaggctttgaaagaatccggccttaaatccaggcttatcctccaggtccatgacgaacttgttattgagacttttgaagacgaactggagactgtcaaggaacttgtcaaaaagtgcatggaagaggccgttgaattgagtgtgccgcttgttgtcgacgtttcaatcgggaaaaactggtatgaagcctcctgatatggatcc

SEQ ID NO: 201 - DNA, 2772 bp, Artificial Sequence
  Description of Artificial Sequence: Synthetic Clostridium stercorarium DNA Polymerase E819C
atgaaatacctgctgccgaccgctgctgctggtctgctgctcctcgctgcccagccggcgatggccatggatccaaaaataatccttatagacggaaacagtattttaaaccgcggtttttatgccctgtcggggcgatccatgctgactacgtccacaggtctgtataccaatgcggttttcgcttttgtaaatatattgaacaaatatatcgaagaggaaaaccctgattatattgccgttgctttcgatcttagggcaaaaactttccggcacggtctatatgagggatacaaagcgcagcggaaaggcatgcccgatgaacttgcaatgcagatacccctcgcgaaggaagtactgagggcgatgaatattgccataatagagcatgaaggttatgaagccgacgatataatcggcagcctttcgttaaaggccgaaaaagagaattttgacgtaataatccttacgggggacagggattctttccagctgatcagcgacagggtgaaagttatcctgccttcgacgaaagccggaaaaacagagaccaacgtatatgataaacaggccatcattgacaaatacggagttttaccccatcagcttattgacgttaaaggcttaatgggagattcgtcagataatatacccggcgttccgggagtgggtgagaaaacggcgttaagccttatttcagcctacggtacactggaaggtgtttacgagcatattgatgaaataaaacagcctaagctgaaagcatcgctgattgaatataaggatcaggcgtttttaagccgtaagctgggtactattgtaagaaatctggagctgtgtgcttcgctggaggatctgaaaagaaaagaaataaaccgcaaagagcttttgaatgttttcagaaaactcgaatttgaaagtatcatatcaaaaatgaatcttgcttccgctgaggtgacagaattacctcccgcgccggaagagcttaaaataacccatatttcagcggcagaggatcttaagaaatggattgcttacctgcttaaccagaaaaacatttccgtccttcaactgattgaccgggaggattcatacagttcccgtctttcagggctggctttgtgcaccggggatgaggttttttatatcgagaccgggactgcactccccgagaatttgattgcaacagagctgaaagaactgtggcagaatgaaaatattcacaaaatcggacacaatataaaagaatttataacctggctgctgaaacacgatgttgaactgaacggcctttatttcgacactatgattgccgaatacctgatagattccataagaaacggctatcctatagcaagcctttctcacaaatacctgaatcgcagcgttccgtcgctggacgaacttttgggcaagggaaagggagcaaaaaagtactctgaaattccgcccgaaaggctgaaagattacagcgcttataacgtcaaagccatttttgacatatggccgatgcagaaaaaagttcttcaggaaaaccggcaggaggagctttttaatgacatagagcttcctcttataaccgtacttgccagtatggaataccacggtttcaaagttgacgccgcaaaacttcacgaatacggcgaagttcttctgtcacgcataaaagacctggaaaaggtaatttacatgctggccggtgaagaattcaacatcaattcaacgaagcagcttggtaccatattattcgaaaaactgaagcttcccgttgtaaaaagtacaaagaccggatactccaccgacgtcgaggttcttgaagagctttattacaagcatgatataataccatgcataatagaataccgccagcttacaaaactttacaccacctacgccgaaggtcttgaaaaagtgataaatcctgtaaccggtaaaattcattcaagttttaaccagacggttacggctacaggccgcatcagcagtaccgaaccaaatttacagaatatcccagtcagacacgaaatgggaagggaaatacggaaagcttttattccgtcgtcggaaaacgctgtttttgttgatgccgattattcacagatagagcttcgcgtgcttgcccatataacaggcgatgaagccctgataaatgctttcgttaagggggaagatattcatacggccacggcgtcgctggtatttgacgtagctcccgaagatgtgacgccggaactgcgcagaaaggcaaaagccgtaaatttcggcatagtgtacgggatcagtgattacgggctggcacgggatttgggaattacccggaaggaagcaaagcggtatatagacgactattttgccaaataccccaaagtaaaaacctatgtggatgaaattgtgcgggtcggccaggaacaggggtatgtggaaactctgttccacagaagaagataccttccctgtcttgcatctaaaaattttcaccagcgttctttcggaaaaagggttgcaatgaatacgcccatacagggcactgcagccgatattattaaaattgcgatggtgaaggtatacaaggctttgaaagaatccggccttaaatccaggcttatcctccaggtccatgacgaacttgttattgagacttttgaagacgaactggagactgtcaaggaacttgtcaaaaagtgcatggaagaggccgttgaattgagtgtgccgcttgttgtcgacgtttcaatcgggaaaaactggtatgaagcctcctgatatggatcc

SEQ ID NO: 202 - DNA, 2772 bp, Artificial Sequence
  Description of Artificial Sequence: Synthetic Clostridium stercorarium DNA Polymerase E819Q
atgaaatacctgctgccgaccgctgctgctggtctgctgctcctcgctgcccagccggcgatggccatggatccaaaaataatccttatagacggaaacagtattttaaaccgcggtttttatgccctgtcggggcgatccatgctgactacgtccacaggtctgtataccaatgcggttttcgcttttgtaaatatattgaacaaatatatcgaagaggaaaaccctgattatattgccgttgctttcgatcttagggcaaaaactttccggcacggtctatatgagggatacaaagcgcagcggaaaggcatgcccgatgaacttgcaatgcagatacccctcgcgaaggaagtactgagggcgatgaatattgccataatagagcatgaaggttatgaagccgacgatataatcggcagcctttcgttaaaggccgaaaaagagaattttgacgtaataatccttacgggggacagggattctttccagctgatcagcgacagggtgaaagttatcctgccttcgacgaaagccggaaaaacagagaccaacgtatatgataaacaggccatcattgacaaatacggagttttaccccatcagcttattgacgttaaaggcttaatgggagattcgtcagataatatacccggcgttccgggagtgggtgagaaaacggcgttaagccttatttcagcctacggtacactggaaggtgtttacgagcatattgatgaaataaaacagcctaagctgaaagcatcgctgattgaatataaggatcaggcgtttttaagccgtaagctgggtactattgtaagaaatctggagctgtgtgcttcgctggaggatctgaaaagaaaagaaataaaccgcaaagagcttttgaatgttttcagaaaactcgaatttgaaagtatcatatcaaaaatgaatcttgcttccgctgaggtgacagaattacctcccgcgccggaagagcttaaaataacccatatttcagcggcagaggatcttaagaaatggattgcttacctgcttaaccagaaaaacatttccgtccttcaactgattgaccgggaggattcatacagttcccgtctttcagggctggctttgtgcaccggggatgaggttttttatatcgagaccgggactgcactccccgagaatttgattgcaacagagctgaaagaactgtggcagaatgaaaatattcacaaaatcggacacaatataaaagaatttataacctggctgctgaaacacgatgttgaactgaacggcctttatttcgacactatgattgccgaatacctgatagattccataagaaacggctatcctatagcaagcctttctcacaaatacctgaatcgcagcgttccgtcgctggacgaacttttgggcaagggaaagggagcaaaaaagtactctgaaattccgcccgaaaggctgaaagattacagcgcttataacgtcaaagccatttttgacatatggccgatgcagaaaaaagttcttcaggaaaaccggcaggaggagctttttaatgacatagagcttcctcttataaccgtacttgccagtatggaataccacggtttcaaagttgacgccgcaaaacttcacgaatacggcgaagttcttctgtcacgcataaaagacctggaaaaggtaatttacatgctggccggtgaagaattcaacatcaattcaacgaagcagcttggtaccatattattcgaaaaactgaagcttcccgttgtaaaaagtacaaagaccggatactccaccgacgtcgaggttcttgaagagctttattacaagcatgatataataccatgcataatagaataccgccagcttacaaaactttacaccacctacgccgaaggtcttgaaaaagtgataaatcctgtaaccggtaaaattcattcaagttttaaccagacggttacggctacaggccgcatcagcagtaccgaaccaaatttacagaatatcccagtcagacacgaaatgggaagggaaatacggaaagcttttattccgtcgtcggaaaacgctgtttttgttgatgccgattattcacagatagagcttcgcgtgcttgcccatataacaggcgatgaagccctgataaatgctttcgttaagggggaagatattcatacggccacggcgtcgctggtatttgacgtagctcccgaagatgtgacgccggaactgcgcagaaaggcaaaagccgtaaatttcggcatagtgtacgggatcagtgattacgggctggcacgggatttgggaattacccggaaggaagcaaagcggtatatagacgactattttgccaaataccccaaagtaaaaacctatgtggatgaaattgtgcgggtcggccaggaacaggggtatgtggaaactctgttccacagaagaagataccttccccaacttgcatctaaaaattttcaccagcgttctttcggaaaaagggttgcaatgaatacgcccatacagggcactgcagccgatattattaaaattgcgatggtgaaggtatacaaggctttgaaagaatccggccttaaatccaggcttatcctccaggtccatgacgaacttgttattgagacttttgaagacgaactggagactgtcaaggaacttgtcaaaaagtgcatggaagaggccgttgaattgagtgtgccgcttgttgtcgacgtttcaatcgggaaaaactggtatgaagcctcctgatatggatcc

SEQ ID NO: 203 - DNA, 2772 bp, Artificial Sequence
  Description of Artificial Sequence: Synthetic Clostridium stercorarium DNA Polymerase E819G
atgaaatacctgctgccgaccgctgctgctggtctgctgctcctcgctgcccagccggcgatggccatggatccaaaaataatccttatagacggaaacagtattttaaaccgcggtttttatgccctgtcggggcgatccatgctgactacgtccacaggtctgtataccaatgcggttttcgcttttgtaaatatattgaacaaatatatcgaagaggaaaaccctgattatattgccgttgctttcgatcttagggcaaaaactttccggcacggtctatatgagggatacaaagcgcagcggaaaggcatgcccgatgaacttgcaatgcagatacccctcgcgaaggaagtactgagggcgatgaatattgccataatagagcatgaaggttatgaagccgacgatataatcggcagcctttcgttaaaggccgaaaaagagaattttgacgtaataatccttacgggggacagggattctttccagctgatcagcgacagggtgaaagttatcctgccttcgacgaaagccggaaaaacagagaccaacgtatatgataaacaggccatcattgacaaatacggagttttaccccatcagcttattgacgttaaaggcttaatgggagattcgtcagataatatacccggcgttccgggagtgggtgagaaaacggcgttaagccttatttcagcctacggtacactggaaggtgtttacgagcatattgatgaaataaaacagcctaagctgaaagcatcgctgattgaatataaggatcaggcgtttttaagccgtaagctgggtactattgtaagaaatctggagctgtgtgcttcgctggaggatctgaaaagaaaagaaataaaccgcaaagagcttttgaatgttttcagaaaactcgaatttgaaagtatcatatcaaaaatgaatcttgcttccgctgaggtgacagaattacctcccgcgccggaagagcttaaaataacccatatttcagcggcagaggatcttaagaaatggattgcttacctgcttaaccagaaaaacatttccgtccttcaactgattgaccgggaggattcatacagttcccgtctttcagggctggctttgtgcaccggggatgaggttttttatatcgagaccgggactgcactccccgagaatttgattgcaacagagctgaaagaactgtggcagaatgaaaatattcacaaaatcggacacaatataaaagaatttataacctggctgctgaaacacgatgttgaactgaacggcctttatttcgacactatgattgccgaatacctgatagattccataagaaacggctatcctatagcaagcctttctcacaaatacctgaatcgcagcgttccgtcgctggacgaacttttgggcaagggaaagggagcaaaaaagtactctgaaattccgcccgaaaggctgaaagattacagcgcttataacgtcaaagccatttttgacatatggccgatgcagaaaaaagttcttcaggaaaaccggcaggaggagctttttaatgacatagagcttcctcttataaccgtacttgccagtatggaataccacggtttcaaagttgacgccgcaaaacttcacgaatacggcgaagttcttctgtcacgcataaaagacctggaaaaggtaatttacatgctggccggtgaagaattcaacatcaattcaacgaagcagcttggtaccatattattcgaaaaactgaagcttcccgttgtaaaaagtacaaagaccggatactccaccgacgtcgaggttcttgaagagctttattacaagcatgatataataccatgcataatagaataccgccagcttacaaaactttacaccacctacgccgaaggtcttgaaaaagtgataaatcctgtaaccggtaaaattcattcaagttttaaccagacggttacggctacaggccgcatcagcagtaccgaaccaaatttacagaatatcccagtcagacacgaaatgggaagggaaatacggaaagcttttattccgtcgtcggaaaacgctgtttttgttgatgccgattattcacagatagagcttcgcgtgcttgcccatataacaggcgatgaagccctgataaatgctttcgttaagggggaagatattcatacggccacggcgtcgctggtatttgacgtagctcccgaagatgtgacgccggaactgcgcagaaaggcaaaagccgtaaatttcggcatagtgtacgggatcagtgattacgggctggcacgggatttgggaattacccggaaggaagcaaagcggtatatagacgactattttgccaaataccccaaagtaaaaacctatgtggatgaaattgtgcgggtcggccaggaacaggggtatgtggaaactctgttccacagaagaagataccttcccggtcttgcatctaaaaattttcaccagcgttctttcggaaaaagggttgcaatgaatacgcccatacagggcactgcagccgatattattaaaattgcgatggtgaaggtatacaaggctttgaaagaatccggccttaaatccaggcttatcctccaggtccatgacgaacttgttattgagacttttgaagacgaactggagactgtcaaggaacttgtcaaaaagtgcatggaagaggccgttgaattgagtgtgccgcttgttgtcgacgtttcaatcgggaaaaactggtatgaagcctcctgatatggatcc

SEQ ID NO: 204 - DNA, 2772 bp, Artificial Sequence
  Description of Artificial Sequence: Synthetic Clostridium stercorarium DNA Polymerase E819H
atgaaatacctgctgccgaccgctgctgctggtctgctgctcctcgctgcccagccggcgatggccatggatccaaaaataatccttatagacggaaacagtattttaaaccgcggtttttatgccctgtcggggcgatccatgctgactacgtccacaggtctgtataccaatgcggttttcgcttttgtaaatatattgaacaaatatatcgaagaggaaaaccctgattatattgccgttgctttcgatcttagggcaaaaactttccggcacggtctatatgagggatacaaagcgcagcggaaaggcatgcccgatgaacttgcaatgcagatacccctcgcgaaggaagtactgagggcgatgaatattgccataatagagcatgaaggttatgaagccgacgatataatcggcagcctttcgttaaaggccgaaaaagagaattttgacgtaataatccttacgggggacagggattctttccagctgatcagcgacagggtgaaagttatcctgccttcgacgaaagccggaaaaacagagaccaacgtatatgataaacaggccatcattgacaaatacggagttttaccccatcagcttattgacgttaaaggcttaatgggagattcgtcagataatatacccggcgttccgggagtgggtgagaaaacggcgttaagccttatttcagcctacggtacactggaaggtgtttacgagcatattgatgaaataaaacagcctaagctgaaagcatcgctgattgaatataaggatcaggcgtttttaagccgtaagctgggtactattgtaagaaatctggagctgtgtgcttcgctggaggatctgaaaagaaaagaaataaaccgcaaagagcttttgaatgttttcagaaaactcgaatttgaaagtatcatatcaaaaatgaatcttgcttccgctgaggtgacagaattacctcccgcgccggaagagcttaaaataacccatatttcagcggcagaggatcttaagaaatggattgcttacctgcttaaccagaaaaacatttccgtccttcaactgattgaccgggaggattcatacagttcccgtctttcagggctggctttgtgcaccggggatgaggttttttatatcgagaccgggactgcactccccgagaatttgattgcaacagagctgaaagaactgtggcagaatgaaaatattcacaaaatcggacacaatataaaagaatttataacctggctgctgaaacacgatgttgaactgaacggcctttatttcgacactatgattgccgaatacctgatagattccataagaaacggctatcctatagcaagcctttctcacaaatacctgaatcgcagcgttccgtcgctggacgaacttttgggcaagggaaagggagcaaaaaagtactctgaaattccgcccgaaaggctgaaagattacagcgcttataacgtcaaagccatttttgacatatggccgatgcagaaaaaagttcttcaggaaaaccggcaggaggagctttttaatgacatagagcttcctcttataaccgtacttgccagtatggaataccacggtttcaaagttgacgccgcaaaacttcacgaatacggcgaagttcttctgtcacgcataaaagacctggaaaaggtaatttacatgctggccggtgaagaattcaacatcaattcaacgaagcagcttggtaccatattattcgaaaaactgaagcttcccgttgtaaaaagtacaaagaccggatactccaccgacgtcgaggttcttgaagagctttattacaagcatgatataataccatgcataatagaataccgccagcttacaaaactttacaccacctacgccgaaggtcttgaaaaagtgataaatcctgtaaccggtaaaattcattcaagttttaaccagacggttacggctacaggccgcatcagcagtaccgaaccaaatttacagaatatcccagtcagacacgaaatgggaagggaaatacggaaagcttttattccgtcgtcggaaaacgctgtttttgttgatgccgattattcacagatagagcttcgcgtgcttgcccatataacaggcgatgaagccctgataaatgctttcgttaagggggaagatattcatacggccacggcgtcgctggtatttgacgtagctcccgaagatgtgacgccggaactgcgcagaaaggcaaaagccgtaaatttcggcatagtgtacgggatcagtgattacgggctggcacgggatttgggaattacccggaaggaagcaaagcggtatatagacgactattttgccaaataccccaaagtaaaaacctatgtggatgaaattgtgcgggtcggccaggaacaggggtatgtggaaactctgttccacagaagaagataccttccccatcttgcatctaaaaattttcaccagcgttctttcggaaaaagggttgcaatgaatacgcccatacagggcactgcagccgatattattaaaattgcgatggtgaaggtatacaaggctttgaaagaatccggccttaaatccaggcttatcctccaggtccatgacgaacttgttattgagacttttgaagacgaactggagactgtcaaggaacttgtcaaaaagtgcatggaagaggccgttgaattgagtgtgccgcttgttgtcgacgtttcaatcgggaaaaactggtatgaagcctcctgatatggatcc

SEQ ID NO: 205 - DNA, 2772 bp, Artificial Sequence
  Description of Artificial Sequence: Synthetic Clostridium stercorarium DNA Polymerase E819I
atgaaatacctgctgccgaccgctgctgctggtctgctgctcctcgctgcccagccggcgatggccatggatccaaaaataatccttatagacggaaacagtattttaaaccgcggtttttatgccctgtcggggcgatccatgctgactacgtccacaggtctgtataccaatgcggttttcgcttttgtaaatatattgaacaaatatatcgaagaggaaaaccctgattatattgccgttgctttcgatcttagggcaaaaactttccggcacggtctatatgagggatacaaagcgcagcggaaaggcatgcccgatgaacttgcaatgcagatacccctcgcgaaggaagtactgagggcgatgaatattgccataatagagcatgaaggttatgaagccgacgatataatcggcagcctttcgttaaaggccgaaaaagagaattttgacgtaataatccttacgggggacagggattctttccagctgatcagcgacagggtgaaagttatcctgccttcgacgaaagccggaaaaacagagaccaacgtatatgataaacaggccatcattgacaaatacggagttttaccccatcagcttattgacgttaaaggcttaatgggagattcgtcagataatatacccggcgttccgggagtgggtgagaaaacggcgttaagccttatttcagcctacggtacactggaaggtgtttacgagcatattgatgaaataaaacagcctaagctgaaagcatcgctgattgaatataaggatcaggcgtttttaagccgtaagctgggtactattgtaagaaatctggagctgtgtgcttcgctggaggatctgaaaagaaaagaaataaaccgcaaagagcttttgaatgttttcagaaaactcgaatttgaaagtatcatatcaaaaatgaatcttgcttccgctgaggtgacagaattacctcccgcgccggaagagcttaaaataacccatatttcagcggcagaggatcttaagaaatggattgcttacctgcttaaccagaaaaacatttccgtccttcaactgattgaccgggaggattcatacagttcccgtctttcagggctggctttgtgcaccggggatgaggttttttatatcgagaccgggactgcactccccgagaatttgattgcaacagagctgaaagaactgtggcagaatgaaaatattcacaaaatcggacacaatataaaagaatttataacctggctgctgaaacacgatgttgaactgaacggcctttatttcgacactatgattgccgaatacctgatagattccataagaaacggctatcctatagcaagcctttctcacaaatacctgaatcgcagcgttccgtcgctggacgaacttttgggcaagggaaagggagcaaaaaagtactctgaaattccgcccgaaaggctgaaagattacagcgcttataacgtcaaagccatttttgacatatggccgatgcagaaaaaagttcttcaggaaaaccggcaggaggagctttttaatgacatagagcttcctcttataaccgtacttgccagtatggaataccacggtttcaaagttgacgccgcaaaacttcacgaatacggcgaagttcttctgtcacgcataaaagacctggaaaaggtaatttacatgctggccggtgaagaattcaacatcaattcaacgaagcagcttggtaccatattattcgaaaaactgaagcttcccgttgtaaaaagtacaaagaccggatactccaccgacgtcgaggttcttgaagagctttattacaagcatgatataataccatgcataatagaataccgccagcttacaaaactttacaccacctacgccgaaggtcttgaaaaagtgataaatcctgtaaccggtaaaattcattcaagttttaaccagacggttacggctacaggccgcatcagcagtaccgaaccaaatttacagaatatcccagtcagacacgaaatgggaagggaaatacggaaagcttttattccgtcgtcggaaaacgctgtttttgttgatgccgattattcacagatagagcttcgcgtgcttgcccatataacaggcgatgaagccctgataaatgctttcgttaagggggaagatattcatacggccacggcgtcgctggtatttgacgtagctcccgaagatgtgacgccggaactgcgcagaaaggcaaaagccgtaaatttcggcatagtgtacgggatcagtgattacgggctggcacgggatttgggaattacccggaaggaagcaaagcggtatatagacgactattttgccaaataccccaaagtaaaaacctatgtggatgaaattgtgcgggtcggccaggaacaggggtatgtggaaactctgttccacagaagaagataccttcccattcttgcatctaaaaattttcaccagcgttctttcggaaaaagggttgcaatgaatacgcccatacagggcactgcagccgatattattaaaattgcgatggtgaaggtatacaaggctttgaaagaatccggccttaaatccaggcttatcctccaggtccatgacgaacttgttattgagacttttgaagacgaactggagactgtcaaggaacttgtcaaaaagtgcatggaagaggccgttgaattgagtgtgccgcttgttgtcgacgtttcaatcgggaaaaactggtatgaagcctcctgatatggatcc

SEQ ID NO: 206 - DNA, 2772 bp, Artificial Sequence
  Description of Artificial Sequence: Synthetic Clostridium stercorarium DNA Polymerase E819L
atgaaatacctgctgccgaccgctgctgctggtctgctgctcctcgctgcccagccggcgatggccatggatccaaaaataatccttatagacggaaacagtattttaaaccgcggtttttatgccctgtcggggcgatccatgctgactacgtccacaggtctgtataccaatgcggttttcgcttttgtaaatatattgaacaaatatatcgaagaggaaaaccctgattatattgccgttgctttcgatcttagggcaaaaactttccggcacggtctatatgagggatacaaagcgcagcggaaaggcatgcccgatgaacttgcaatgcagatacccctcgcgaaggaagtactgagggcgatgaatattgccataatagagcatgaaggttatgaagccgacgatataatcggcagcctttcgttaaaggccgaaaaagagaattttgacgtaataatccttacgggggacagggattctttccagctgatcagcgacagggtgaaagttatcctgccttcgacgaaagccggaaaaacagagaccaacgtatatgataaacaggccatcattgacaaatacggagttttaccccatcagcttattgacgttaaaggcttaatgggagattcgtcagataatatacccggcgttccgggagtgggtgagaaaacggcgttaagccttatttcagcctacggtacactggaaggtgtttacgagcatattgatgaaataaaacagcctaagctgaaagcatcgctgattgaatataaggatcaggcgtttttaagccgtaagctgggtactattgtaagaaatctggagctgtgtgcttcgctggaggatctgaaaagaaaagaaataaaccgcaaagagcttttgaatgttttcagaaaactcgaatttgaaagtatcatatcaaaaatgaatcttgcttccgctgaggtgacagaattacctcccgcgccggaagagcttaaaataacccatatttcagcggcagaggatcttaagaaatggattgcttacctgcttaaccagaaaaacatttccgtccttcaactgattgaccgggaggattcatacagttcccgtctttcagggctggctttgtgcaccggggatgaggttttttatatcgagaccgggactgcactccccgagaatttgattgcaacagagctgaaagaactgtggcagaatgaaaatattcacaaaatcggacacaatataaaagaatttataacctggctgctgaaacacgatgttgaactgaacggcctttatttcgacactatgattgccgaatacctgatagattccataagaaacggctatcctatagcaagcctttctcacaaatacctgaatcgcagcgttccgtcgctggacgaacttttgggcaagggaaagggagcaaaaaagtactctgaaattccgcccgaaaggctgaaagattacagcgcttataacgtcaaagccatttttgacatatggccgatgcagaaaaaagttcttcaggaaaaccggcaggaggagctttttaatgacatagagcttcctcttataaccgtacttgccagtatggaataccacggtttcaaagttgacgccgcaaaacttcacgaatacggcgaagttcttctgtcacgcataaaagacctggaaaaggtaatttacatgctggccggtgaagaattcaacatcaattcaacgaagcagcttggtaccatattattcgaaaaactgaagcttcccgttgtaaaaagtacaaagaccggatactccaccgacgtcgaggttcttgaagagctttattacaagcatgatataataccatgcataatagaataccgccagcttacaaaactttacaccacctacgccgaaggtcttgaaaaagtgataaatcctgtaaccggtaaaattcattcaagttttaaccagacggttacggctacaggccgcatcagcagtaccgaaccaaatttacagaatatcccagtcagacacgaaatgggaagggaaatacggaaagcttttattccgtcgtcggaaaacgctgtttttgttgatgccgattattcacagatagagcttcgcgtgcttgcccatataacaggcgatgaagccctgataaatgctttcgttaagggggaagatattcatacggccacggcgtcgctggtatttgacgtagctcccgaagatgtgacgccggaactgcgcagaaaggcaaaagccgtaaatttcggcatagtgtacgggatcagtgattacgggctggcacgggatttgggaattacccggaaggaagcaaagcggtatatagacgactattttgccaaataccccaaagtaaaaacctatgtggatgaaattgtgcgggtcggccaggaacaggggtatgtggaaactctgttccacagaagaagataccttccccttcttgcatctaaaaattttcaccagcgttctttcggaaaaagggttgcaatgaatacgcccatacagggcactgcagccgatattattaaaattgcgatggtgaaggtatacaaggctttgaaagaatccggccttaaatccaggcttatcctccaggtccatgacgaacttgttattgagacttttgaagacgaactggagactgtcaaggaacttgtcaaaaagtgcatggaagaggccgttgaattgagtgtgccgcttgttgtcgacgtttcaatcgggaaaaactggtatgaagcctcctgatatggatcc

SEQ ID NO: 207 - DNA, 2772 bp, Artificial Sequence
  Description of Artificial Sequence: Synthetic Clostridium stercorarium DNA Polymerase E819K
atgaaatacctgctgccgaccgctgctgctggtctgctgctcctcgctgcccagccggcgatggccatggatccaaaaataatccttatagacggaaacagtattttaaaccgcggtttttatgccctgtcggggcgatccatgctgactacgtccacaggtctgtataccaatgcggttttcgcttttgtaaatatattgaacaaatatatcgaagaggaaaaccctgattatattgccgttgctttcgatcttagggcaaaaactttccggcacggtctatatgagggatacaaagcgcagcggaaaggcatgcccgatgaacttgcaatgcagatacccctcgcgaaggaagtactgagggcgatgaatattgccataatagagcatgaaggttatgaagccgacgatataatcggcagcctttcgttaaaggccgaaaaagagaattttgacgtaataatccttacgggggacagggattctttccagctgatcagcgacagggtgaaagttatcctgccttcgacgaaagccggaaaaacagagaccaacgtatatgataaacaggccatcattgacaaatacggagttttaccccatcagcttattgacgttaaaggcttaatgggagattcgtcagataatatacccggcgttccgggagtgggtgagaaaacggcgttaagccttatttcagcctacggtacactggaaggtgtttacgagcatattgatgaaataaaacagcctaagctgaaagcatcgctgattgaatataaggatcaggcgtttttaagccgtaagctgggtactattgtaagaaatctggagctgtgtgcttcgctggaggatctgaaaagaaaagaaataaaccgcaaagagcttttgaatgttttcagaaaactcgaatttgaaagtatcatatcaaaaatgaatcttgcttccgctgaggtgacagaattacctcccgcgccggaagagcttaaaataacccatatttcagcggcagaggatcttaagaaatggattgcttacctgcttaaccagaaaaacatttccgtccttcaactgattgaccgggaggattcatacagttcccgtctttcagggctggctttgtgcaccggggatgaggttttttatatcgagaccgggactgcactccccgagaatttgattgcaacagagctgaaagaactgtggcagaatgaaaatattcacaaaatcggacacaatataaaagaatttataacctggctgctgaaacacgatgttgaactgaacggcctttatttcgacactatgattgccgaatacctgatagattccataagaaacggctatcctatagcaagcctttctcacaaatacctgaatcgcagcgttccgtcgctggacgaacttttgggcaagggaaagggagcaaaaaagtactctgaaattccgcccgaaaggctgaaagattacagcgcttataacgtcaaagccatttttgacatatggccgatgcagaaaaaagttcttcaggaaaaccggcaggaggagctttttaatgacatagagcttcctcttataaccgtacttgccagtatggaataccacggtttcaaagttgacgccgcaaaacttcacgaatacggcgaagttcttctgtcacgcataaaagacctggaaaaggtaatttacatgctggccggtgaagaattcaacatcaattcaacgaagcagcttggtaccatattattcgaaaaactgaagcttcccgttgtaaaaagtacaaagaccggatactccaccgacgtcgaggttcttgaagagctttattacaagcatgatataataccatgcataatagaataccgccagcttacaaaactttacaccacctacgccgaaggtcttgaaaaagtgataaatcctgtaaccggtaaaattcattcaagttttaaccagacggttacggctacaggccgcatcagcagtaccgaaccaaatttacagaatatcccagtcagacacgaaatgggaagggaaatacggaaagcttttattccgtcgtcggaaaacgctgtttttgttgatgccgattattcacagatagagcttcgcgtgcttgcccatataacaggcgatgaagccctgataaatgctttcgttaagggggaagatattcatacggccacggcgtcgctggtatttgacgtagctcccgaagatgtgacgccggaactgcgcagaaaggcaaaagccgtaaatttcggcatagtgtacgggatcagtgattacgggctggcacgggatttgggaattacccggaaggaagcaaagcggtatatagacgactattttgccaaataccccaaagtaaaaacctatgtggatgaaattgtgcgggtcggccaggaacaggggtatgtggaaactctgttccacagaagaagataccttcccaaacttgcatctaaaaattttcaccagcgttctttcggaaaaagggttgcaatgaatacgcccatacagggcactgcagccgatattattaaaattgcgatggtgaaggtatacaaggctttgaaagaatccggccttaaatccaggcttatcctccaggtccatgacgaacttgttattgagacttttgaagacgaactggagactgtcaaggaacttgtcaaaaagtgcatggaagaggccgttgaattgagtgtgccgcttgttgtcgacgtttcaatcgggaaaaactggtatgaagcctcctgatatggatcc

SEQ ID NO: 208 - DNA, 2772 bp, Artificial Sequence
  Description of Artificial Sequence: Synthetic Clostridium stercorarium DNA Polymerase E819M
atgaaatacctgctgccgaccgctgctgctggtctgctgctcctcgctgcccagccggcgatggccatggatccaaaaataatccttatagacggaaacagtattttaaaccgcggtttttatgccctgtcggggcgatccatgctgactacgtccacaggtctgtataccaatgcggttttcgcttttgtaaatatattgaacaaatatatcgaagaggaaaaccctgattatattgccgttgctttcgatcttagggcaaaaactttccggcacggtctatatgagggatacaaagcgcagcggaaaggcatgcccgatgaacttgcaatgcagatacccctcgcgaaggaagtactgagggcgatgaatattgccataatagagcatgaaggttatgaagccgacgatataatcggcagcctttcgttaaaggccgaaaaagagaattttgacgtaataatccttacgggggacagggattctttccagctgatcagcgacagggtgaaagttatcctgccttcgacgaaagccggaaaaacagagaccaacgtatatgataaacaggccatcattgacaaatacggagttttaccccatcagcttattgacgttaaaggcttaatgggagattcgtcagataatatacccggcgttccgggagtgggtgagaaaacggcgttaagccttatttcagcctacggtacactggaaggtgtttacgagcatattgatgaaataaaacagcctaagctgaaagcatcgctgattgaatataaggatcaggcgtttttaagccgtaagctgggtactattgtaagaaatctggagctgtgtgcttcgctggaggatctgaaaagaaaagaaataaaccgcaaagagcttttgaatgttttcagaaaactcgaatttgaaagtatcatatcaaaaatgaatcttgcttccgctgaggtgacagaattacctcccgcgccggaagagcttaaaataacccatatttcagcggcagaggatcttaagaaatggattgcttacctgcttaaccagaaaaacatttccgtccttcaactgattgaccgggaggattcatacagttcccgtctttcagggctggctttgtgcaccggggatgaggttttttatatcgagaccgggactgcactccccgagaatttgattgcaacagagctgaaagaactgtggcagaatgaaaatattcacaaaatcggacacaatataaaagaatttataacctggctgctgaaacacgatgttgaactgaacggcctttatttcgacactatgattgccgaatacctgatagattccataagaaacggctatcctatagcaagcctttctcacaaatacctgaatcgcagcgttccgtcgctggacgaacttttgggcaagggaaagggagcaaaaaagtactctgaaattccgcccgaaaggctgaaagattacagcgcttataacgtcaaagccatttttgacatatggccgatgcagaaaaaagttcttcaggaaaaccggcaggaggagctttttaatgacatagagcttcctcttataaccgtacttgccagtatggaataccacggtttcaaagttgacgccgcaaaacttcacgaatacggcgaagttcttctgtcacgcataaaagacctggaaaaggtaatttacatgctggccggtgaagaattcaacatcaattcaacgaagcagcttggtaccatattattcgaaaaactgaagcttcccgttgtaaaaagtacaaagaccggatactccaccgacgtcgaggttcttgaagagctttattacaagcatgatataataccatgcataatagaataccgccagcttacaaaactttacaccacctacgccgaaggtcttgaaaaagtgataaatcctgtaaccggtaaaattcattcaagttttaaccagacggttacggctacaggccgcatcagcagtaccgaaccaaatttacagaatatcccagtcagacacgaaatgggaagggaaatacggaaagcttttattccgtcgtcggaaaacgctgtttttgttgatgccgattattcacagatagagcttcgcgtgcttgcccatataacaggcgatgaagccctgataaatgctttcgttaagggggaagatattcatacggccacggcgtcgctggtatttgacgtagctcccgaagatgtgacgccggaactgcgcagaaaggcaaaagccgtaaatttcggcatagtgtacgggatcagtgattacgggctggcacgggatttgggaattacccggaaggaagcaaagcggtatatagacgactattttgccaaataccccaaagtaaaaacctatgtggatgaaattgtgcgggtcggccaggaacaggggtatgtggaaactctgttccacagaagaagataccttcccatgcttgcatctaaaaattttcaccagcgttctttcggaaaaagggttgcaatgaatacgcccatacagggcactgcagccgatattattaaaattgcgatggtgaaggtatacaaggctttgaaagaatccggccttaaatccaggcttatcctccaggtccatgacgaacttgttattgagacttttgaagacgaactggagactgtcaaggaacttgtcaaaaagtgcatggaagaggccgttgaattgagtgtgccgcttgttgtcgacgtttcaatcgggaaaaactggtatgaagcctcctgatatggatcc

SEQ ID NO: 209 - DNA, 2772 bp, Artificial Sequence
  Description of Artificial Sequence: Synthetic Clostridium stercorarium DNA Polymerase E819F
atgaaatacctgctgccgaccgctgctgctggtctgctgctcctcgctgcccagccggcgatggccatggatccaaaaataatccttatagacggaaacagtattttaaaccgcggtttttatgccctgtcggggcgatccatgctgactacgtccacaggtctgtataccaatgcggttttcgcttttgtaaatatattgaacaaatatatcgaagaggaaaaccctgattatattgccgttgctttcgatcttagggcaaaaactttccggcacggtctatatgagggatacaaagcgcagcggaaaggcatgcccgatgaacttgcaatgcagatacccctcgcgaaggaagtactgagggcgatgaatattgccataatagagcatgaaggttatgaagccgacgatataatcggcagcctttcgttaaaggccgaaaaagagaattttgacgtaataatccttacgggggacagggattctttccagctgatcagcgacagggtgaaagttatcctgccttcgacgaaagccggaaaaacagagaccaacgtatatgataaacaggccatcattgacaaatacggagttttaccccatcagcttattgacgttaaaggcttaatgggagattcgtcagataatatacccggcgttccgggagtgggtgagaaaacggcgttaagccttatttcagcctacggtacactggaaggtgtttacgagcatattgatgaaataaaacagcctaagctgaaagcatcgctgattgaatataaggatcaggcgtttttaagccgtaagctgggtactattgtaagaaatctggagctgtgtgcttcgctggaggatctgaaaagaaaagaaataaaccgcaaagagcttttgaatgttttcagaaaactcgaatttgaaagtatcatatcaaaaatgaatcttgcttccgctgaggtgacagaattacctcccgcgccggaagagcttaaaataacccatatttcagcggcagaggatcttaagaaatggattgcttacctgcttaaccagaaaaacatttccgtccttcaactgattgaccgggaggattcatacagttcccgtctttcagggctggctttgtgcaccggggatgaggttttttatatcgagaccgggactgcactccccgagaatttgattgcaacagagctgaaagaactgtggcagaatgaaaatattcacaaaatcggacacaatataaaagaatttataacctggctgctgaaacacgatgttgaactgaacggcctttatttcgacactatgattgccgaatacctgatagattccataagaaacggctatcctatagcaagcctttctcacaaatacctgaatcgcagcgttccgtcgctggacgaacttttgggcaagggaaagggagcaaaaaagtactctgaaattccgcccgaaaggctgaaagattacagcgcttataacgtcaaagccatttttgacatatggccgatgcagaaaaaagttcttcaggaaaaccggcaggaggagctttttaatgacatagagcttcctcttataaccgtacttgccagtatggaataccacggtttcaaagttgacgccgcaaaacttcacgaatacggcgaagttcttctgtcacgcataaaagacctggaaaaggtaatttacatgctggccggtgaagaattcaacatcaattcaacgaagcagcttggtaccatattattcgaaaaactgaagcttcccgttgtaaaaagtacaaagaccggatactccaccgacgtcgaggttcttgaagagctttattacaagcatgatataataccatgcataatagaataccgccagcttacaaaactttacaccacctacgccgaaggtcttgaaaaagtgataaatcctgtaaccggtaaaattcattcaagttttaaccagacggttacggctacaggccgcatcagcagtaccgaaccaaatttacagaatatcccagtcagacacgaaatgggaagggaaatacggaaagcttttattccgtcgtcggaaaacgctgtttttgttgatgccgattattcacagatagagcttcgcgtgcttgcccatataacaggcgatgaagccctgataaatgctttcgttaagggggaagatattcatacggccacggcgtcgctggtatttgacgtagctcccgaagatgtgacgccggaactgcgcagaaaggcaaaagccgtaaatttcggcatagtgtacgggatcagtgattacgggctggcacgggatttgggaattacccggaaggaagcaaagcggtatatagacgactattttgccaaataccccaaagtaaaaacctatgtggatgaaattgtgcgggtcggccaggaacaggggtatgtggaaactctgttccacagaagaagataccttccctttcttgcatctaaaaattttcaccagcgttctttcggaaaaagggttgcaatgaatacgcccatacagggcactgcagccgatattattaaaattgcgatggtgaaggtatacaaggctttgaaagaatccggccttaaatccaggcttatcctccaggtccatgacgaacttgttattgagacttttgaagacgaactggagactgtcaaggaacttgtcaaaaagtgcatggaagaggccgttgaattgagtgtgccgcttgttgtcgacgtttcaatcgggaaaaactggtatgaagcctcctgatatggatcc

SEQ ID NO: 210 - DNA, 2772 bp, Artificial Sequence
  Description of Artificial Sequence: Synthetic Clostridium stercorarium DNA Polymerase E819P
atgaaatacctgctgccgaccgctgctgctggtctgctgctcctcgctgcccagccggcgatggccatggatccaaaaataatccttatagacggaaacagtattttaaaccgcggtttttatgccctgtcggggcgatccatgctgactacgtccacaggtctgtataccaatgcggttttcgcttttgtaaatatattgaacaaatatatcgaagaggaaaaccctgattatattgccgttgctttcgatcttagggcaaaaactttccggcacggtctatatgagggatacaaagcgcagcggaaaggcatgcccgatgaacttgcaatgcagatacccctcgcgaaggaagtactgagggcgatgaatattgccataatagagcatgaaggttatgaagccgacgatataatcggcagcctttcgttaaaggccgaaaaagagaattttgacgtaataatccttacgggggacagggattctttccagctgatcagcgacagggtgaaagttatcctgccttcgacgaaagccggaaaaacagagaccaacgtatatgataaacaggccatcattgacaaatacggagttttaccccatcagcttattgacgttaaaggcttaatgggagattcgtcagataatatacccggcgttccgggagtgggtgagaaaacggcgttaagccttatttcagcctacggtacactggaaggtgtttacgagcatattgatgaaataaaacagcctaagctgaaagcatcgctgattgaatataaggatcaggcgtttttaagccgtaagctgggtactattgtaagaaatctggagctgtgtgcttcgctggaggatctgaaaagaaaagaaataaaccgcaaagagcttttgaatgttttcagaaaactcgaatttgaaagtatcatatcaaaaatgaatcttgcttccgctgaggtgacagaattacctcccgcgccggaagagcttaaaataacccatatttcagcggcagaggatcttaagaaatggattgcttacctgcttaaccagaaaaacatttccgtccttcaactgattgaccgggaggattcatacagttcccgtctttcagggctggctttgtgcaccggggatgaggttttttatatcgagaccgggactgcactccccgagaatttgattgcaacagagctgaaagaactgtggcagaatgaaaatattcacaaaatcggacacaatataaaagaatttataacctggctgctgaaacacgatgttgaactgaacggcctttatttcgacactatgattgccgaatacctgatagattccataagaaacggctatcctatagcaagcctttctcacaaatacctgaatcgcagcgttccgtcgctggacgaacttttgggcaagggaaagggagcaaaaaagtactctgaaattccgcccgaaaggctgaaagattacagcgcttataacgtcaaagccatttttgacatatggccgatgcagaaaaaagttcttcaggaaaaccggcaggaggagctttttaatgacatagagcttcctcttataaccgtacttgccagtatggaataccacggtttcaaagttgacgccgcaaaacttcacgaatacggcgaagttcttctgtcacgcataaaagacctggaaaaggtaatttacatgctggccggtgaagaattcaacatcaattcaacgaagcagcttggtaccatattattcgaaaaactgaagcttcccgttgtaaaaagtacaaagaccggatactccaccgacgtcgaggttcttgaagagctttattacaagcatgatataataccatgcataatagaataccgccagcttacaaaactttacaccacctacgccgaaggtcttgaaaaagtgataaatcctgtaaccggtaaaattcattcaagttttaaccagacggttacggctacaggccgcatcagcagtaccgaaccaaatttacagaatatcccagtcagacacgaaatgggaagggaaatacggaaagcttttattccgtcgtcggaaaacgctgtttttgttgatgccgattattcacagatagagcttcgcgtgcttgcccatataacaggcgatgaagccctgataaatgctttcgttaagggggaagatattcatacggccacggcgtcgctggtatttgacgtagctcccgaagatgtgacgccggaactgcgcagaaaggcaaaagccgtaaatttcggcatagtgtacgggatcagtgattacgggctggcacgggatttgggaattacccggaaggaagcaaagcggtatatagacgactattttgccaaataccccaaagtaaaaacctatgtggatgaaattgtgcgggtcggccaggaacaggggtatgtggaaactctgttccacagaagaagataccttccccctcttgcatctaaaaattttcaccagcgttctttcggaaaaagggttgcaatgaatacgcccatacagggcactgcagccgatattattaaaattgcgatggtgaaggtatacaaggctttgaaagaatccggccttaaatccaggcttatcctccaggtccatgacgaacttgttattgagacttttgaagacgaactggagactgtcaaggaacttgtcaaaaagtgcatggaagaggccgttgaattgagtgtgccgcttgttgtcgacgtttcaatcgggaaaaactggtatgaagcctcctgatatggatcc

SEQ ID NO: 211 - DNA, 2772 bp, Artificial Sequence
  Description of Artificial Sequence: Synthetic Clostridium stercorarium DNA Polymerase E819S
atgaaatacctgctgccgaccgctgctgctggtctgctgctcctcgctgcccagccggcgatggccatggatccaaaaataatccttatagacggaaacagtattttaaaccgcggtttttatgccctgtcggggcgatccatgctgactacgtccacaggtctgtataccaatgcggttttcgcttttgtaaatatattgaacaaatatatcgaagaggaaaaccctgattatattgccgttgctttcgatcttagggcaaaaactttccggcacggtctatatgagggatacaaagcgcagcggaaaggcatgcccgatgaacttgcaatgcagatacccctcgcgaaggaagtactgagggcgatgaatattgccataatagagcatgaaggttatgaagccgacgatataatcggcagcctttcgttaaaggccgaaaaagagaattttgacgtaataatccttacgggggacagggattctttccagctgatcagcgacagggtgaaagttatcctgccttcgacgaaagccggaaaaacagagaccaacgtatatgataaacaggccatcattgacaaatacggagttttaccccatcagcttattgacgttaaaggcttaatgggagattcgtcagataatatacccggcgttccgggagtgggtgagaaaacggcgttaagccttatttcagcctacggtacactggaaggtgtttacgagcatattgatgaaataaaacagcctaagctgaaagcatcgctgattgaatataaggatcaggcgtttttaagccgtaagctgggtactattgtaagaaatctggagctgtgtgcttcgctggaggatctgaaaagaaaagaaataaaccgcaaagagcttttgaatgttttcagaaaactcgaatttgaaagtatcatatcaaaaatgaatcttgcttccgctgaggtgacagaattacctcccgcgccggaagagcttaaaataacccatatttcagcggcagaggatcttaagaaatggattgcttacctgcttaaccagaaaaacatttccgtccttcaactgattgaccgggaggattcatacagttcccgtctttcagggctggctttgtgcaccggggatgaggttttttatatcgagaccgggactgcactccccgagaatttgattgcaacagagctgaaagaactgtggcagaatgaaaatattcacaaaatcggacacaatataaaagaatttataacctggctgctgaaacacgatgttgaactgaacggcctttatttcgacactatgattgccgaatacctgatagattccataagaaacggctatcctatagcaagcctttctcacaaatacctgaatcgcagcgttccgtcgctggacgaacttttgggcaagggaaagggagcaaaaaagtactctgaaattccgcccgaaaggctgaaagattacagcgcttataacgtcaaagccatttttgacatatggccgatgcagaaaaaagttcttcaggaaaaccggcaggaggagctttttaatgacatagagcttcctcttataaccgtacttgccagtatggaataccacggtttcaaagttgacgccgcaaaacttcacgaatacggcgaagttcttctgtcacgcataaaagacctggaaaaggtaatttacatgctggccggtgaagaattcaacatcaattcaacgaagcagcttggtaccatattattcgaaaaactgaagcttcccgttgtaaaaagtacaaagaccggatactccaccgacgtcgaggttcttgaagagctttattacaagcatgatataataccatgcataatagaataccgccagcttacaaaactttacaccacctacgccgaaggtcttgaaaaagtgataaatcctgtaaccggtaaaattcattcaagttttaaccagacggttacggctacaggccgcatcagcagtaccgaaccaaatttacagaatatcccagtcagacacgaaatgggaagggaaatacggaaagcttttattccgtcgtcggaaaacgctgtttttgttgatgccgattattcacagatagagcttcgcgtgcttgcccatataacaggcgatgaagccctgataaatgctttcgttaagggggaagatattcatacggccacggcgtcgctggtatttgacgtagctcccgaagatgtgacgccggaactgcgcagaaaggcaaaagccgtaaatttcggcatagtgtacgggatcagtgattacgggctggcacgggatttgggaattacccggaaggaagcaaagcggtatatagacgactattttgccaaataccccaaagtaaaaacctatgtggatgaaattgtgcgggtcggccaggaacaggggtatgtggaaactctgttccacagaagaagataccttccctctcttgcatctaaaaattttcaccagcgttctttcggaaaaagggttgcaatgaatacgcccatacagggcactgcagccgatattattaaaattgcgatggtgaaggtatacaaggctttgaaagaatccggccttaaatccaggcttatcctccaggtccatgacgaacttgttattgagacttttgaagacgaactggagactgtcaaggaacttgtcaaaaagtgcatggaagaggccgttgaattgagtgtgccgcttgttgtcgacgtttcaatcgggaaaaactggtatgaagcctcctgatatggatcc

SEQ ID NO: 212 - DNA, 2772 bp, Artificial Sequence
  Description of Artificial Sequence: Synthetic Clostridium stercorarium DNA Polymerase E819T
atgaaatacctgctgccgaccgctgctgctggtctgctgctcctcgctgcccagccggcgatggccatggatccaaaaataatccttatagacggaaacagtattttaaaccgcggtttttatgccctgtcggggcgatccatgctgactacgtccacaggtctgtataccaatgcggttttcgcttttgtaaatatattgaacaaatatatcgaagaggaaaaccctgattatattgccgttgctttcgatcttagggcaaaaactttccggcacggtctatatgagggatacaaagcgcagcggaaaggcatgcccgatgaacttgcaatgcagatacccctcgcgaaggaagtactgagggcgatgaatattgccataatagagcatgaaggttatgaagccgacgatataatcggcagcctttcgttaaaggccgaaaaagagaattttgacgtaataatccttacgggggacagggattctttccagctgatcagcgacagggtgaaagttatcctgccttcgacgaaagccggaaaaacagagaccaacgtatatgataaacaggccatcattgacaaatacggagttttaccccatcagcttattgacgttaaaggcttaatgggagattcgtcagataatatacccggcgttccgggagtgggtgagaaaacggcgttaagccttatttcagcctacggtacactggaaggtgtttacgagcatattgatgaaataaaacagcctaagctgaaagcatcgctgattgaatataaggatcaggcgtttttaagccgtaagctgggtactattgtaagaaatctggagctgtgtgcttcgctggaggatctgaaaagaaaagaaataaaccgcaaagagcttttgaatgttttcagaaaactcgaatttgaaagtatcatatcaaaaatgaatcttgcttccgctgaggtgacagaattacctcccgcgccggaagagcttaaaataacccatatttcagcggcagaggatcttaagaaatggattgcttacctgcttaaccagaaaaacatttccgtccttcaactgattgaccgggaggattcatacagttcccgtctttcagggctggctttgtgcaccggggatgaggttttttatatcgagaccgggactgcactccccgagaatttgattgcaacagagctgaaagaactgtggcagaatgaaaatattcacaaaatcggacacaatataaaagaatttataacctggctgctgaaacacgatgttgaactgaacggcctttatttcgacactatgattgccgaatacctgatagattccataagaaacggctatcctatagcaagcctttctcacaaatacctgaatcgcagcgttccgtcgctggacgaacttttgggcaagggaaagggagcaaaaaagtactctgaaattccgcccgaaaggctgaaagattacagcgcttataacgtcaaagccatttttgacatatggccgatgcagaaaaaagttcttcaggaaaaccggcaggaggagctttttaatgacatagagcttcctcttataaccgtacttgccagtatggaataccacggtttcaaagttgacgccgcaaaacttcacgaatacggcgaagttcttctgtcacgcataaaagacctggaaaaggtaatttacatgctggccggtgaagaattcaacatcaattcaacgaagcagcttggtaccatattattcgaaaaactgaagcttcccgttgtaaaaagtacaaagaccggatactccaccgacgtcgaggttcttgaagagctttattacaagcatgatataataccatgcataatagaataccgccagcttacaaaactttacaccacctacgccgaaggtcttgaaaaagtgataaatcctgtaaccggtaaaattcattcaagttttaaccagacggttacggctacaggccgcatcagcagtaccgaaccaaatttacagaatatcccagtcagacacgaaatgggaagggaaatacggaaagcttttattccgtcgtcggaaaacgctgtttttgttgatgccgattattcacagatagagcttcgcgtgcttgcccatataacaggcgatgaagccctgataaatgctttcgttaagggggaagatattcatacggccacggcgtcgctggtatttgacgtagctcccgaagatgtgacgccggaactgcgcagaaaggcaaaagccgtaaatttcggcatagtgtacgggatcagtgattacgggctggcacgggatttgggaattacccggaaggaagcaaagcggtatatagacgactattttgccaaataccccaaagtaaaaacctatgtggatgaaattgtgcgggtcggccaggaacaggggtatgtggaaactctgttccacagaagaagataccttcccactcttgcatctaaaaattttcaccagcgttctttcggaaaaagggttgcaatgaatacgcccatacagggcactgcagccgatattattaaaattgcgatggtgaaggtatacaaggctttgaaagaatccggccttaaatccaggcttatcctccaggtccatgacgaacttgttattgagacttttgaagacgaactggagactgtcaaggaacttgtcaaaaagtgcatggaagaggccgttgaattgagtgtgccgcttgttgtcgacgtttcaatcgggaaaaactggtatgaagcctcctgatatggatcc

SEQ ID NO: 213 - DNA, 2772 bp, Artificial Sequence
  Description of Artificial Sequence: Synthetic Clostridium stercorarium DNA Polymerase E819W
atgaaatacctgctgccgaccgctgctgctggtctgctgctcctcgctgcccagccggcgatggccatggatccaaaaataatccttatagacggaaacagtattttaaaccgcggtttttatgccctgtcggggcgatccatgctgactacgtccacaggtctgtataccaatgcggttttcgcttttgtaaatatattgaacaaatatatcgaagaggaaaaccctgattatattgccgttgctttcgatcttagggcaaaaactttccggcacggtctatatgagggatacaaagcgcagcggaaaggcatgcccgatgaacttgcaatgcagatacccctcgcgaaggaagtactgagggcgatgaatattgccataatagagcatgaaggttatgaagccgacgatataatcggcagcctttcgttaaaggccgaaaaagagaattttgacgtaataatccttacgggggacagggattctttccagctgatcagcgacagggtgaaagttatcctgccttcgacgaaagccggaaaaacagagaccaacgtatatgataaacaggccatcattgacaaatacggagttttaccccatcagcttattgacgttaaaggcttaatgggagattcgtcagataatatacccggcgttccgggagtgggtgagaaaacggcgttaagccttatttcagcctacggtacactggaaggtgtttacgagcatattgatgaaataaaacagcctaagctgaaagcatcgctgattgaatataaggatcaggcgtttttaagccgtaagctgggtactattgtaagaaatctggagctgtgtgcttcgctggaggatctgaaaagaaaagaaataaaccgcaaagagcttttgaatgttttcagaaaactcgaatttgaaagtatcatatcaaaaatgaatcttgcttccgctgaggtgacagaattacctcccgcgccggaagagcttaaaataacccatatttcagcggcagaggatcttaagaaatggattgcttacctgcttaaccagaaaaacatttccgtccttcaactgattgaccgggaggattcatacagttcccgtctttcagggctggctttgtgcaccggggatgaggttttttatatcgagaccgggactgcactccccgagaatttgattgcaacagagctgaaagaactgtggcagaatgaaaatattcacaaaatcggacacaatataaaagaatttataacctggctgctgaaacacgatgttgaactgaacggcctttatttcgacactatgattgccgaatacctgatagattccataagaaacggctatcctatagcaagcctttctcacaaatacctgaatcgcagcgttccgtcgctggacgaacttttgggcaagggaaagggagcaaaaaagtactctgaaattccgcccgaaaggctgaaagattacagcgcttataacgtcaaagccatttttgacatatggccgatgcagaaaaaagttcttcaggaaaaccggcaggaggagctttttaatgacatagagcttcctcttataaccgtacttgccagtatggaataccacggtttcaaagttgacgccgcaaaacttcacgaatacggcgaagttcttctgtcacgcataaaagacctggaaaaggtaatttacatgctggccggtgaagaattcaacatcaattcaacgaagcagcttggtaccatattattcgaaaaactgaagcttcccgttgtaaaaagtacaaagaccggatactccaccgacgtcgaggttcttgaagagctttattacaagcatgatataataccatgcataatagaataccgccagcttacaaaactttacaccacctacgccgaaggtcttgaaaaagtgataaatcctgtaaccggtaaaattcattcaagttttaaccagacggttacggctacaggccgcatcagcagtaccgaaccaaatttacagaatatcccagtcagacacgaaatgggaagggaaatacggaaagcttttattccgtcgtcggaaaacgctgtttttgttgatgccgattattcacagatagagcttcgcgtgcttgcccatataacaggcgatgaagccctgataaatgctttcgttaagggggaagatattcatacggccacggcgtcgctggtatttgacgtagctcccgaagatgtgacgccggaactgcgcagaaaggcaaaagccgtaaatttcggcatagtgtacgggatcagtgattacgggctggcacgggatttgggaattacccggaaggaagcaaagcggtatatagacgactattttgccaaataccccaaagtaaaaacctatgtggatgaaattgtgcgggtcggccaggaacaggggtatgtggaaactctgttccacagaagaagataccttccctggcttgcatctaaaaattttcaccagcgttctttcggaaaaagggttgcaatgaatacgcccatacagggcactgcagccgatattattaaaattgcgatggtgaaggtatacaaggctttgaaagaatccggccttaaatccaggcttatcctccaggtccatgacgaacttgttattgagacttttgaagacgaactggagactgtcaaggaacttgtcaaaaagtgcatggaagaggccgttgaattgagtgtgccgcttgttgtcgacgtttcaatcgggaaaaactggtatgaagcctcctgatatggatcc

SEQ ID NO: 214 - DNA, 2772 bp, Artificial Sequence
  Description of Artificial Sequence: Synthetic Clostridium stercorarium DNA Polymerase E819Y
atgaaatacctgctgccgaccgctgctgctggtctgctgctcctcgctgcccagccggcgatggccatggatccaaaaataatccttatagacggaaacagtattttaaaccgcggtttttatgccctgtcggggcgatccatgctgactacgtccacaggtctgtataccaatgcggttttcgcttttgtaaatatattgaacaaatatatcgaagaggaaaaccctgattatattgccgttgctttcgatcttagggcaaaaactttccggcacggtctatatgagggatacaaagcgcagcggaaaggcatgcccgatgaacttgcaatgcagatacccctcgcgaaggaagtactgagggcgatgaatattgccataatagagcatgaaggttatgaagccgacgatataatcggcagcctttcgttaaaggccgaaaaagagaattttgacgtaataatccttacgggggacagggattctttccagctgatcagcgacagggtgaaagttatcctgccttcgacgaaagccggaaaaacagagaccaacgtatatgataaacaggccatcattgacaaatacggagttttaccccatcagcttattgacgttaaaggcttaatgggagattcgtcagataatatacccggcgttccgggagtgggtgagaaaacggcgttaagccttatttcagcctacggtacactggaaggtgtttacgagcatattgatgaaataaaacagcctaagctgaaagcatcgctgattgaatataaggatcaggcgtttttaagccgtaagctgggtactattgtaagaaatctggagctgtgtgcttcgctggaggatctgaaaagaaaagaaataaaccgcaaagagcttttgaatgttttcagaaaactcgaatttgaaagtatcatatcaaaaatgaatcttgcttccgctgaggtgacagaattacctcccgcgccggaagagcttaaaataacccatatttcagcggcagaggatcttaagaaatggattgcttacctgcttaaccagaaaaacatttccgtccttcaactgattgaccgggaggattcatacagttcccgtctttcagggctggctttgtgcaccggggatgaggttttttatatcgagaccgggactgcactccccgagaatttgattgcaacagagctgaaagaactgtggcagaatgaaaatattcacaaaatcggacacaatataaaagaatttataacctggctgctgaaacacgatgttgaactgaacggcctttatttcgacactatgattgccgaatacctgatagattccataagaaacggctatcctatagcaagcctttctcacaaatacctgaatcgcagcgttccgtcgctggacgaacttttgggcaagggaaagggagcaaaaaagtactctgaaattccgcccgaaaggctgaaagattacagcgcttataacgtcaaagccatttttgacatatggccgatgcagaaaaaagttcttcaggaaaaccggcaggaggagctttttaatgacatagagcttcctcttataaccgtacttgccagtatggaataccacggtttcaaagttgacgccgcaaaacttcacgaatacggcgaagttcttctgtcacgcataaaagacctggaaaaggtaatttacatgctggccggtgaagaattcaacatcaattcaacgaagcagcttggtaccatattattcgaaaaactgaagcttcccgttgtaaaaagtacaaagaccggatactccaccgacgtcgaggttcttgaagagctttattacaagcatgatataataccatgcataatagaataccgccagcttacaaaactttacaccacctacgccgaaggtcttgaaaaagtgataaatcctgtaaccggtaaaattcattcaagttttaaccagacggttacggctacaggccgcatcagcagtaccgaaccaaatttacagaatatcccagtcagacacgaaatgggaagggaaatacggaaagcttttattccgtcgtcggaaaacgctgtttttgttgatgccgattattcacagatagagcttcgcgtgcttgcccatataacaggcgatgaagccctgataaatgctttcgttaagggggaagatattcatacggccacggcgtcgctggtatttgacgtagctcccgaagatgtgacgccggaactgcgcagaaaggcaaaagccgtaaatttcggcatagtgtacgggatcagtgattacgggctggcacgggatttgggaattacccggaaggaagcaaagcggtatatagacgactattttgccaaataccccaaagtaaaaacctatgtggatgaaattgtgcgggtcggccaggaacaggggtatgtggaaactctgttccacagaagaagataccttccctatcttgcatctaaaaattttcaccagcgttctttcggaaaaagggttgcaatgaatacgcccatacagggcactgcagccgatattattaaaattgcgatggtgaaggtatacaaggctttgaaagaatccggccttaaatccaggcttatcctccaggtccatgacgaacttgttattgagacttttgaagacgaactggagactgtcaaggaacttgtcaaaaagtgcatggaagaggccgttgaattgagtgtgccgcttgttgtcgacgtttcaatcgggaaaaactggtatgaagcctcctgatatggatcc

SEQ ID NO: 215 - DNA, 2772 bp, Artificial Sequence
  Description of Artificial Sequence: Synthetic Clostridium stercorarium DNA Polymerase E819V
atgaaatacctgctgccgaccgctgctgctggtctgctgctcctcgctgcccagccggcgatggccatggatccaaaaataatccttatagacggaaacagtattttaaaccgcggtttttatgccctgtcggggcgatccatgctgactacgtccacaggtctgtataccaatgcggttttcgcttttgtaaatatattgaacaaatatatcgaagaggaaaaccctgattatattgccgttgctttcgatcttagggcaaaaactttccggcacggtctatatgagggatacaaagcgcagcggaaaggcatgcccgatgaacttgcaatgcagatacccctcgcgaaggaagtactgagggcgatgaatattgccataatagagcatgaaggttatgaagccgacgatataatcggcagcctttcgttaaaggccgaaaaagagaattttgacgtaataatccttacgggggacagggattctttccagctgatcagcgacagggtgaaagttatcctgccttcgacgaaagccggaaaaacagagaccaacgtatatgataaacaggccatcattgacaaatacggagttttaccccatcagcttattgacgttaaaggcttaatgggagattcgtcagataatatacccggcgttccgggagtgggtgagaaaacggcgttaagccttatttcagcctacggtacactggaaggtgtttacgagcatattgatgaaataaaacagcctaagctgaaagcatcgctgattgaatataaggatcaggcgtttttaagccgtaagctgggtactattgtaagaaatctggagctgtgtgcttcgctggaggatctgaaaagaaaagaaataaaccgcaaagagcttttgaatgttttcagaaaactcgaatttgaaagtatcatatcaaaaatgaatcttgcttccgctgaggtgacagaattacctcccgcgccggaagagcttaaaataacccatatttcagcggcagaggatcttaagaaatggattgcttacctgcttaaccagaaaaacatttccgtccttcaactgattgaccgggaggattcatacagttcccgtctttcagggctggctttgtgcaccggggatgaggttttttatatcgagaccgggactgcactccccgagaatttgattgcaacagagctgaaagaactgtggcagaatgaaaatattcacaaaatcggacacaatataaaagaatttataacctggctgctgaaacacgatgttgaactgaacggcctttatttcgacactatgattgccgaatacctgatagattccataagaaacggctatcctatagcaagcctttctcacaaatacctgaatcgcagcgttccgtcgctggacgaacttttgggcaagggaaagggagcaaaaaagtactctgaaattccgcccgaaaggctgaaagattacagcgcttataacgtcaaagccatttttgacatatggccgatgcagaaaaaagttcttcaggaaaaccggcaggaggagctttttaatgacatagagcttcctcttataaccgtacttgccagtatggaataccacggtttcaaagttgacgccgcaaaacttcacgaatacggcgaagttcttctgtcacgcataaaagacctggaaaaggtaatttacatgctggccggtgaagaattcaacatcaattcaacgaagcagcttggtaccatattattcgaaaaactgaagcttcccgttgtaaaaagtacaaagaccggatactccaccgacgtcgaggttcttgaagagctttattacaagcatgatataataccatgcataatagaataccgccagcttacaaaactttacaccacctacgccgaaggtcttgaaaaagtgataaatcctgtaaccggtaaaattcattcaagttttaaccagacggttacggctacaggccgcatcagcagtaccgaaccaaatttacagaatatcccagtcagacacgaaatgggaagggaaatacggaaagcttttattccgtcgtcggaaaacgctgtttttgttgatgccgattattcacagatagagcttcgcgtgcttgcccatataacaggcgatgaagccctgataaatgctttcgttaagggggaagatattcatacggccacggcgtcgctggtatttgacgtagctcccgaagatgtgacgccggaactgcgcagaaaggcaaaagccgtaaatttcggcatagtgtacgggatcagtgattacgggctggcacgggatttgggaattacccggaaggaagcaaagcggtatatagacgactattttgccaaataccccaaagtaaaaacctatgtggatgaaattgtgcgggtcggccaggaacaggggtatgtggaaactctgttccacagaagaagataccttcccgttcttgcatctaaaaattttcaccagcgttctttcggaaaaagggttgcaatgaatacgcccatacagggcactgcagccgatattattaaaattgcgatggtgaaggtatacaaggctttgaaagaatccggccttaaatccaggcttatcctccaggtccatgacgaacttgttattgagacttttgaagacgaactggagactgtcaaggaacttgtcaaaaagtgcatggaagaggccgttgaattgagtgtgccgcttgttgtcgacgtttcaatcgggaaaaactggtatgaagcctcctgatatggatcc

SEQ ID NO: 216 - DNA, 2772 bp, Artificial Sequence
  Description of Artificial Sequence: Synthetic Clostridium stercorarium DNA Polymerase L820A
atgaaatacctgctgccgaccgctgctgctggtctgctgctcctcgctgcccagccggcgatggccatggatccaaaaataatccttatagacggaaacagtattttaaaccgcggtttttatgccctgtcggggcgatccatgctgactacgtccacaggtctgtataccaatgcggttttcgcttttgtaaatatattgaacaaatatatcgaagaggaaaaccctgattatattgccgttgctttcgatcttagggcaaaaactttccggcacggtctatatgagggatacaaagcgcagcggaaaggcatgcccgatgaacttgcaatgcagatacccctcgcgaaggaagtactgagggcgatgaatattgccataatagagcatgaaggttatgaagccgacgatataatcggcagcctttcgttaaaggccgaaaaagagaattttgacgtaataatccttacgggggacagggattctttccagctgatcagcgacagggtgaaagttatcctgccttcgacgaaagccggaaaaacagagaccaacgtatatgataaacaggccatcattgacaaatacggagttttaccccatcagcttattgacgttaaaggcttaatgggagattcgtcagataatatacccggcgttccgggagtgggtgagaaaacggcgttaagccttatttcagcctacggtacactggaaggtgtttacgagcatattgatgaaataaaacagcctaagctgaaagcatcgctgattgaatataaggatcaggcgtttttaagccgtaagctgggtactattgtaagaaatctggagctgtgtgcttcgctggaggatctgaaaagaaaagaaataaaccgcaaagagcttttgaatgttttcagaaaactcgaatttgaaagtatcatatcaaaaatgaatcttgcttccgctgaggtgacagaattacctcccgcgccggaagagcttaaaataacccatatttcagcggcagaggatcttaagaaatggattgcttacctgcttaaccagaaaaacatttccgtccttcaactgattgaccgggaggattcatacagttcccgtctttcagggctggctttgtgcaccggggatgaggttttttatatcgagaccgggactgcactccccgagaatttgattgcaacagagctgaaagaactgtggcagaatgaaaatattcacaaaatcggacacaatataaaagaatttataacctggctgctgaaacacgatgttgaactgaacggcctttatttcgacactatgattgccgaatacctgatagattccataagaaacggctatcctatagcaagcctttctcacaaatacctgaatcgcagcgttccgtcgctggacgaacttttgggcaagggaaagggagcaaaaaagtactctgaaattccgcccgaaaggctgaaagattacagcgcttataacgtcaaagccatttttgacatatggccgatgcagaaaaaagttcttcaggaaaaccggcaggaggagctttttaatgacatagagcttcctcttataaccgtacttgccagtatggaataccacggtttcaaagttgacgccgcaaaacttcacgaatacggcgaagttcttctgtcacgcataaaagacctggaaaaggtaatttacatgctggccggtgaagaattcaacatcaattcaacgaagcagcttggtaccatattattcgaaaaactgaagcttcccgttgtaaaaagtacaaagaccggatactccaccgacgtcgaggttcttgaagagctttattacaagcatgatataataccatgcataatagaataccgccagcttacaaaactttacaccacctacgccgaaggtcttgaaaaagtgataaatcctgtaaccggtaaaattcattcaagttttaaccagacggttacggctacaggccgcatcagcagtaccgaaccaaatttacagaatatcccagtcagacacgaaatgggaagggaaatacggaaagcttttattccgtcgtcggaaaacgctgtttttgttgatgccgattattcacagatagagcttcgcgtgcttgcccatataacaggcgatgaagccctgataaatgctttcgttaagggggaagatattcatacggccacggcgtcgctggtatttgacgtagctcccgaagatgtgacgccggaactgcgcagaaaggcaaaagccgtaaatttcggcatagtgtacgggatcagtgattacgggctggcacgggatttgggaattacccggaaggaagcaaagcggtatatagacgactattttgccaaataccccaaagtaaaaacctatgtggatgaaattgtgcgggtcggccaggaacaggggtatgtggaaactctgttccacagaagaagataccttcccgaggctgcatctaaaaattttcaccagcgttctttcggaaaaagggttgcaatgaatacgcccatacagggcactgcagccgatattattaaaattgcgatggtgaaggtatacaaggctttgaaagaatccggccttaaatccaggcttatcctccaggtccatgacgaacttgttattgagacttttgaagacgaactggagactgtcaaggaacttgtcaaaaagtgcatggaagaggccgttgaattgagtgtgccgcttgttgtcgacgtttcaatcgggaaaaactggtatgaagcctcctgatatggatcc

SEQ ID NO: 217 - DNA, 2772 bp, Artificial Sequence
  Description of Artificial Sequence: Synthetic Clostridium stercorarium DNA Polymerase L820R
atgaaatacctgctgccgaccgctgctgctggtctgctgctcctcgctgcccagccggcgatggccatggatccaaaaataatccttatagacggaaacagtattttaaaccgcggtttttatgccctgtcggggcgatccatgctgactacgtccacaggtctgtataccaatgcggttttcgcttttgtaaatatattgaacaaatatatcgaagaggaaaaccctgattatattgccgttgctttcgatcttagggcaaaaactttccggcacggtctatatgagggatacaaagcgcagcggaaaggcatgcccgatgaacttgcaatgcagatacccctcgcgaaggaagtactgagggcgatgaatattgccataatagagcatgaaggttatgaagccgacgatataatcggcagcctttcgttaaaggccgaaaaagagaattttgacgtaataatccttacgggggacagggattctttccagctgatcagcgacagggtgaaagttatcctgccttcgacgaaagccggaaaaacagagaccaacgtatatgataaacaggccatcattgacaaatacggagttttaccccatcagcttattgacgttaaaggcttaatgggagattcgtcagataatatacccggcgttccgggagtgggtgagaaaacggcgttaagccttatttcagcctacggtacactggaaggtgtttacgagcatattgatgaaataaaacagcctaagctgaaagcatcgctgattgaatataaggatcaggcgtttttaagccgtaagctgggtactattgtaagaaatctggagctgtgtgcttcgctggaggatctgaaaagaaaagaaataaaccgcaaagagcttttgaatgttttcagaaaactcgaatttgaaagtatcatatcaaaaatgaatcttgcttccgctgaggtgacagaattacctcccgcgccggaagagcttaaaataacccatatttcagcggcagaggatcttaagaaatggattgcttacctgcttaaccagaaaaacatttccgtccttcaactgattgaccgggaggattcatacagttcccgtctttcagggctggctttgtgcaccggggatgaggttttttatatcgagaccgggactgcactccccgagaatttgattgcaacagagctgaaagaactgtggcagaatgaaaatattcacaaaatcggacacaatataaaagaatttataacctggctgctgaaacacgatgttgaactgaacggcctttatttcgacactatgattgccgaatacctgatagattccataagaaacggctatcctatagcaagcctttctcacaaatacctgaatcgcagcgttccgtcgctggacgaacttttgggcaagggaaagggagcaaaaaagtactctgaaattccgcccgaaaggctgaaagattacagcgcttataacgtcaaagccatttttgacatatggccgatgcagaaaaaagttcttcaggaaaaccggcaggaggagctttttaatgacatagagcttcctcttataaccgtacttgccagtatggaataccacggtttcaaagttgacgccgcaaaacttcacgaatacggcgaagttcttctgtcacgcataaaagacctggaaaaggtaatttacatgctggccggtgaagaattcaacatcaattcaacgaagcagcttggtaccatattattcgaaaaactgaagcttcccgttgtaaaaagtacaaagaccggatactccaccgacgtcgaggttcttgaagagctttattacaagcatgatataataccatgcataatagaataccgccagcttacaaaactttacaccacctacgccgaaggtcttgaaaaagtgataaatcctgtaaccggtaaaattcattcaagttttaaccagacggttacggctacaggccgcatcagcagtaccgaaccaaatttacagaatatcccagtcagacacgaaatgggaagggaaatacggaaagcttttattccgtcgtcggaaaacgctgtttttgttgatgccgattattcacagatagagcttcgcgtgcttgcccatataacaggcgatgaagccctgataaatgctttcgttaagggggaagatattcatacggccacggcgtcgctggtatttgacgtagctcccgaagatgtgacgccggaactgcgcagaaaggcaaaagccgtaaatttcggcatagtgtacgggatcagtgattacgggctggcacgggatttgggaattacccggaaggaagcaaagcggtatatagacgactattttgccaaataccccaaagtaaaaacctatgtggatgaaattgtgcgggtcggccaggaacaggggtatgtggaaactctgttccacagaagaagataccttcccgagcgtgcatctaaaaattttcaccagcgttctttcggaaaaagggttgcaatgaatacgcccatacagggcactgcagccgatattattaaaattgcgatggtgaaggtatacaaggctttgaaagaatccggccttaaatccaggcttatcctccaggtccatgacgaacttgttattgagacttttgaagacgaactggagactgtcaaggaacttgtcaaaaagtgcatggaagaggccgttgaattgagtgtgccgcttgttgtcgacgtttcaatcgggaaaaactggtatgaagcctcctgatatggatcc

SEQ ID NO: 218 - DNA, 2772 bp, Artificial Sequence
  Description of Artificial Sequence: Synthetic Clostridium stercorarium DNA Polymerase L820N
atgaaatacctgctgccgaccgctgctgctggtctgctgctcctcgctgcccagccggcgatggccatggatccaaaaataatccttatagacggaaacagtattttaaaccgcggtttttatgccctgtcggggcgatccatgctgactacgtccacaggtctgtataccaatgcggttttcgcttttgtaaatatattgaacaaatatatcgaagaggaaaaccctgattatattgccgttgctttcgatcttagggcaaaaactttccggcacggtctatatgagggatacaaagcgcagcggaaaggcatgcccgatgaacttgcaatgcagatacccctcgcgaaggaagtactgagggcgatgaatattgccataatagagcatgaaggttatgaagccgacgatataatcggcagcctttcgttaaaggccgaaaaagagaattttgacgtaataatccttacgggggacagggattctttccagctgatcagcgacagggtgaaagttatcctgccttcgacgaaagccggaaaaacagagaccaacgtatatgataaacaggccatcattgacaaatacggagttttaccccatcagcttattgacgttaaaggcttaatgggagattcgtcagataatatacccggcgttccgggagtgggtgagaaaacggcgttaagccttatttcagcctacggtacactggaaggtgtttacgagcatattgatgaaataaaacagcctaagctgaaagcatcgctgattgaatataaggatcaggcgtttttaagccgtaagctgggtactattgtaagaaatctggagctgtgtgcttcgctggaggatctgaaaagaaaagaaataaaccgcaaagagcttttgaatgttttcagaaaactcgaatttgaaagtatcatatcaaaaatgaatcttgcttccgctgaggtgacagaattacctcccgcgccggaagagcttaaaataacccatatttcagcggcagaggatcttaagaaatggattgcttacctgcttaaccagaaaaacatttccgtccttcaactgattgaccgggaggattcatacagttcccgtctttcagggctggctttgtgcaccggggatgaggttttttatatcgagaccgggactgcactccccgagaatttgattgcaacagagctgaaagaactgtggcagaatgaaaatattcacaaaatcggacacaatataaaagaatttataacctggctgctgaaacacgatgttgaactgaacggcctttatttcgacactatgattgccgaatacctgatagattccataagaaacggctatcctatagcaagcctttctcacaaatacctgaatcgcagcgttccgtcgctggacgaacttttgggcaagggaaagggagcaaaaaagtactctgaaattccgcccgaaaggctgaaagattacagcgcttataacgtcaaagccatttttgacatatggccgatgcagaaaaaagttcttcaggaaaaccggcaggaggagctttttaatgacatagagcttcctcttataaccgtacttgccagtatggaataccacggtttcaaagttgacgccgcaaaacttcacgaatacggcgaagttcttctgtcacgcataaaagacctggaaaaggtaatttacatgctggccggtgaagaattcaacatcaattcaacgaagcagcttggtaccatattattcgaaaaactgaagcttcccgttgtaaaaagtacaaagaccggatactccaccgacgtcgaggttcttgaagagctttattacaagcatgatataataccatgcataatagaataccgccagcttacaaaactttacaccacctacgccgaaggtcttgaaaaagtgataaatcctgtaaccggtaaaattcattcaagttttaaccagacggttacggctacaggccgcatcagcagtaccgaaccaaatttacagaatatcccagtcagacacgaaatgggaagggaaatacggaaagcttttattccgtcgtcggaaaacgctgtttttgttgatgccgattattcacagatagagcttcgcgtgcttgcccatataacaggcgatgaagccctgataaatgctttcgttaagggggaagatattcatacggccacggcgtcgctggtatttgacgtagctcccgaagatgtgacgccggaactgcgcagaaaggcaaaagccgtaaatttcggcatagtgtacgggatcagtgattacgggctggcacgggatttgggaattacccggaaggaagcaaagcggtatatagacgactattttgccaaataccccaaagtaaaaacctatgtggatgaaattgtgcgggtcggccaggaacaggggtatgtggaaactctgttccacagaagaagataccttcccgagaatgcatctaaaaattttcaccagcgttctttcggaaaaagggttgcaatgaatacgcccatacagggcactgcagccgatattattaaaattgcgatggtgaaggtatacaaggctttgaaagaatccggccttaaatccaggcttatcctccaggtccatgacgaacttgttattgagacttttgaagacgaactggagactgtcaaggaacttgtcaaaaagtgcatggaagaggccgttgaattgagtgtgccgcttgttgtcgacgtttcaatcgggaaaaactggtatgaagcctcctgatatggatcc

SEQ ID NO: 219 - DNA, 2772 bp, Artificial Sequence
  Description of Artificial Sequence: Synthetic Clostridium stercorarium DNA Polymerase L820D
atgaaatacctgctgccgaccgctgctgctggtctgctgctcctcgctgcccagccggcgatggccatggatccaaaaataatccttatagacggaaacagtattttaaaccgcggtttttatgccctgtcggggcgatccatgctgactacgtccacaggtctgtataccaatgcggttttcgcttttgtaaatatattgaacaaatatatcgaagaggaaaaccctgattatattgccgttgctttcgatcttagggcaaaaactttccggcacggtctatatgagggatacaaagcgcagcggaaaggcatgcccgatgaacttgcaatgcagatacccctcgcgaaggaagtactgagggcgatgaatattgccataatagagcatgaaggttatgaagccgacgatataatcggcagcctttcgttaaaggccgaaaaagagaattttgacgtaataatccttacgggggacagggattctttccagctgatcagcgacagggtgaaagttatcctgccttcgacgaaagccggaaaaacagagaccaacgtatatgataaacaggccatcattgacaaatacggagttttaccccatcagcttattgacgttaaaggcttaatgggagattcgtcagataatatacccggcgttccgggagtgggtgagaaaacggcgttaagccttatttcagcctacggtacactggaaggtgtttacgagcatattgatgaaataaaacagcctaagctgaaagcatcgctgattgaatataaggatcaggcgtttttaagccgtaagctgggtactattgtaagaaatctggagctgtgtgcttcgctggaggatctgaaaagaaaagaaataaaccgcaaagagcttttgaatgttttcagaaaactcgaatttgaaagtatcatatcaaaaatgaatcttgcttccgctgaggtgacagaattacctcccgcgccggaagagcttaaaataacccatatttcagcggcagaggatcttaagaaatggattgcttacctgcttaaccagaaaaacatttccgtccttcaactgattgaccgggaggattcatacagttcccgtctttcagggctggctttgtgcaccggggatgaggttttttatatcgagaccgggactgcactccccgagaatttgattgcaacagagctgaaagaactgtggcagaatgaaaatattcacaaaatcggacacaatataaaagaatttataacctggctgctgaaacacgatgttgaactgaacggcctttatttcgacactatgattgccgaatacctgatagattccataagaaacggctatcctatagcaagcctttctcacaaatacctgaatcgcagcgttccgtcgctggacgaacttttgggcaagggaaagggagcaaaaaagtactctgaaattccgcccgaaaggctgaaagattacagcgcttataacgtcaaagccatttttgacatatggccgatgcagaaaaaagttcttcaggaaaaccggcaggaggagctttttaatgacatagagcttcctcttataaccgtacttgccagtatggaataccacggtttcaaagttgacgccgcaaaacttcacgaatacggcgaagttcttctgtcacgcataaaagacctggaaaaggtaatttacatgctggccggtgaagaattcaacatcaattcaacgaagcagcttggtaccatattattcgaaaaactgaagcttcccgttgtaaaaagtacaaagaccggatactccaccgacgtcgaggttcttgaagagctttattacaagcatgatataataccatgcataatagaataccgccagcttacaaaactttacaccacctacgccgaaggtcttgaaaaagtgataaatcctgtaaccggtaaaattcattcaagttttaaccagacggttacggctacaggccgcatcagcagtaccgaaccaaatttacagaatatcccagtcagacacgaaatgggaagggaaatacggaaagcttttattccgtcgtcggaaaacgctgtttttgttgatgccgattattcacagatagagcttcgcgtgcttgcccatataacaggcgatgaagccctgataaatgctttcgttaagggggaagatattcatacggccacggcgtcgctggtatttgacgtagctcccgaagatgtgacgccggaactgcgcagaaaggcaaaagccgtaaatttcggcatagtgtacgggatcagtgattacgggctggcacgggatttgggaattacccggaaggaagcaaagcggtatatagacgactattttgccaaataccccaaagtaaaaacctatgtggatgaaattgtgcgggtcggccaggaacaggggtatgtggaaactctgttccacagaagaagataccttcccgaggatgcatctaaaaattttcaccagcgttctttcggaaaaagggttgcaatgaatacgcccatacagggcactgcagccgatattattaaaattgcgatggtgaaggtatacaaggctttgaaagaatccggccttaaatccaggcttatcctccaggtccatgacgaacttgttattgagacttttgaagacgaactggagactgtcaaggaacttgtcaaaaagtgcatggaagaggccgttgaattgagtgtgccgcttgttgtcgacgtttcaatcgggaaaaactggtatgaagcctcctgatatggatcc

SEQ ID NO: 220 - DNA, 2772 bp, Artificial Sequence
  Description of Artificial Sequence: Synthetic Clostridium stercorarium DNA Polymerase L820C
atgaaatacctgctgccgaccgctgctgctggtctgctgctcctcgctgcccagccggcgatggccatggatccaaaaataatccttatagacggaaacagtattttaaaccgcggtttttatgccctgtcggggcgatccatgctgactacgtccacaggtctgtataccaatgcggttttcgcttttgtaaatatattgaacaaatatatcgaagaggaaaaccctgattatattgccgttgctttcgatcttagggcaaaaactttccggcacggtctatatgagggatacaaagcgcagcggaaaggcatgcccgatgaacttgcaatgcagatacccctcgcgaaggaagtactgagggcgatgaatattgccataatagagcatgaaggttatgaagccgacgatataatcggcagcctttcgttaaaggccgaaaaagagaattttgacgtaataatccttacgggggacagggattctttccagctgatcagcgacagggtgaaagttatcctgccttcgacgaaagccggaaaaacagagaccaacgtatatgataaacaggccatcattgacaaatacggagttttaccccatcagcttattgacgttaaaggcttaatgggagattcgtcagataatatacccggcgttccgggagtgggtgagaaaacggcgttaagccttatttcagcctacggtacactggaaggtgtttacgagcatattgatgaaataaaacagcctaagctgaaagcatcgctgattgaatataaggatcaggcgtttttaagccgtaagctgggtactattgtaagaaatctggagctgtgtgcttcgctggaggatctgaaaagaaaagaaataaaccgcaaagagcttttgaatgttttcagaaaactcgaatttgaaagtatcatatcaaaaatgaatcttgcttccgctgaggtgacagaattacctcccgcgccggaagagcttaaaataacccatatttcagcggcagaggatcttaagaaatggattgcttacctgcttaaccagaaaaacatttccgtccttcaactgattgaccgggaggattcatacagttcccgtctttcagggctggctttgtgcaccggggatgaggttttttatatcgagaccgggactgcactccccgagaatttgattgcaacagagctgaaagaactgtggcagaatgaaaatattcacaaaatcggacacaatataaaagaatttataacctggctgctgaaacacgatgttgaactgaacggcctttatttcgacactatgattgccgaatacctgatagattccataagaaacggctatcctatagcaagcctttctcacaaatacctgaatcgcagcgttccgtcgctggacgaacttttgggcaagggaaagggagcaaaaaagtactctgaaattccgcccgaaaggctgaaagattacagcgcttataacgtcaaagccatttttgacatatggccgatgcagaaaaaagttcttcaggaaaaccggcaggaggagctttttaatgacatagagcttcctcttataaccgtacttgccagtatggaataccacggtttcaaagttgacgccgcaaaacttcacgaatacggcgaagttcttctgtcacgcataaaagacctggaaaaggtaatttacatgctggccggtgaagaattcaacatcaattcaacgaagcagcttggtaccatattattcgaaaaactgaagcttcccgttgtaaaaagtacaaagaccggatactccaccgacgtcgaggttcttgaagagctttattacaagcatgatataataccatgcataatagaataccgccagcttacaaaactttacaccacctacgccgaaggtcttgaaaaagtgataaatcctgtaaccggtaaaattcattcaagttttaaccagacggttacggctacaggccgcatcagcagtaccgaaccaaatttacagaatatcccagtcagacacgaaatgggaagggaaatacggaaagcttttattccgtcgtcggaaaacgctgtttttgttgatgccgattattcacagatagagcttcgcgtgcttgcccatataacaggcgatgaagccctgataaatgctttcgttaagggggaagatattcatacggccacggcgtcgctggtatttgacgtagctcccgaagatgtgacgccggaactgcgcagaaaggcaaaagccgtaaatttcggcatagtgtacgggatcagtgattacgggctggcacgggatttgggaattacccggaaggaagcaaagcggtatatagacgactattttgccaaataccccaaagtaaaaacctatgtggatgaaattgtgcgggtcggccaggaacaggggtatgtggaaactctgttccacagaagaagataccttcccgagtgtgcatctaaaaattttcaccagcgttctttcggaaaaagggttgcaatgaatacgcccatacagggcactgcagccgatattattaaaattgcgatggtgaaggtatacaaggctttgaaagaatccggccttaaatccaggcttatcctccaggtccatgacgaacttgttattgagacttttgaagacgaactggagactgtcaaggaacttgtcaaaaagtgcatggaagaggccgttgaattgagtgtgccgcttgttgtcgacgtttcaatcgggaaaaactggtatgaagcctcctgatatggatcc

SEQ ID NO: 221 - DNA, 2772 bp, Artificial Sequence
  Description of Artificial Sequence: Synthetic Clostridium stercorarium DNA Polymerase L820E
atgaaatacctgctgccgaccgctgctgctggtctgctgctcctcgctgcccagccggcgatggccatggatccaaaaataatccttatagacggaaacagtattttaaaccgcggtttttatgccctgtcggggcgatccatgctgactacgtccacaggtctgtataccaatgcggttttcgcttttgtaaatatattgaacaaatatatcgaagaggaaaaccctgattatattgccgttgctttcgatcttagggcaaaaactttccggcacggtctatatgagggatacaaagcgcagcggaaaggcatgcccgatgaacttgcaatgcagatacccctcgcgaaggaagtactgagggcgatgaatattgccataatagagcatgaaggttatgaagccgacgatataatcggcagcctttcgttaaaggccgaaaaagagaattttgacgtaataatccttacgggggacagggattctttccagctgatcagcgacagggtgaaagttatcctgccttcgacgaaagccggaaaaacagagaccaacgtatatgataaacaggccatcattgacaaatacggagttttaccccatcagcttattgacgttaaaggcttaatgggagattcgtcagataatatacccggcgttccgggagtgggtgagaaaacggcgttaagccttatttcagcctacggtacactggaaggtgtttacgagcatattgatgaaataaaacagcctaagctgaaagcatcgctgattgaatataaggatcaggcgtttttaagccgtaagctgggtactattgtaagaaatctggagctgtgtgcttcgctggaggatctgaaaagaaaagaaataaaccgcaaagagcttttgaatgttttcagaaaactcgaatttgaaagtatcatatcaaaaatgaatcttgcttccgctgaggtgacagaattacctcccgcgccggaagagcttaaaataacccatatttcagcggcagaggatcttaagaaatggattgcttacctgcttaaccagaaaaacatttccgtccttcaactgattgaccgggaggattcatacagttcccgtctttcagggctggctttgtgcaccggggatgaggttttttatatcgagaccgggactgcactccccgagaatttgattgcaacagagctgaaagaactgtggcagaatgaaaatattcacaaaatcggacacaatataaaagaatttataacctggctgctgaaacacgatgttgaactgaacggcctttatttcgacactatgattgccgaatacctgatagattccataagaaacggctatcctatagcaagcctttctcacaaatacctgaatcgcagcgttccgtcgctggacgaacttttgggcaagggaaagggagcaaaaaagtactctgaaattccgcccgaaaggctgaaagattacagcgcttataacgtcaaagccatttttgacatatggccgatgcagaaaaaagttcttcaggaaaaccggcaggaggagctttttaatgacatagagcttcctcttataaccgtacttgccagtatggaataccacggtttcaaagttgacgccgcaaaacttcacgaatacggcgaagttcttctgtcacgcataaaagacctggaaaaggtaatttacatgctggccggtgaagaattcaacatcaattcaacgaagcagcttggtaccatattattcgaaaaactgaagcttcccgttgtaaaaagtacaaagaccggatactccaccgacgtcgaggttcttgaagagctttattacaagcatgatataataccatgcataatagaataccgccagcttacaaaactttacaccacctacgccgaaggtcttgaaaaagtgataaatcctgtaaccggtaaaattcattcaagttttaaccagacggttacggctacaggccgcatcagcagtaccgaaccaaatttacagaatatcccagtcagacacgaaatgggaagggaaatacggaaagcttttattccgtcgtcggaaaacgctgtttttgttgatgccgattattcacagatagagcttcgcgtgcttgcccatataacaggcgatgaagccctgataaatgctttcgttaagggggaagatattcatacggccacggcgtcgctggtatttgacgtagctcccgaagatgtgacgccggaactgcgcagaaaggcaaaagccgtaaatttcggcatagtgtacgggatcagtgattacgggctggcacgggatttgggaattacccggaaggaagcaaagcggtatatagacgactattttgccaaataccccaaagtaaaaacctatgtggatgaaattgtgcgggtcggccaggaacaggggtatgtggaaactctgttccacagaagaagataccttcccgaggaagcatctaaaaattttcaccagcgttctttcggaaaaagggttgcaatgaatacgcccatacagggcactgcagccgatattattaaaattgcgatggtgaaggtatacaaggctttgaaagaatccggccttaaatccaggcttatcctccaggtccatgacgaacttgttattgagacttttgaagacgaactggagactgtcaaggaacttgtcaaaaagtgcatggaagaggccgttgaattgagtgtgccgcttgttgtcgacgtttcaatcgggaaaaactggtatgaagcctcctgatatggatcc

SEQ ID NO: 222 - DNA, 2772 bp, Artificial Sequence
  Description of Artificial Sequence: Synthetic Clostridium stercorarium DNA Polymerase L820Q
atgaaatacctgctgccgaccgctgctgctggtctgctgctcctcgctgcccagccggcgatggccatggatccaaaaataatccttatagacggaaacagtattttaaaccgcggtttttatgccctgtcggggcgatccatgctgactacgtccacaggtctgtataccaatgcggttttcgcttttgtaaatatattgaacaaatatatcgaagaggaaaaccctgattatattgccgttgctttcgatcttagggcaaaaactttccggcacggtctatatgagggatacaaagcgcagcggaaaggcatgcccgatgaacttgcaatgcagatacccctcgcgaaggaagtactgagggcgatgaatattgccataatagagcatgaaggttatgaagccgacgatataatcggcagcctttcgttaaaggccgaaaaagagaattttgacgtaataatccttacgggggacagggattctttccagctgatcagcgacagggtgaaagttatcctgccttcgacgaaagccggaaaaacagagaccaacgtatatgataaacaggccatcattgacaaatacggagttttaccccatcagcttattgacgttaaaggcttaatgggagattcgtcagataatatacccggcgttccgggagtgggtgagaaaacggcgttaagccttatttcagcctacggtacactggaaggtgtttacgagcatattgatgaaataaaacagcctaagctgaaagcatcgctgattgaatataaggatcaggcgtttttaagccgtaagctgggtactattgtaagaaatctggagctgtgtgcttcgctggaggatctgaaaagaaaagaaataaaccgcaaagagcttttgaatgttttcagaaaactcgaatttgaaagtatcatatcaaaaatgaatcttgcttccgctgaggtgacagaattacctcccgcgccggaagagcttaaaataacccatatttcagcggcagaggatcttaagaaatggattgcttacctgcttaaccagaaaaacatttccgtccttcaactgattgaccgggaggattcatacagttcccgtctttcagggctggctttgtgcaccggggatgaggttttttatatcgagaccgggactgcactccccgagaatttgattgcaacagagctgaaagaactgtggcagaatgaaaatattcacaaaatcggacacaatataaaagaatttataacctggctgctgaaacacgatgttgaactgaacggcctttatttcgacactatgattgccgaatacctgatagattccataagaaacggctatcctatagcaagcctttctcacaaatacctgaatcgcagcgttccgtcgctggacgaacttttgggcaagggaaagggagcaaaaaagtactctgaaattccgcccgaaaggctgaaagattacagcgcttataacgtcaaagccatttttgacatatggccgatgcagaaaaaagttcttcaggaaaaccggcaggaggagctttttaatgacatagagcttcctcttataaccgtacttgccagtatggaataccacggtttcaaagttgacgccgcaaaacttcacgaatacggcgaagttcttctgtcacgcataaaagacctggaaaaggtaatttacatgctggccggtgaagaattcaacatcaattcaacgaagcagcttggtaccatattattcgaaaaactgaagcttcccgttgtaaaaagtacaaagaccggatactccaccgacgtcgaggttcttgaagagctttattacaagcatgatataataccatgcataatagaataccgccagcttacaaaactttacaccacctacgccgaaggtcttgaaaaagtgataaatcctgtaaccggtaaaattcattcaagttttaaccagacggttacggctacaggccgcatcagcagtaccgaaccaaatttacagaatatcccagtcagacacgaaatgggaagggaaatacggaaagcttttattccgtcgtcggaaaacgctgtttttgttgatgccgattattcacagatagagcttcgcgtgcttgcccatataacaggcgatgaagccctgataaatgctttcgttaagggggaagatattcatacggccacggcgtcgctggtatttgacgtagctcccgaagatgtgacgccggaactgcgcagaaaggcaaaagccgtaaatttcggcatagtgtacgggatcagtgattacgggctggcacgggatttgggaattacccggaaggaagcaaagcggtatatagacgactattttgccaaataccccaaagtaaaaacctatgtggatgaaattgtgcgggtcggccaggaacaggggtatgtggaaactctgttccacagaagaagataccttcccgagcaagcatctaaaaattttcaccagcgttctttcggaaaaagggttgcaatgaatacgcccatacagggcactgcagccgatattattaaaattgcgatggtgaaggtatacaaggctttgaaagaatccggccttaaatccaggcttatcctccaggtccatgacgaacttgttattgagacttttgaagacgaactggagactgtcaaggaacttgtcaaaaagtgcatggaagaggccgttgaattgagtgtgccgcttgttgtcgacgtttcaatcgggaaaaactggtatgaagcctcctgatatggatcc

SEQ ID NO: 223 - DNA, 2772 bp, Artificial Sequence
  Description of Artificial Sequence: Synthetic Clostridium stercorarium DNA Polymerase L820G
atgaaatacctgctgccgaccgctgctgctggtctgctgctcctcgctgcccagccggcgatggccatggatccaaaaataatccttatagacggaaacagtattttaaaccgcggtttttatgccctgtcggggcgatccatgctgactacgtccacaggtctgtataccaatgcggttttcgcttttgtaaatatattgaacaaatatatcgaagaggaaaaccctgattatattgccgttgctttcgatcttagggcaaaaactttccggcacggtctatatgagggatacaaagcgcagcggaaaggcatgcccgatgaacttgcaatgcagatacccctcgcgaaggaagtactgagggcgatgaatattgccataatagagcatgaaggttatgaagccgacgatataatcggcagcctttcgttaaaggccgaaaaagagaattttgacgtaataatccttacgggggacagggattctttccagctgatcagcgacagggtgaaagttatcctgccttcgacgaaagccggaaaaacagagaccaacgtatatgataaacaggccatcattgacaaatacggagttttaccccatcagcttattgacgttaaaggcttaatgggagattcgtcagataatatacccggcgttccgggagtgggtgagaaaacggcgttaagccttatttcagcctacggtacactggaaggtgtttacgagcatattgatgaaataaaacagcctaagctgaaagcatcgctgattgaatataaggatcaggcgtttttaagccgtaagctgggtactattgtaagaaatctggagctgtgtgcttcgctggaggatctgaaaagaaaagaaataaaccgcaaagagcttttgaatgttttcagaaaactcgaatttgaaagtatcatatcaaaaatgaatcttgcttccgctgaggtgacagaattacctcccgcgccggaagagcttaaaataacccatatttcagcggcagaggatcttaagaaatggattgcttacctgcttaaccagaaaaacatttccgtccttcaactgattgaccgggaggattcatacagttcccgtctttcagggctggctttgtgcaccggggatgaggttttttatatcgagaccgggactgcactccccgagaatttgattgcaacagagctgaaagaactgtggcagaatgaaaatattcacaaaatcggacacaatataaaagaatttataacctggctgctgaaacacgatgttgaactgaacggcctttatttcgacactatgattgccgaatacctgatagattccataagaaacggctatcctatagcaagcctttctcacaaatacctgaatcgcagcgttccgtcgctggacgaacttttgggcaagggaaagggagcaaaaaagtactctgaaattccgcccgaaaggctgaaagattacagcgcttataacgtcaaagccatttttgacatatggccgatgcagaaaaaagttcttcaggaaaaccggcaggaggagctttttaatgacatagagcttcctcttataaccgtacttgccagtatggaataccacggtttcaaagttgacgccgcaaaacttcacgaatacggcgaagttcttctgtcacgcataaaagacctggaaaaggtaatttacatgctggccggtgaagaattcaacatcaattcaacgaagcagcttggtaccatattattcgaaaaactgaagcttcccgttgtaaaaagtacaaagaccggatactccaccgacgtcgaggttcttgaagagctttattacaagcatgatataataccatgcataatagaataccgccagcttacaaaactttacaccacctacgccgaaggtcttgaaaaagtgataaatcctgtaaccggtaaaattcattcaagttttaaccagacggttacggctacaggccgcatcagcagtaccgaaccaaatttacagaatatcccagtcagacacgaaatgggaagggaaatacggaaagcttttattccgtcgtcggaaaacgctgtttttgttgatgccgattattcacagatagagcttcgcgtgcttgcccatataacaggcgatgaagccctgataaatgctttcgttaagggggaagatattcatacggccacggcgtcgctggtatttgacgtagctcccgaagatgtgacgccggaactgcgcagaaaggcaaaagccgtaaatttcggcatagtgtacgggatcagtgattacgggctggcacgggatttgggaattacccggaaggaagcaaagcggtatatagacgactattttgccaaataccccaaagtaaaaacctatgtggatgaaattgtgcgggtcggccaggaacaggggtatgtggaaactctgttccacagaagaagataccttcccgagggtgcatctaaaaattttcaccagcgttctttcggaaaaagggttgcaatgaatacgcccatacagggcactgcagccgatattattaaaattgcgatggtgaaggtatacaaggctttgaaagaatccggccttaaatccaggcttatcctccaggtccatgacgaacttgttattgagacttttgaagacgaactggagactgtcaaggaacttgtcaaaaagtgcatggaagaggccgttgaattgagtgtgccgcttgttgtcgacgtttcaatcgggaaaaactggtatgaagcctcctgatatggatcc

SEQ ID NO: 224 - DNA, 2772 bp, Artificial Sequence
  Description of Artificial Sequence: Synthetic Clostridium stercorarium DNA Polymerase L820H
atgaaatacctgctgccgaccgctgctgctggtctgctgctcctcgctgcccagccggcgatggccatggatccaaaaataatccttatagacggaaacagtattttaaaccgcggtttttatgccctgtcggggcgatccatgctgactacgtccacaggtctgtataccaatgcggttttcgcttttgtaaatatattgaacaaatatatcgaagaggaaaaccctgattatattgccgttgctttcgatcttagggcaaaaactttccggcacggtctatatgagggatacaaagcgcagcggaaaggcatgcccgatgaacttgcaatgcagatacccctcgcgaaggaagtactgagggcgatgaatattgccataatagagcatgaaggttatgaagccgacgatataatcggcagcctttcgttaaaggccgaaaaagagaattttgacgtaataatccttacgggggacagggattctttccagctgatcagcgacagggtgaaagttatcctgccttcgacgaaagccggaaaaacagagaccaacgtatatgataaacaggccatcattgacaaatacggagttttaccccatcagcttattgacgttaaaggcttaatgggagattcgtcagataatatacccggcgttccgggagtgggtgagaaaacggcgttaagccttatttcagcctacggtacactggaaggtgtttacgagcatattgatgaaataaaacagcctaagctgaaagcatcgctgattgaatataaggatcaggcgtttttaagccgtaagctgggtactattgtaagaaatctggagctgtgtgcttcgctggaggatctgaaaagaaaagaaataaaccgcaaagagcttttgaatgttttcagaaaactcgaatttgaaagtatcatatcaaaaatgaatcttgcttccgctgaggtgacagaattacctcccgcgccggaagagcttaaaataacccatatttcagcggcagaggatcttaagaaatggattgcttacctgcttaaccagaaaaacatttccgtccttcaactgattgaccgggaggattcatacagttcccgtctttcagggctggctttgtgcaccggggatgaggttttttatatcgagaccgggactgcactccccgagaatttgattgcaacagagctgaaagaactgtggcagaatgaaaatattcacaaaatcggacacaatataaaagaatttataacctggctgctgaaacacgatgttgaactgaacggcctttatttcgacactatgattgccgaatacctgatagattccataagaaacggctatcctatagcaagcctttctcacaaatacctgaatcgcagcgttccgtcgctggacgaacttttgggcaagggaaagggagcaaaaaagtactctgaaattccgcccgaaaggctgaaagattacagcgcttataacgtcaaagccatttttgacatatggccgatgcagaaaaaagttcttcaggaaaaccggcaggaggagctttttaatgacatagagcttcctcttataaccgtacttgccagtatggaataccacggtttcaaagttgacgccgcaaaacttcacgaatacggcgaagttcttctgtcacgcataaaagacctggaaaaggtaatttacatgctggccggtgaagaattcaacatcaattcaacgaagcagcttggtaccatattattcgaaaaactgaagcttcccgttgtaaaaagtacaaagaccggatactccaccgacgtcgaggttcttgaagagctttattacaagcatgatataataccatgcataatagaataccgccagcttacaaaactttacaccacctacgccgaaggtcttgaaaaagtgataaatcctgtaaccggtaaaattcattcaagttttaaccagacggttacggctacaggccgcatcagcagtaccgaaccaaatttacagaatatcccagtcagacacgaaatgggaagggaaatacggaaagcttttattccgtcgtcggaaaacgctgtttttgttgatgccgattattcacagatagagcttcgcgtgcttgcccatataacaggcgatgaagccctgataaatgctttcgttaagggggaagatattcatacggccacggcgtcgctggtatttgacgtagctcccgaagatgtgacgccggaactgcgcagaaaggcaaaagccgtaaatttcggcatagtgtacgggatcagtgattacgggctggcacgggatttgggaattacccggaaggaagcaaagcggtatatagacgactattttgccaaataccccaaagtaaaaacctatgtggatgaaattgtgcgggtcggccaggaacaggggtatgtggaaactctgttccacagaagaagataccttcccgagcatgcatctaaaaattttcaccagcgttctttcggaaaaagggttgcaatgaatacgcccatacagggcactgcagccgatattattaaaattgcgatggtgaaggtatacaaggctttgaaagaatccggccttaaatccaggcttatcctccaggtccatgacgaacttgttattgagacttttgaagacgaactggagactgtcaaggaacttgtcaaaaagtgcatggaagaggccgttgaattgagtgtgccgcttgttgtcgacgtttcaatcgggaaaaactggtatgaagcctcctgatatggatcc

SEQ ID NO: 225 - DNA, 2772 bp, Artificial Sequence
  Description of Artificial Sequence: Synthetic Clostridium stercorarium DNA Polymerase L820I
atgaaatacctgctgccgaccgctgctgctggtctgctgctcctcgctgcccagccggcgatggccatggatccaaaaataatccttatagacggaaacagtattttaaaccgcggtttttatgccctgtcggggcgatccatgctgactacgtccacaggtctgtataccaatgcggttttcgcttttgtaaatatattgaacaaatatatcgaagaggaaaaccctgattatattgccgttgctttcgatcttagggcaaaaactttccggcacggtctatatgagggatacaaagcgcagcggaaaggcatgcccgatgaacttgcaatgcagatacccctcgcgaaggaagtactgagggcgatgaatattgccataatagagcatgaaggttatgaagccgacgatataatcggcagcctttcgttaaaggccgaaaaagagaattttgacgtaataatccttacgggggacagggattctttccagctgatcagcgacagggtgaaagttatcctgccttcgacgaaagccggaaaaacagagaccaacgtatatgataaacaggccatcattgacaaatacggagttttaccccatcagcttattgacgttaaaggcttaatgggagattcgtcagataatatacccggcgttccgggagtgggtgagaaaacggcgttaagccttatttcagcctacggtacactggaaggtgtttacgagcatattgatgaaataaaacagcctaagctgaaagcatcgctgattgaatataaggatcaggcgtttttaagccgtaagctgggtactattgtaagaaatctggagctgtgtgcttcgctggaggatctgaaaagaaaagaaataaaccgcaaagagcttttgaatgttttcagaaaactcgaatttgaaagtatcatatcaaaaatgaatcttgcttccgctgaggtgacagaattacctcccgcgccggaagagcttaaaataacccatatttcagcggcagaggatcttaagaaatggattgcttacctgcttaaccagaaaaacatttccgtccttcaactgattgaccgggaggattcatacagttcccgtctttcagggctggctttgtgcaccggggatgaggttttttatatcgagaccgggactgcactccccgagaatttgattgcaacagagctgaaagaactgtggcagaatgaaaatattcacaaaatcggacacaatataaaagaatttataacctggctgctgaaacacgatgttgaactgaacggcctttatttcgacactatgattgccgaatacctgatagattccataagaaacggctatcctatagcaagcctttctcacaaatacctgaatcgcagcgttccgtcgctggacgaacttttgggcaagggaaagggagcaaaaaagtactctgaaattccgcccgaaaggctgaaagattacagcgcttataacgtcaaagccatttttgacatatggccgatgcagaaaaaagttcttcaggaaaaccggcaggaggagctttttaatgacatagagcttcctcttataaccgtacttgccagtatggaataccacggtttcaaagttgacgccgcaaaacttcacgaatacggcgaagttcttctgtcacgcataaaagacctggaaaaggtaatttacatgctggccggtgaagaattcaacatcaattcaacgaagcagcttggtaccatattattcgaaaaactgaagcttcccgttgtaaaaagtacaaagaccggatactccaccgacgtcgaggttcttgaagagctttattacaagcatgatataataccatgcataatagaataccgccagcttacaaaactttacaccacctacgccgaaggtcttgaaaaagtgataaatcctgtaaccggtaaaattcattcaagttttaaccagacggttacggctacaggccgcatcagcagtaccgaaccaaatttacagaatatcccagtcagacacgaaatgggaagggaaatacggaaagcttttattccgtcgtcggaaaacgctgtttttgttgatgccgattattcacagatagagcttcgcgtgcttgcccatataacaggcgatgaagccctgataaatgctttcgttaagggggaagatattcatacggccacggcgtcgctggtatttgacgtagctcccgaagatgtgacgccggaactgcgcagaaaggcaaaagccgtaaatttcggcatagtgtacgggatcagtgattacgggctggcacgggatttgggaattacccggaaggaagcaaagcggtatatagacgactattttgccaaataccccaaagtaaaaacctatgtggatgaaattgtgcgggtcggccaggaacaggggtatgtggaaactctgttccacagaagaagataccttcccgagattgcatctaaaaattttcaccagcgttctttcggaaaaagggttgcaatgaatacgcccatacagggcactgcagccgatattattaaaattgcgatggtgaaggtatacaaggctttgaaagaatccggccttaaatccaggcttatcctccaggtccatgacgaacttgttattgagacttttgaagacgaactggagactgtcaaggaacttgtcaaaaagtgcatggaagaggccgttgaattgagtgtgccgcttgttgtcgacgtttcaatcgggaaaaactggtatgaagcctcctgatatggatcc

SEQ ID NO: 226 - DNA, 2772 bp, Artificial Sequence
  Description of Artificial Sequence: Synthetic Clostridium stercorarium DNA Polymerase L820K
atgaaatacctgctgccgaccgctgctgctggtctgctgctcctcgctgcccagccggcgatggccatggatccaaaaataatccttatagacggaaacagtattttaaaccgcggtttttatgccctgtcggggcgatccatgctgactacgtccacaggtctgtataccaatgcggttttcgcttttgtaaatatattgaacaaatatatcgaagaggaaaaccctgattatattgccgttgctttcgatcttagggcaaaaactttccggcacggtctatatgagggatacaaagcgcagcggaaaggcatgcccgatgaacttgcaatgcagatacccctcgcgaaggaagtactgagggcgatgaatattgccataatagagcatgaaggttatgaagccgacgatataatcggcagcctttcgttaaaggccgaaaaagagaattttgacgtaataatccttacgggggacagggattctttccagctgatcagcgacagggtgaaagttatcctgccttcgacgaaagccggaaaaacagagaccaacgtatatgataaacaggccatcattgacaaatacggagttttaccccatcagcttattgacgttaaaggcttaatgggagattcgtcagataatatacccggcgttccgggagtgggtgagaaaacggcgttaagccttatttcagcctacggtacactggaaggtgtttacgagcatattgatgaaataaaacagcctaagctgaaagcatcgctgattgaatataaggatcaggcgtttttaagccgtaagctgggtactattgtaagaaatctggagctgtgtgcttcgctggaggatctgaaaagaaaagaaataaaccgcaaagagcttttgaatgttttcagaaaactcgaatttgaaagtatcatatcaaaaatgaatcttgcttccgctgaggtgacagaattacctcccgcgccggaagagcttaaaataacccatatttcagcggcagaggatcttaagaaatggattgcttacctgcttaaccagaaaaacatttccgtccttcaactgattgaccgggaggattcatacagttcccgtctttcagggctggctttgtgcaccggggatgaggttttttatatcgagaccgggactgcactccccgagaatttgattgcaacagagctgaaagaactgtggcagaatgaaaatattcacaaaatcggacacaatataaaagaatttataacctggctgctgaaacacgatgttgaactgaacggcctttatttcgacactatgattgccgaatacctgatagattccataagaaacggctatcctatagcaagcctttctcacaaatacctgaatcgcagcgttccgtcgctggacgaacttttgggcaagggaaagggagcaaaaaagtactctgaaattccgcccgaaaggctgaaagattacagcgcttataacgtcaaagccatttttgacatatggccgatgcagaaaaaagttcttcaggaaaaccggcaggaggagctttttaatgacatagagcttcctcttataaccgtacttgccagtatggaataccacggtttcaaagttgacgccgcaaaacttcacgaatacggcgaagttcttctgtcacgcataaaagacctggaaaaggtaatttacatgctggccggtgaagaattcaacatcaattcaacgaagcagcttggtaccatattattcgaaaaactgaagcttcccgttgtaaaaagtacaaagaccggatactccaccgacgtcgaggttcttgaagagctttattacaagcatgatataataccatgcataatagaataccgccagcttacaaaactttacaccacctacgccgaaggtcttgaaaaagtgataaatcctgtaaccggtaaaattcattcaagttttaaccagacggttacggctacaggccgcatcagcagtaccgaaccaaatttacagaatatcccagtcagacacgaaatgggaagggaaatacggaaagcttttattccgtcgtcggaaaacgctgtttttgttgatgccgattattcacagatagagcttcgcgtgcttgcccatataacaggcgatgaagccctgataaatgctttcgttaagggggaagatattcatacggccacggcgtcgctggtatttgacgtagctcccgaagatgtgacgccggaactgcgcagaaaggcaaaagccgtaaatttcggcatagtgtacgggatcagtgattacgggctggcacgggatttgggaattacccggaaggaagcaaagcggtatatagacgactattttgccaaataccccaaagtaaaaacctatgtggatgaaattgtgcgggtcggccaggaacaggggtatgtggaaactctgttccacagaagaagataccttcccgagaaagcatctaaaaattttcaccagcgttctttcggaaaaagggttgcaatgaatacgcccatacagggcactgcagccgatattattaaaattgcgatggtgaaggtatacaaggctttgaaagaatccggccttaaatccaggcttatcctccaggtccatgacgaacttgttattgagacttttgaagacgaactggagactgtcaaggaacttgtcaaaaagtgcatggaagaggccgttgaattgagtgtgccgcttgttgtcgacgtttcaatcgggaaaaactggtatgaagcctcctgatatggatcc

SEQ ID NO: 227 - DNA, 2772 bp, Artificial Sequence
  Description of Artificial Sequence: Synthetic Clostridium stercorarium DNA Polymerase L820M
atgaaatacctgctgccgaccgctgctgctggtctgctgctcctcgctgcccagccggcgatggccatggatccaaaaataatccttatagacggaaacagtattttaaaccgcggtttttatgccctgtcggggcgatccatgctgactacgtccacaggtctgtataccaatgcggttttcgcttttgtaaatatattgaacaaatatatcgaagaggaaaaccctgattatattgccgttgctttcgatcttagggcaaaaactttccggcacggtctatatgagggatacaaagcgcagcggaaaggcatgcccgatgaacttgcaatgcagatacccctcgcgaaggaagtactgagggcgatgaatattgccataatagagcatgaaggttatgaagccgacgatataatcggcagcctttcgttaaaggccgaaaaagagaattttgacgtaataatccttacgggggacagggattctttccagctgatcagcgacagggtgaaagttatcctgccttcgacgaaagccggaaaaacagagaccaacgtatatgataaacaggccatcattgacaaatacggagttttaccccatcagcttattgacgttaaaggcttaatgggagattcgtcagataatatacccggcgttccgggagtgggtgagaaaacggcgttaagccttatttcagcctacggtacactggaaggtgtttacgagcatattgatgaaataaaacagcctaagctgaaagcatcgctgattgaatataaggatcaggcgtttttaagccgtaagctgggtactattgtaagaaatctggagctgtgtgcttcgctggaggatctgaaaagaaaagaaataaaccgcaaagagcttttgaatgttttcagaaaactcgaatttgaaagtatcatatcaaaaatgaatcttgcttccgctgaggtgacagaattacctcccgcgccggaagagcttaaaataacccatatttcagcggcagaggatcttaagaaatggattgcttacctgcttaaccagaaaaacatttccgtccttcaactgattgaccgggaggattcatacagttcccgtctttcagggctggctttgtgcaccggggatgaggttttttatatcgagaccgggactgcactccccgagaatttgattgcaacagagctgaaagaactgtggcagaatgaaaatattcacaaaatcggacacaatataaaagaatttataacctggctgctgaaacacgatgttgaactgaacggcctttatttcgacactatgattgccgaatacctgatagattccataagaaacggctatcctatagcaagcctttctcacaaatacctgaatcgcagcgttccgtcgctggacgaacttttgggcaagggaaagggagcaaaaaagtactctgaaattccgcccgaaaggctgaaagattacagcgcttataacgtcaaagccatttttgacatatggccgatgcagaaaaaagttcttcaggaaaaccggcaggaggagctttttaatgacatagagcttcctcttataaccgtacttgccagtatggaataccacggtttcaaagttgacgccgcaaaacttcacgaatacggcgaagttcttctgtcacgcataaaagacctggaaaaggtaatttacatgctggccggtgaagaattcaacatcaattcaacgaagcagcttggtaccatattattcgaaaaactgaagcttcccgttgtaaaaagtacaaagaccggatactccaccgacgtcgaggttcttgaagagctttattacaagcatgatataataccatgcataatagaataccgccagcttacaaaactttacaccacctacgccgaaggtcttgaaaaagtgataaatcctgtaaccggtaaaattcattcaagttttaaccagacggttacggctacaggccgcatcagcagtaccgaaccaaatttacagaatatcccagtcagacacgaaatgggaagggaaatacggaaagcttttattccgtcgtcggaaaacgctgtttttgttgatgccgattattcacagatagagcttcgcgtgcttgcccatataacaggcgatgaagccctgataaatgctttcgttaagggggaagatattcatacggccacggcgtcgctggtatttgacgtagctcccgaagatgtgacgccggaactgcgcagaaaggcaaaagccgtaaatttcggcatagtgtacgggatcagtgattacgggctggcacgggatttgggaattacccggaaggaagcaaagcggtatatagacgactattttgccaaataccccaaagtaaaaacctatgtggatgaaattgtgcgggtcggccaggaacaggggtatgtggaaactctgttccacagaagaagataccttcccgagatggcatctaaaaattttcaccagcgttctttcggaaaaagggttgcaatgaatacgcccatacagggcactgcagccgatattattaaaattgcgatggtgaaggtatacaaggctttgaaagaatccggccttaaatccaggcttatcctccaggtccatgacgaacttgttattgagacttttgaagacgaactggagactgtcaaggaacttgtcaaaaagtgcatggaagaggccgttgaattgagtgtgccgcttgttgtcgacgtttcaatcgggaaaaactggtatgaagcctcctgatatggatcc

SEQ ID NO: 228 - DNA, 2772 bp, Artificial Sequence
  Description of Artificial Sequence: Synthetic Clostridium stercorarium DNA Polymerase L820F
atgaaatacctgctgccgaccgctgctgctggtctgctgctcctcgctgcccagccggcgatggccatggatccaaaaataatccttatagacggaaacagtattttaaaccgcggtttttatgccctgtcggggcgatccatgctgactacgtccacaggtctgtataccaatgcggttttcgcttttgtaaatatattgaacaaatatatcgaagaggaaaaccctgattatattgccgttgctttcgatcttagggcaaaaactttccggcacggtctatatgagggatacaaagcgcagcggaaaggcatgcccgatgaacttgcaatgcagatacccctcgcgaaggaagtactgagggcgatgaatattgccataatagagcatgaaggttatgaagccgacgatataatcggcagcctttcgttaaaggccgaaaaagagaattttgacgtaataatccttacgggggacagggattctttccagctgatcagcgacagggtgaaagttatcctgccttcgacgaaagccggaaaaacagagaccaacgtatatgataaacaggccatcattgacaaatacggagttttaccccatcagcttattgacgttaaaggcttaatgggagattcgtcagataatatacccggcgttccgggagtgggtgagaaaacggcgttaagccttatttcagcctacggtacactggaaggtgtttacgagcatattgatgaaataaaacagcctaagctgaaagcatcgctgattgaatataaggatcaggcgtttttaagccgtaagctgggtactattgtaagaaatctggagctgtgtgcttcgctggaggatctgaaaagaaaagaaataaaccgcaaagagcttttgaatgttttcagaaaactcgaatttgaaagtatcatatcaaaaatgaatcttgcttccgctgaggtgacagaattacctcccgcgccggaagagcttaaaataacccatatttcagcggcagaggatcttaagaaatggattgcttacctgcttaaccagaaaaacatttccgtccttcaactgattgaccgggaggattcatacagttcccgtctttcagggctggctttgtgcaccggggatgaggttttttatatcgagaccgggactgcactccccgagaatttgattgcaacagagctgaaagaactgtggcagaatgaaaatattcacaaaatcggacacaatataaaagaatttataacctggctgctgaaacacgatgttgaactgaacggcctttatttcgacactatgattgccgaatacctgatagattccataagaaacggctatcctatagcaagcctttctcacaaatacctgaatcgcagcgttccgtcgctggacgaacttttgggcaagggaaagggagcaaaaaagtactctgaaattccgcccgaaaggctgaaagattacagcgcttataacgtcaaagccatttttgacatatggccgatgcagaaaaaagttcttcaggaaaaccggcaggaggagctttttaatgacatagagcttcctcttataaccgtacttgccagtatggaataccacggtttcaaagttgacgccgcaaaacttcacgaatacggcgaagttcttctgtcacgcataaaagacctggaaaaggtaatttacatgctggccggtgaagaattcaacatcaattcaacgaagcagcttggtaccatattattcgaaaaactgaagcttcccgttgtaaaaagtacaaagaccggatactccaccgacgtcgaggttcttgaagagctttattacaagcatgatataataccatgcataatagaataccgccagcttacaaaactttacaccacctacgccgaaggtcttgaaaaagtgataaatcctgtaaccggtaaaattcattcaagttttaaccagacggttacggctacaggccgcatcagcagtaccgaaccaaatttacagaatatcccagtcagacacgaaatgggaagggaaatacggaaagcttttattccgtcgtcggaaaacgctgtttttgttgatgccgattattcacagatagagcttcgcgtgcttgcccatataacaggcgatgaagccctgataaatgctttcgttaagggggaagatattcatacggccacggcgtcgctggtatttgacgtagctcccgaagatgtgacgccggaactgcgcagaaaggcaaaagccgtaaatttcggcatagtgtacgggatcagtgattacgggctggcacgggatttgggaattacccggaaggaagcaaagcggtatatagacgactattttgccaaataccccaaagtaaaaacctatgtggatgaaattgtgcgggtcggccaggaacaggggtatgtggaaactctgttccacagaagaagataccttcccgagtttgcatctaaaaattttcaccagcgttctttcggaaaaagggttgcaatgaatacgcccatacagggcactgcagccgatattattaaaattgcgatggtgaaggtatacaaggctttgaaagaatccggccttaaatccaggcttatcctccaggtccatgacgaacttgttattgagacttttgaagacgaactggagactgtcaaggaacttgtcaaaaagtgcatggaagaggccgttgaattgagtgtgccgcttgttgtcgacgtttcaatcgggaaaaactggtatgaagcctcctgatatggatcc

SEQ ID NO: 229 - DNA, 2772 bp, Artificial Sequence
  Description of Artificial Sequence: Synthetic Clostridium stercorarium DNA Polymerase L820P
atgaaatacctgctgccgaccgctgctgctggtctgctgctcctcgctgcccagccggcgatggccatggatccaaaaataatccttatagacggaaacagtattttaaaccgcggtttttatgccctgtcggggcgatccatgctgactacgtccacaggtctgtataccaatgcggttttcgcttttgtaaatatattgaacaaatatatcgaagaggaaaaccctgattatattgccgttgctttcgatcttagggcaaaaactttccggcacggtctatatgagggatacaaagcgcagcggaaaggcatgcccgatgaacttgcaatgcagatacccctcgcgaaggaagtactgagggcgatgaatattgccataatagagcatgaaggttatgaagccgacgatataatcggcagcctttcgttaaaggccgaaaaagagaattttgacgtaataatccttacgggggacagggattctttccagctgatcagcgacagggtgaaagttatcctgccttcgacgaaagccggaaaaacagagaccaacgtatatgataaacaggccatcattgacaaatacggagttttaccccatcagcttattgacgttaaaggcttaatgggagattcgtcagataatatacccggcgttccgggagtgggtgagaaaacggcgttaagccttatttcagcctacggtacactggaaggtgtttacgagcatattgatgaaataaaacagcctaagctgaaagcatcgctgattgaatataaggatcaggcgtttttaagccgtaagctgggtactattgtaagaaatctggagctgtgtgcttcgctggaggatctgaaaagaaaagaaataaaccgcaaagagcttttgaatgttttcagaaaactcgaatttgaaagtatcatatcaaaaatgaatcttgcttccgctgaggtgacagaattacctcccgcgccggaagagcttaaaataacccatatttcagcggcagaggatcttaagaaatggattgcttacctgcttaaccagaaaaacatttccgtccttcaactgattgaccgggaggattcatacagttcccgtctttcagggctggctttgtgcaccggggatgaggttttttatatcgagaccgggactgcactccccgagaatttgattgcaacagagctgaaagaactgtggcagaatgaaaatattcacaaaatcggacacaatataaaagaatttataacctggctgctgaaacacgatgttgaactgaacggcctttatttcgacactatgattgccgaatacctgatagattccataagaaacggctatcctatagcaagcctttctcacaaatacctgaatcgcagcgttccgtcgctggacgaacttttgggcaagggaaagggagcaaaaaagtactctgaaattccgcccgaaaggctgaaagattacagcgcttataacgtcaaagccatttttgacatatggccgatgcagaaaaaagttcttcaggaaaaccggcaggaggagctttttaatgacatagagcttcctcttataaccgtacttgccagtatggaataccacggtttcaaagttgacgccgcaaaacttcacgaatacggcgaagttcttctgtcacgcataaaagacctggaaaaggtaatttacatgctggccggtgaagaattcaacatcaattcaacgaagcagcttggtaccatattattcgaaaaactgaagcttcccgttgtaaaaagtacaaagaccggatactccaccgacgtcgaggttcttgaagagctttattacaagcatgatataataccatgcataatagaataccgccagcttacaaaactttacaccacctacgccgaaggtcttgaaaaagtgataaatcctgtaaccggtaaaattcattcaagttttaaccagacggttacggctacaggccgcatcagcagtaccgaaccaaatttacagaatatcccagtcagacacgaaatgggaagggaaatacggaaagcttttattccgtcgtcggaaaacgctgtttttgttgatgccgattattcacagatagagcttcgcgtgcttgcccatataacaggcgatgaagccctgataaatgctttcgttaagggggaagatattcatacggccacggcgtcgctggtatttgacgtagctcccgaagatgtgacgccggaactgcgcagaaaggcaaaagccgtaaatttcggcatagtgtacgggatcagtgattacgggctggcacgggatttgggaattacccggaaggaagcaaagcggtatatagacgactattttgccaaataccccaaagtaaaaacctatgtggatgaaattgtgcgggtcggccaggaacaggggtatgtggaaactctgttccacagaagaagataccttcccgagcctgcatctaaaaattttcaccagcgttctttcggaaaaagggttgcaatgaatacgcccatacagggcactgcagccgatattattaaaattgcgatggtgaaggtatacaaggctttgaaagaatccggccttaaatccaggcttatcctccaggtccatgacgaacttgttattgagacttttgaagacgaactggagactgtcaaggaacttgtcaaaaagtgcatggaagaggccgttgaattgagtgtgccgcttgttgtcgacgtttcaatcgggaaaaactggtatgaagcctcctgatatggatcc

SEQ ID NO: 230 - DNA, 2772 bp, Artificial Sequence
  Description of Artificial Sequence: Synthetic Clostridium stercorarium DNA Polymerase L820S
atgaaatacctgctgccgaccgctgctgctggtctgctgctcctcgctgcccagccggcgatggccatggatccaaaaataatccttatagacggaaacagtattttaaaccgcggtttttatgccctgtcggggcgatccatgctgactacgtccacaggtctgtataccaatgcggttttcgcttttgtaaatatattgaacaaatatatcgaagaggaaaaccctgattatattgccgttgctttcgatcttagggcaaaaactttccggcacggtctatatgagggatacaaagcgcagcggaaaggcatgcccgatgaacttgcaatgcagatacccctcgcgaaggaagtactgagggcgatgaatattgccataatagagcatgaaggttatgaagccgacgatataatcggcagcctttcgttaaaggccgaaaaagagaattttgacgtaataatccttacgggggacagggattctttccagctgatcagcgacagggtgaaagttatcctgccttcgacgaaagccggaaaaacagagaccaacgtatatgataaacaggccatcattgacaaatacggagttttaccccatcagcttattgacgttaaaggcttaatgggagattcgtcagataatatacccggcgttccgggagtgggtgagaaaacggcgttaagccttatttcagcctacggtacactggaaggtgtttacgagcatattgatgaaataaaacagcctaagctgaaagcatcgctgattgaatataaggatcaggcgtttttaagccgtaagctgggtactattgtaagaaatctggagctgtgtgcttcgctggaggatctgaaaagaaaagaaataaaccgcaaagagcttttgaatgttttcagaaaactcgaatttgaaagtatcatatcaaaaatgaatcttgcttccgctgaggtgacagaattacctcccgcgccggaagagcttaaaataacccatatttcagcggcagaggatcttaagaaatggattgcttacctgcttaaccagaaaaacatttccgtccttcaactgattgaccgggaggattcatacagttcccgtctttcagggctggctttgtgcaccggggatgaggttttttatatcgagaccgggactgcactccccgagaatttgattgcaacagagctgaaagaactgtggcagaatgaaaatattcacaaaatcggacacaatataaaagaatttataacctggctgctgaaacacgatgttgaactgaacggcctttatttcgacactatgattgccgaatacctgatagattccataagaaacggctatcctatagcaagcctttctcacaaatacctgaatcgcagcgttccgtcgctggacgaacttttgggcaagggaaagggagcaaaaaagtactctgaaattccgcccgaaaggctgaaagattacagcgcttataacgtcaaagccatttttgacatatggccgatgcagaaaaaagttcttcaggaaaaccggcaggaggagctttttaatgacatagagcttcctcttataaccgtacttgccagtatggaataccacggtttcaaagttgacgccgcaaaacttcacgaatacggcgaagttcttctgtcacgcataaaagacctggaaaaggtaatttacatgctggccggtgaagaattcaacatcaattcaacgaagcagcttggtaccatattattcgaaaaactgaagcttcccgttgtaaaaagtacaaagaccggatactccaccgacgtcgaggttcttgaagagctttattacaagcatgatataataccatgcataatagaataccgccagcttacaaaactttacaccacctacgccgaaggtcttgaaaaagtgataaatcctgtaaccggtaaaattcattcaagttttaaccagacggttacggctacaggccgcatcagcagtaccgaaccaaatttacagaatatcccagtcagacacgaaatgggaagggaaatacggaaagcttttattccgtcgtcggaaaacgctgtttttgttgatgccgattattcacagatagagcttcgcgtgcttgcccatataacaggcgatgaagccctgataaatgctttcgttaagggggaagatattcatacggccacggcgtcgctggtatttgacgtagctcccgaagatgtgacgccggaactgcgcagaaaggcaaaagccgtaaatttcggcatagtgtacgggatcagtgattacgggctggcacgggatttgggaattacccggaaggaagcaaagcggtatatagacgactattttgccaaataccccaaagtaaaaacctatgtggatgaaattgtgcgggtcggccaggaacaggggtatgtggaaactctgttccacagaagaagataccttcccgagtctgcatctaaaaattttcaccagcgttctttcggaaaaagggttgcaatgaatacgcccatacagggcactgcagccgatattattaaaattgcgatggtgaaggtatacaaggctttgaaagaatccggccttaaatccaggcttatcctccaggtccatgacgaacttgttattgagacttttgaagacgaactggagactgtcaaggaacttgtcaaaaagtgcatggaagaggccgttgaattgagtgtgccgcttgttgtcgacgtttcaatcgggaaaaactggtatgaagcctcctgatatggatcc

SEQ ID NO: 231 - DNA, 2772 bp, Artificial Sequence
  Description of Artificial Sequence: Synthetic Clostridium stercorarium DNA Polymerase L820T
atgaaatacctgctgccgaccgctgctgctggtctgctgctcctcgctgcccagccggcgatggccatggatccaaaaataatccttatagacggaaacagtattttaaaccgcggtttttatgccctgtcggggcgatccatgctgactacgtccacaggtctgtataccaatgcggttttcgcttttgtaaatatattgaacaaatatatcgaagaggaaaaccctgattatattgccgttgctttcgatcttagggcaaaaactttccggcacggtctatatgagggatacaaagcgcagcggaaaggcatgcccgatgaacttgcaatgcagatacccctcgcgaaggaagtactgagggcgatgaatattgccataatagagcatgaaggttatgaagccgacgatataatcggcagcctttcgttaaaggccgaaaaagagaattttgacgtaataatccttacgggggacagggattctttccagctgatcagcgacagggtgaaagttatcctgccttcgacgaaagccggaaaaacagagaccaacgtatatgataaacaggccatcattgacaaatacggagttttaccccatcagcttattgacgttaaaggcttaatgggagattcgtcagataatatacccggcgttccgggagtgggtgagaaaacggcgttaagccttatttcagcctacggtacactggaaggtgtttacgagcatattgatgaaataaaacagcctaagctgaaagcatcgctgattgaatataaggatcaggcgtttttaagccgtaagctgggtactattgtaagaaatctggagctgtgtgcttcgctggaggatctgaaaagaaaagaaataaaccgcaaagagcttttgaatgttttcagaaaactcgaatttgaaagtatcatatcaaaaatgaatcttgcttccgctgaggtgacagaattacctcccgcgccggaagagcttaaaataacccatatttcagcggcagaggatcttaagaaatggattgcttacctgcttaaccagaaaaacatttccgtccttcaactgattgaccgggaggattcatacagttcccgtctttcagggctggctttgtgcaccggggatgaggttttttatatcgagaccgggactgcactccccgagaatttgattgcaacagagctgaaagaactgtggcagaatgaaaatattcacaaaatcggacacaatataaaagaatttataacctggctgctgaaacacgatgttgaactgaacggcctttatttcgacactatgattgccgaatacctgatagattccataagaaacggctatcctatagcaagcctttctcacaaatacctgaatcgcagcgttccgtcgctggacgaacttttgggcaagggaaagggagcaaaaaagtactctgaaattccgcccgaaaggctgaaagattacagcgcttataacgtcaaagccatttttgacatatggccgatgcagaaaaaagttcttcaggaaaaccggcaggaggagctttttaatgacatagagcttcctcttataaccgtacttgccagtatggaataccacggtttcaaagttgacgccgcaaaacttcacgaatacggcgaagttcttctgtcacgcataaaagacctggaaaaggtaatttacatgctggccggtgaagaattcaacatcaattcaacgaagcagcttggtaccatattattcgaaaaactgaagcttcccgttgtaaaaagtacaaagaccggatactccaccgacgtcgaggttcttgaagagctttattacaagcatgatataataccatgcataatagaataccgccagcttacaaaactttacaccacctacgccgaaggtcttgaaaaagtgataaatcctgtaaccggtaaaattcattcaagttttaaccagacggttacggctacaggccgcatcagcagtaccgaaccaaatttacagaatatcccagtcagacacgaaatgggaagggaaatacggaaagcttttattccgtcgtcggaaaacgctgtttttgttgatgccgattattcacagatagagcttcgcgtgcttgcccatataacaggcgatgaagccctgataaatgctttcgttaagggggaagatattcatacggccacggcgtcgctggtatttgacgtagctcccgaagatgtgacgccggaactgcgcagaaaggcaaaagccgtaaatttcggcatagtgtacgggatcagtgattacgggctggcacgggatttgggaattacccggaaggaagcaaagcggtatatagacgactattttgccaaataccccaaagtaaaaacctatgtggatgaaattgtgcgggtcggccaggaacaggggtatgtggaaactctgttccacagaagaagataccttcccgagactgcatctaaaaattttcaccagcgttctttcggaaaaagggttgcaatgaatacgcccatacagggcactgcagccgatattattaaaattgcgatggtgaaggtatacaaggctttgaaagaatccggccttaaatccaggcttatcctccaggtccatgacgaacttgttattgagacttttgaagacgaactggagactgtcaaggaacttgtcaaaaagtgcatggaagaggccgttgaattgagtgtgccgcttgttgtcgacgtttcaatcgggaaaaactggtatgaagcctcctgatatggatcc

SEQ ID NO: 232 - DNA, 2772 bp, Artificial Sequence
  Description of Artificial Sequence: Synthetic Clostridium stercorarium DNA Polymerase L820W
atgaaatacctgctgccgaccgctgctgctggtctgctgctcctcgctgcccagccggcgatggccatggatccaaaaataatccttatagacggaaacagtattttaaaccgcggtttttatgccctgtcggggcgatccatgctgactacgtccacaggtctgtataccaatgcggttttcgcttttgtaaatatattgaacaaatatatcgaagaggaaaaccctgattatattgccgttgctttcgatcttagggcaaaaactttccggcacggtctatatgagggatacaaagcgcagcggaaaggcatgcccgatgaacttgcaatgcagatacccctcgcgaaggaagtactgagggcgatgaatattgccataatagagcatgaaggttatgaagccgacgatataatcggcagcctttcgttaaaggccgaaaaagagaattttgacgtaataatccttacgggggacagggattctttccagctgatcagcgacagggtgaaagttatcctgccttcgacgaaagccggaaaaacagagaccaacgtatatgataaacaggccatcattgacaaatacggagttttaccccatcagcttattgacgttaaaggcttaatgggagattcgtcagataatatacccggcgttccgggagtgggtgagaaaacggcgttaagccttatttcagcctacggtacactggaaggtgtttacgagcatattgatgaaataaaacagcctaagctgaaagcatcgctgattgaatataaggatcaggcgtttttaagccgtaagctgggtactattgtaagaaatctggagctgtgtgcttcgctggaggatctgaaaagaaaagaaataaaccgcaaagagcttttgaatgttttcagaaaactcgaatttgaaagtatcatatcaaaaatgaatcttgcttccgctgaggtgacagaattacctcccgcgccggaagagcttaaaataacccatatttcagcggcagaggatcttaagaaatggattgcttacctgcttaaccagaaaaacatttccgtccttcaactgattgaccgggaggattcatacagttcccgtctttcagggctggctttgtgcaccggggatgaggttttttatatcgagaccgggactgcactccccgagaatttgattgcaacagagctgaaagaactgtggcagaatgaaaatattcacaaaatcggacacaatataaaagaatttataacctggctgctgaaacacgatgttgaactgaacggcctttatttcgacactatgattgccgaatacctgatagattccataagaaacggctatcctatagcaagcctttctcacaaatacctgaatcgcagcgttccgtcgctggacgaacttttgggcaagggaaagggagcaaaaaagtactctgaaattccgcccgaaaggctgaaagattacagcgcttataacgtcaaagccatttttgacatatggccgatgcagaaaaaagttcttcaggaaaaccggcaggaggagctttttaatgacatagagcttcctcttataaccgtacttgccagtatggaataccacggtttcaaagttgacgccgcaaaacttcacgaatacggcgaagttcttctgtcacgcataaaagacctggaaaaggtaatttacatgctggccggtgaagaattcaacatcaattcaacgaagcagcttggtaccatattattcgaaaaactgaagcttcccgttgtaaaaagtacaaagaccggatactccaccgacgtcgaggttcttgaagagctttattacaagcatgatataataccatgcataatagaataccgccagcttacaaaactttacaccacctacgccgaaggtcttgaaaaagtgataaatcctgtaaccggtaaaattcattcaagttttaaccagacggttacggctacaggccgcatcagcagtaccgaaccaaatttacagaatatcccagtcagacacgaaatgggaagggaaatacggaaagcttttattccgtcgtcggaaaacgctgtttttgttgatgccgattattcacagatagagcttcgcgtgcttgcccatataacaggcgatgaagccctgataaatgctttcgttaagggggaagatattcatacggccacggcgtcgctggtatttgacgtagctcccgaagatgtgacgccggaactgcgcagaaaggcaaaagccgtaaatttcggcatagtgtacgggatcagtgattacgggctggcacgggatttgggaattacccggaaggaagcaaagcggtatatagacgactattttgccaaataccccaaagtaaaaacctatgtggatgaaattgtgcgggtcggccaggaacaggggtatgtggaaactctgttccacagaagaagataccttcccgagtgggcatctaaaaattttcaccagcgttctttcggaaaaagggttgcaatgaatacgcccatacagggcactgcagccgatattattaaaattgcgatggtgaaggtatacaaggctttgaaagaatccggccttaaatccaggcttatcctccaggtccatgacgaacttgttattgagacttttgaagacgaactggagactgtcaaggaacttgtcaaaaagtgcatggaagaggccgttgaattgagtgtgccgcttgttgtcgacgtttcaatcgggaaaaactggtatgaagcctcctgatatggatcc

SEQ ID NO: 233 - DNA, 2772 bp, Artificial Sequence
  Description of Artificial Sequence: Synthetic Clostridium stercorarium DNA Polymerase L820Y
atgaaatacctgctgccgaccgctgctgctggtctgctgctcctcgctgcccagccggcgatggccatggatccaaaaataatccttatagacggaaacagtattttaaaccgcggtttttatgccctgtcggggcgatccatgctgactacgtccacaggtctgtataccaatgcggttttcgcttttgtaaatatattgaacaaatatatcgaagaggaaaaccctgattatattgccgttgctttcgatcttagggcaaaaactttccggcacggtctatatgagggatacaaagcgcagcggaaaggcatgcccgatgaacttgcaatgcagatacccctcgcgaaggaagtactgagggcgatgaatattgccataatagagcatgaaggttatgaagccgacgatataatcggcagcctttcgttaaaggccgaaaaagagaattttgacgtaataatccttacgggggacagggattctttccagctgatcagcgacagggtgaaagttatcctgccttcgacgaaagccggaaaaacagagaccaacgtatatgataaacaggccatcattgacaaatacggagttttaccccatcagcttattgacgttaaaggcttaatgggagattcgtcagataatatacccggcgttccgggagtgggtgagaaaacggcgttaagccttatttcagcctacggtacactggaaggtgtttacgagcatattgatgaaataaaacagcctaagctgaaagcatcgctgattgaatataaggatcaggcgtttttaagccgtaagctgggtactattgtaagaaatctggagctgtgtgcttcgctggaggatctgaaaagaaaagaaataaaccgcaaagagcttttgaatgttttcagaaaactcgaatttgaaagtatcatatcaaaaatgaatcttgcttccgctgaggtgacagaattacctcccgcgccggaagagcttaaaataacccatatttcagcggcagaggatcttaagaaatggattgcttacctgcttaaccagaaaaacatttccgtccttcaactgattgaccgggaggattcatacagttcccgtctttcagggctggctttgtgcaccggggatgaggttttttatatcgagaccgggactgcactccccgagaatttgattgcaacagagctgaaagaactgtggcagaatgaaaatattcacaaaatcggacacaatataaaagaatttataacctggctgctgaaacacgatgttgaactgaacggcctttatttcgacactatgattgccgaatacctgatagattccataagaaacggctatcctatagcaagcctttctcacaaatacctgaatcgcagcgttccgtcgctggacgaacttttgggcaagggaaagggagcaaaaaagtactctgaaattccgcccgaaaggctgaaagattacagcgcttataacgtcaaagccatttttgacatatggccgatgcagaaaaaagttcttcaggaaaaccggcaggaggagctttttaatgacatagagcttcctcttataaccgtacttgccagtatggaataccacggtttcaaagttgacgccgcaaaacttcacgaatacggcgaagttcttctgtcacgcataaaagacctggaaaaggtaatttacatgctggccggtgaagaattcaacatcaattcaacgaagcagcttggtaccatattattcgaaaaactgaagcttcccgttgtaaaaagtacaaagaccggatactccaccgacgtcgaggttcttgaagagctttattacaagcatgatataataccatgcataatagaataccgccagcttacaaaactttacaccacctacgccgaaggtcttgaaaaagtgataaatcctgtaaccggtaaaattcattcaagttttaaccagacggttacggctacaggccgcatcagcagtaccgaaccaaatttacagaatatcccagtcagacacgaaatgggaagggaaatacggaaagcttttattccgtcgtcggaaaacgctgtttttgttgatgccgattattcacagatagagcttcgcgtgcttgcccatataacaggcgatgaagccctgataaatgctttcgttaagggggaagatattcatacggccacggcgtcgctggtatttgacgtagctcccgaagatgtgacgccggaactgcgcagaaaggcaaaagccgtaaatttcggcatagtgtacgggatcagtgattacgggctggcacgggatttgggaattacccggaaggaagcaaagcggtatatagacgactattttgccaaataccccaaagtaaaaacctatgtggatgaaattgtgcgggtcggccaggaacaggggtatgtggaaactctgttccacagaagaagataccttcccgagtatgcatctaaaaattttcaccagcgttctttcggaaaaagggttgcaatgaatacgcccatacagggcactgcagccgatattattaaaattgcgatggtgaaggtatacaaggctttgaaagaatccggccttaaatccaggcttatcctccaggtccatgacgaacttgttattgagacttttgaagacgaactggagactgtcaaggaacttgtcaaaaagtgcatggaagaggccgttgaattgagtgtgccgcttgttgtcgacgtttcaatcgggaaaaactggtatgaagcctcctgatatggatcc

SEQ ID NO: 234 - DNA, 2772 bp, Artificial Sequence
  Description of Artificial Sequence: Synthetic Clostridium stercorarium DNA Polymerase L820V
atgaaatacctgctgccgaccgctgctgctggtctgctgctcctcgctgcccagccggcgatggccatggatccaaaaataatccttatagacggaaacagtattttaaaccgcggtttttatgccctgtcggggcgatccatgctgactacgtccacaggtctgtataccaatgcggttttcgcttttgtaaatatattgaacaaatatatcgaagaggaaaaccctgattatattgccgttgctttcgatcttagggcaaaaactttccggcacggtctatatgagggatacaaagcgcagcggaaaggcatgcccgatgaacttgcaatgcagatacccctcgcgaaggaagtactgagggcgatgaatattgccataatagagcatgaaggttatgaagccgacgatataatcggcagcctttcgttaaaggccgaaaaagagaattttgacgtaataatccttacgggggacagggattctttccagctgatcagcgacagggtgaaagttatcctgccttcgacgaaagccggaaaaacagagaccaacgtatatgataaacaggccatcattgacaaatacggagttttaccccatcagcttattgacgttaaaggcttaatgggagattcgtcagataatatacccggcgttccgggagtgggtgagaaaacggcgttaagccttatttcagcctacggtacactggaaggtgtttacgagcatattgatgaaataaaacagcctaagctgaaagcatcgctgattgaatataaggatcaggcgtttttaagccgtaagctgggtactattgtaagaaatctggagctgtgtgcttcgctggaggatctgaaaagaaaagaaataaaccgcaaagagcttttgaatgttttcagaaaactcgaatttgaaagtatcatatcaaaaatgaatcttgcttccgctgaggtgacagaattacctcccgcgccggaagagcttaaaataacccatatttcagcggcagaggatcttaagaaatggattgcttacctgcttaaccagaaaaacatttccgtccttcaactgattgaccgggaggattcatacagttcccgtctttcagggctggctttgtgcaccggggatgaggttttttatatcgagaccgggactgcactccccgagaatttgattgcaacagagctgaaagaactgtggcagaatgaaaatattcacaaaatcggacacaatataaaagaatttataacctggctgctgaaacacgatgttgaactgaacggcctttatttcgacactatgattgccgaatacctgatagattccataagaaacggctatcctatagcaagcctttctcacaaatacctgaatcgcagcgttccgtcgctggacgaacttttgggcaagggaaagggagcaaaaaagtactctgaaattccgcccgaaaggctgaaagattacagcgcttataacgtcaaagccatttttgacatatggccgatgcagaaaaaagttcttcaggaaaaccggcaggaggagctttttaatgacatagagcttcctcttataaccgtacttgccagtatggaataccacggtttcaaagttgacgccgcaaaacttcacgaatacggcgaagttcttctgtcacgcataaaagacctggaaaaggtaatttacatgctggccggtgaagaattcaacatcaattcaacgaagcagcttggtaccatattattcgaaaaactgaagcttcccgttgtaaaaagtacaaagaccggatactccaccgacgtcgaggttcttgaagagctttattacaagcatgatataataccatgcataatagaataccgccagcttacaaaactttacaccacctacgccgaaggtcttgaaaaagtgataaatcctgtaaccggtaaaattcattcaagttttaaccagacggttacggctacaggccgcatcagcagtaccgaaccaaatttacagaatatcccagtcagacacgaaatgggaagggaaatacggaaagcttttattccgtcgtcggaaaacgctgtttttgttgatgccgattattcacagatagagcttcgcgtgcttgcccatataacaggcgatgaagccctgataaatgctttcgttaagggggaagatattcatacggccacggcgtcgctggtatttgacgtagctcccgaagatgtgacgccggaactgcgcagaaaggcaaaagccgtaaatttcggcatagtgtacgggatcagtgattacgggctggcacgggatttgggaattacccggaaggaagcaaagcggtatatagacgactattttgccaaataccccaaagtaaaaacctatgtggatgaaattgtgcgggtcggccaggaacaggggtatgtggaaactctgttccacagaagaagataccttcccgaggttgcatctaaaaattttcaccagcgttctttcggaaaaagggttgcaatgaatacgcccatacagggcactgcagccgatattattaaaattgcgatggtgaaggtatacaaggctttgaaagaatccggccttaaatccaggcttatcctccaggtccatgacgaacttgttattgagacttttgaagacgaactggagactgtcaaggaacttgtcaaaaagtgcatggaagaggccgttgaattgagtgtgccgcttgttgtcgacgtttcaatcgggaaaaactggtatgaagcctcctgatatggatcc

SEQ ID NO: 235 - DNA, 2772 bp, Artificial Sequence
  Description of Artificial Sequence: Synthetic Clostridium stercorarium DNA Polymerase A821R
atgaaatacctgctgccgaccgctgctgctggtctgctgctcctcgctgcccagccggcgatggccatggatccaaaaataatccttatagacggaaacagtattttaaaccgcggtttttatgccctgtcggggcgatccatgctgactacgtccacaggtctgtataccaatgcggttttcgcttttgtaaatatattgaacaaatatatcgaagaggaaaaccctgattatattgccgttgctttcgatcttagggcaaaaactttccggcacggtctatatgagggatacaaagcgcagcggaaaggcatgcccgatgaacttgcaatgcagatacccctcgcgaaggaagtactgagggcgatgaatattgccataatagagcatgaaggttatgaagccgacgatataatcggcagcctttcgttaaaggccgaaaaagagaattttgacgtaataatccttacgggggacagggattctttccagctgatcagcgacagggtgaaagttatcctgccttcgacgaaagccggaaaaacagagaccaacgtatatgataaacaggccatcattgacaaatacggagttttaccccatcagcttattgacgttaaaggcttaatgggagattcgtcagataatatacccggcgttccgggagtgggtgagaaaacggcgttaagccttatttcagcctacggtacactggaaggtgtttacgagcatattgatgaaataaaacagcctaagctgaaagcatcgctgattgaatataaggatcaggcgtttttaagccgtaagctgggtactattgtaagaaatctggagctgtgtgcttcgctggaggatctgaaaagaaaagaaataaaccgcaaagagcttttgaatgttttcagaaaactcgaatttgaaagtatcatatcaaaaatgaatcttgcttccgctgaggtgacagaattacctcccgcgccggaagagcttaaaataacccatatttcagcggcagaggatcttaagaaatggattgcttacctgcttaaccagaaaaacatttccgtccttcaactgattgaccgggaggattcatacagttcccgtctttcagggctggctttgtgcaccggggatgaggttttttatatcgagaccgggactgcactccccgagaatttgattgcaacagagctgaaagaactgtggcagaatgaaaatattcacaaaatcggacacaatataaaagaatttataacctggctgctgaaacacgatgttgaactgaacggcctttatttcgacactatgattgccgaatacctgatagattccataagaaacggctatcctatagcaagcctttctcacaaatacctgaatcgcagcgttccgtcgctggacgaacttttgggcaagggaaagggagcaaaaaagtactctgaaattccgcccgaaaggctgaaagattacagcgcttataacgtcaaagccatttttgacatatggccgatgcagaaaaaagttcttcaggaaaaccggcaggaggagctttttaatgacatagagcttcctcttataaccgtacttgccagtatggaataccacggtttcaaagttgacgccgcaaaacttcacgaatacggcgaagttcttctgtcacgcataaaagacctggaaaaggtaatttacatgctggccggtgaagaattcaacatcaattcaacgaagcagcttggtaccatattattcgaaaaactgaagcttcccgttgtaaaaagtacaaagaccggatactccaccgacgtcgaggttcttgaagagctttattacaagcatgatataataccatgcataatagaataccgccagcttacaaaactttacaccacctacgccgaaggtcttgaaaaagtgataaatcctgtaaccggtaaaattcattcaagttttaaccagacggttacggctacaggccgcatcagcagtaccgaaccaaatttacagaatatcccagtcagacacgaaatgggaagggaaatacggaaagcttttattccgtcgtcggaaaacgctgtttttgttgatgccgattattcacagatagagcttcgcgtgcttgcccatataacaggcgatgaagccctgataaatgctttcgttaagggggaagatattcatacggccacggcgtcgctggtatttgacgtagctcccgaagatgtgacgccggaactgcgcagaaaggcaaaagccgtaaatttcggcatagtgtacgggatcagtgattacgggctggcacgggatttgggaattacccggaaggaagcaaagcggtatatagacgactattttgccaaataccccaaagtaaaaacctatgtggatgaaattgtgcgggtcggccaggaacaggggtatgtggaaactctgttccacagaagaagataccttcccgagcttcgttctaaaaattttcaccagcgttctttcggaaaaagggttgcaatgaatacgcccatacagggcactgcagccgatattattaaaattgcgatggtgaaggtatacaaggctttgaaagaatccggccttaaatccaggcttatcctccaggtccatgacgaacttgttattgagacttttgaagacgaactggagactgtcaaggaacttgtcaaaaagtgcatggaagaggccgttgaattgagtgtgccgcttgttgtcgacgtttcaatcgggaaaaactggtatgaagcctcctgatatggatcc

SEQ ID NO: 236 - DNA, 2772 bp, Artificial Sequence
  Description of Artificial Sequence: Synthetic Clostridium stercorarium DNA Polymerase L820N
atgaaatacctgctgccgaccgctgctgctggtctgctgctcctcgctgcccagccggcgatggccatggatccaaaaataatccttatagacggaaacagtattttaaaccgcggtttttatgccctgtcggggcgatccatgctgactacgtccacaggtctgtataccaatgcggttttcgcttttgtaaatatattgaacaaatatatcgaagaggaaaaccctgattatattgccgttgctttcgatcttagggcaaaaactttccggcacggtctatatgagggatacaaagcgcagcggaaaggcatgcccgatgaacttgcaatgcagatacccctcgcgaaggaagtactgagggcgatgaatattgccataatagagcatgaaggttatgaagccgacgatataatcggcagcctttcgttaaaggccgaaaaagagaattttgacgtaataatccttacgggggacagggattctttccagctgatcagcgacagggtgaaagttatcctgccttcgacgaaagccggaaaaacagagaccaacgtatatgataaacaggccatcattgacaaatacggagttttaccccatcagcttattgacgttaaaggcttaatgggagattcgtcagataatatacccggcgttccgggagtgggtgagaaaacggcgttaagccttatttcagcctacggtacactggaaggtgtttacgagcatattgatgaaataaaacagcctaagctgaaagcatcgctgattgaatataaggatcaggcgtttttaagccgtaagctgggtactattgtaagaaatctggagctgtgtgcttcgctggaggatctgaaaagaaaagaaataaaccgcaaagagcttttgaatgttttcagaaaactcgaatttgaaagtatcatatcaaaaatgaatcttgcttccgctgaggtgacagaattacctcccgcgccggaagagcttaaaataacccatatttcagcggcagaggatcttaagaaatggattgcttacctgcttaaccagaaaaacatttccgtccttcaactgattgaccgggaggattcatacagttcccgtctttcagggctggctttgtgcaccggggatgaggttttttatatcgagaccgggactgcactccccgagaatttgattgcaacagagctgaaagaactgtggcagaatgaaaatattcacaaaatcggacacaatataaaagaatttataacctggctgctgaaacacgatgttgaactgaacggcctttatttcgacactatgattgccgaatacctgatagattccataagaaacggctatcctatagcaagcctttctcacaaatacctgaatcgcagcgttccgtcgctggacgaacttttgggcaagggaaagggagcaaaaaagtactctgaaattccgcccgaaaggctgaaagattacagcgcttataacgtcaaagccatttttgacatatggccgatgcagaaaaaagttcttcaggaaaaccggcaggaggagctttttaatgacatagagcttcctcttataaccgtacttgccagtatggaataccacggtttcaaagttgacgccgcaaaacttcacgaatacggcgaagttcttctgtcacgcataaaagacctggaaaaggtaatttacatgctggccggtgaagaattcaacatcaattcaacgaagcagcttggtaccatattattcgaaaaactgaagcttcccgttgtaaaaagtacaaagaccggatactccaccgacgtcgaggttcttgaagagctttattacaagcatgatataataccatgcataatagaataccgccagcttacaaaactttacaccacctacgccgaaggtcttgaaaaagtgataaatcctgtaaccggtaaaattcattcaagttttaaccagacggttacggctacaggccgcatcagcagtaccgaaccaaatttacagaatatcccagtcagacacgaaatgggaagggaaatacggaaagcttttattccgtcgtcggaaaacgctgtttttgttgatgccgattattcacagatagagcttcgcgtgcttgcccatataacaggcgatgaagccctgataaatgctttcgttaagggggaagatattcatacggccacggcgtcgctggtatttgacgtagctcccgaagatgtgacgccggaactgcgcagaaaggcaaaagccgtaaatttcggcatagtgtacgggatcagtgattacgggctggcacgggatttgggaattacccggaaggaagcaaagcggtatatagacgactattttgccaaataccccaaagtaaaaacctatgtggatgaaattgtgcgggtcggccaggaacaggggtatgtggaaactctgttccacagaagaagataccttcccgagcttaattctaaaaattttcaccagcgttctttcggaaaaagggttgcaatgaatacgcccatacagggcactgcagccgatattattaaaattgcgatggtgaaggtatacaaggctttgaaagaatccggccttaaatccaggcttatcctccaggtccatgacgaacttgttattgagacttttgaagacgaactggagactgtcaaggaacttgtcaaaaagtgcatggaagaggccgttgaattgagtgtgccgcttgttgtcgacgtttcaatcgggaaaaactggtatgaagcctcctgatatggatcc

SEQ ID NO: 237 - DNA, 2772 bp, Artificial Sequence
  Description of Artificial Sequence: Synthetic Clostridium stercorarium DNA Polymerase A821D
atgaaatacctgctgccgaccgctgctgctggtctgctgctcctcgctgcccagccggcgatggccatggatccaaaaataatccttatagacggaaacagtattttaaaccgcggtttttatgccctgtcggggcgatccatgctgactacgtccacaggtctgtataccaatgcggttttcgcttttgtaaatatattgaacaaatatatcgaagaggaaaaccctgattatattgccgttgctttcgatcttagggcaaaaactttccggcacggtctatatgagggatacaaagcgcagcggaaaggcatgcccgatgaacttgcaatgcagatacccctcgcgaaggaagtactgagggcgatgaatattgccataatagagcatgaaggttatgaagccgacgatataatcggcagcctttcgttaaaggccgaaaaagagaattttgacgtaataatccttacgggggacagggattctttccagctgatcagcgacagggtgaaagttatcctgccttcgacgaaagccggaaaaacagagaccaacgtatatgataaacaggccatcattgacaaatacggagttttaccccatcagcttattgacgttaaaggcttaatgggagattcgtcagataatatacccggcgttccgggagtgggtgagaaaacggcgttaagccttatttcagcctacggtacactggaaggtgtttacgagcatattgatgaaataaaacagcctaagctgaaagcatcgctgattgaatataaggatcaggcgtttttaagccgtaagctgggtactattgtaagaaatctggagctgtgtgcttcgctggaggatctgaaaagaaaagaaataaaccgcaaagagcttttgaatgttttcagaaaactcgaatttgaaagtatcatatcaaaaatgaatcttgcttccgctgaggtgacagaattacctcccgcgccggaagagcttaaaataacccatatttcagcggcagaggatcttaagaaatggattgcttacctgcttaaccagaaaaacatttccgtccttcaactgattgaccgggaggattcatacagttcccgtctttcagggctggctttgtgcaccggggatgaggttttttatatcgagaccgggactgcactccccgagaatttgattgcaacagagctgaaagaactgtggcagaatgaaaatattcacaaaatcggacacaatataaaagaatttataacctggctgctgaaacacgatgttgaactgaacggcctttatttcgacactatgattgccgaatacctgatagattccataagaaacggctatcctatagcaagcctttctcacaaatacctgaatcgcagcgttccgtcgctggacgaacttttgggcaagggaaagggagcaaaaaagtactctgaaattccgcccgaaaggctgaaagattacagcgcttataacgtcaaagccatttttgacatatggccgatgcagaaaaaagttcttcaggaaaaccggcaggaggagctttttaatgacatagagcttcctcttataaccgtacttgccagtatggaataccacggtttcaaagttgacgccgcaaaacttcacgaatacggcgaagttcttctgtcacgcataaaagacctggaaaaggtaatttacatgctggccggtgaagaattcaacatcaattcaacgaagcagcttggtaccatattattcgaaaaactgaagcttcccgttgtaaaaagtacaaagaccggatactccaccgacgtcgaggttcttgaagagctttattacaagcatgatataataccatgcataatagaataccgccagcttacaaaactttacaccacctacgccgaaggtcttgaaaaagtgataaatcctgtaaccggtaaaattcattcaagttttaaccagacggttacggctacaggccgcatcagcagtaccgaaccaaatttacagaatatcccagtcagacacgaaatgggaagggaaatacggaaagcttttattccgtcgtcggaaaacgctgtttttgttgatgccgattattcacagatagagcttcgcgtgcttgcccatataacaggcgatgaagccctgataaatgctttcgttaagggggaagatattcatacggccacggcgtcgctggtatttgacgtagctcccgaagatgtgacgccggaactgcgcagaaaggcaaaagccgtaaatttcggcatagtgtacgggatcagtgattacgggctggcacgggatttgggaattacccggaaggaagcaaagcggtatatagacgactattttgccaaataccccaaagtaaaaacctatgtggatgaaattgtgcgggtcggccaggaacaggggtatgtggaaactctgttccacagaagaagataccttcccgagcttgattctaaaaattttcaccagcgttctttcggaaaaagggttgcaatgaatacgcccatacagggcactgcagccgatattattaaaattgcgatggtgaaggtatacaaggctttgaaagaatccggccttaaatccaggcttatcctccaggtccatgacgaacttgttattgagacttttgaagacgaactggagactgtcaaggaacttgtcaaaaagtgcatggaagaggccgttgaattgagtgtgccgcttgttgtcgacgtttcaatcgggaaaaactggtatgaagcctcctgatatggatcc

SEQ ID NO: 238 - DNA, 2772 bp, Artificial Sequence
  Description of Artificial Sequence: Synthetic Clostridium stercorarium DNA Polymerase A821C
atgaaatacctgctgccgaccgctgctgctggtctgctgctcctcgctgcccagccggcgatggccatggatccaaaaataatccttatagacggaaacagtattttaaaccgcggtttttatgccctgtcggggcgatccatgctgactacgtccacaggtctgtataccaatgcggttttcgcttttgtaaatatattgaacaaatatatcgaagaggaaaaccctgattatattgccgttgctttcgatcttagggcaaaaactttccggcacggtctatatgagggatacaaagcgcagcggaaaggcatgcccgatgaacttgcaatgcagatacccctcgcgaaggaagtactgagggcgatgaatattgccataatagagcatgaaggttatgaagccgacgatataatcggcagcctttcgttaaaggccgaaaaagagaattttgacgtaataatccttacgggggacagggattctttccagctgatcagcgacagggtgaaagttatcctgccttcgacgaaagccggaaaaacagagaccaacgtatatgataaacaggccatcattgacaaatacggagttttaccccatcagcttattgacgttaaaggcttaatgggagattcgtcagataatatacccggcgttccgggagtgggtgagaaaacggcgttaagccttatttcagcctacggtacactggaaggtgtttacgagcatattgatgaaataaaacagcctaagctgaaagcatcgctgattgaatataaggatcaggcgtttttaagccgtaagctgggtactattgtaagaaatctggagctgtgtgcttcgctggaggatctgaaaagaaaagaaataaaccgcaaagagcttttgaatgttttcagaaaactcgaatttgaaagtatcatatcaaaaatgaatcttgcttccgctgaggtgacagaattacctcccgcgccggaagagcttaaaataacccatatttcagcggcagaggatcttaagaaatggattgcttacctgcttaaccagaaaaacatttccgtccttcaactgattgaccgggaggattcatacagttcccgtctttcagggctggctttgtgcaccggggatgaggttttttatatcgagaccgggactgcactccccgagaatttgattgcaacagagctgaaagaactgtggcagaatgaaaatattcacaaaatcggacacaatataaaagaatttataacctggctgctgaaacacgatgttgaactgaacggcctttatttcgacactatgattgccgaatacctgatagattccataagaaacggctatcctatagcaagcctttctcacaaatacctgaatcgcagcgttccgtcgctggacgaacttttgggcaagggaaagggagcaaaaaagtactctgaaattccgcccgaaaggctgaaagattacagcgcttataacgtcaaagccatttttgacatatggccgatgcagaaaaaagttcttcaggaaaaccggcaggaggagctttttaatgacatagagcttcctcttataaccgtacttgccagtatggaataccacggtttcaaagttgacgccgcaaaacttcacgaatacggcgaagttcttctgtcacgcataaaagacctggaaaaggtaatttacatgctggccggtgaagaattcaacatcaattcaacgaagcagcttggtaccatattattcgaaaaactgaagcttcccgttgtaaaaagtacaaagaccggatactccaccgacgtcgaggttcttgaagagctttattacaagcatgatataataccatgcataatagaataccgccagcttacaaaactttacaccacctacgccgaaggtcttgaaaaagtgataaatcctgtaaccggtaaaattcattcaagttttaaccagacggttacggctacaggccgcatcagcagtaccgaaccaaatttacagaatatcccagtcagacacgaaatgggaagggaaatacggaaagcttttattccgtcgtcggaaaacgctgtttttgttgatgccgattattcacagatagagcttcgcgtgcttgcccatataacaggcgatgaagccctgataaatgctttcgttaagggggaagatattcatacggccacggcgtcgctggtatttgacgtagctcccgaagatgtgacgccggaactgcgcagaaaggcaaaagccgtaaatttcggcatagtgtacgggatcagtgattacgggctggcacgggatttgggaattacccggaaggaagcaaagcggtatatagacgactattttgccaaataccccaaagtaaaaacctatgtggatgaaattgtgcgggtcggccaggaacaggggtatgtggaaactctgttccacagaagaagataccttcccgagctttgttctaaaaattttcaccagcgttctttcggaaaaagggttgcaatgaatacgcccatacagggcactgcagccgatattattaaaattgcgatggtgaaggtatacaaggctttgaaagaatccggccttaaatccaggcttatcctccaggtccatgacgaacttgttattgagacttttgaagacgaactggagactgtcaaggaacttgtcaaaaagtgcatggaagaggccgttgaattgagtgtgccgcttgttgtcgacgtttcaatcgggaaaaactggtatgaagcctcctgatatggatcc

SEQ ID NO: 239 - DNA, 2772 bp, Artificial Sequence
  Description of Artificial Sequence: Synthetic Clostridium stercorarium DNA Polymerase A821E
atgaaatacctgctgccgaccgctgctgctggtctgctgctcctcgctgcccagccggcgatggccatggatccaaaaataatccttatagacggaaacagtattttaaaccgcggtttttatgccctgtcggggcgatccatgctgactacgtccacaggtctgtataccaatgcggttttcgcttttgtaaatatattgaacaaatatatcgaagaggaaaaccctgattatattgccgttgctttcgatcttagggcaaaaactttccggcacggtctatatgagggatacaaagcgcagcggaaaggcatgcccgatgaacttgcaatgcagatacccctcgcgaaggaagtactgagggcgatgaatattgccataatagagcatgaaggttatgaagccgacgatataatcggcagcctttcgttaaaggccgaaaaagagaattttgacgtaataatccttacgggggacagggattctttccagctgatcagcgacagggtgaaagttatcctgccttcgacgaaagccggaaaaacagagaccaacgtatatgataaacaggccatcattgacaaatacggagttttaccccatcagcttattgacgttaaaggcttaatgggagattcgtcagataatatacccggcgttccgggagtgggtgagaaaacggcgttaagccttatttcagcctacggtacactggaaggtgtttacgagcatattgatgaaataaaacagcctaagctgaaagcatcgctgattgaatataaggatcaggcgtttttaagccgtaagctgggtactattgtaagaaatctggagctgtgtgcttcgctggaggatctgaaaagaaaagaaataaaccgcaaagagcttttgaatgttttcagaaaactcgaatttgaaagtatcatatcaaaaatgaatcttgcttccgctgaggtgacagaattacctcccgcgccggaagagcttaaaataacccatatttcagcggcagaggatcttaagaaatggattgcttacctgcttaaccagaaaaacatttccgtccttcaactgattgaccgggaggattcatacagttcccgtctttcagggctggctttgtgcaccggggatgaggttttttatatcgagaccgggactgcactccccgagaatttgattgcaacagagctgaaagaactgtggcagaatgaaaatattcacaaaatcggacacaatataaaagaatttataacctggctgctgaaacacgatgttgaactgaacggcctttatttcgacactatgattgccgaatacctgatagattccataagaaacggctatcctatagcaagcctttctcacaaatacctgaatcgcagcgttccgtcgctggacgaacttttgggcaagggaaagggagcaaaaaagtactctgaaattccgcccgaaaggctgaaagattacagcgcttataacgtcaaagccatttttgacatatggccgatgcagaaaaaagttcttcaggaaaaccggcaggaggagctttttaatgacatagagcttcctcttataaccgtacttgccagtatggaataccacggtttcaaagttgacgccgcaaaacttcacgaatacggcgaagttcttctgtcacgcataaaagacctggaaaaggtaatttacatgctggccggtgaagaattcaacatcaattcaacgaagcagcttggtaccatattattcgaaaaactgaagcttcccgttgtaaaaagtacaaagaccggatactccaccgacgtcgaggttcttgaagagctttattacaagcatgatataataccatgcataatagaataccgccagcttacaaaactttacaccacctacgccgaaggtcttgaaaaagtgataaatcctgtaaccggtaaaattcattcaagttttaaccagacggttacggctacaggccgcatcagcagtaccgaaccaaatttacagaatatcccagtcagacacgaaatgggaagggaaatacggaaagcttttattccgtcgtcggaaaacgctgtttttgttgatgccgattattcacagatagagcttcgcgtgcttgcccatataacaggcgatgaagccctgataaatgctttcgttaagggggaagatattcatacggccacggcgtcgctggtatttgacgtagctcccgaagatgtgacgccggaactgcgcagaaaggcaaaagccgtaaatttcggcatagtgtacgggatcagtgattacgggctggcacgggatttgggaattacccggaaggaagcaaagcggtatatagacgactattttgccaaataccccaaagtaaaaacctatgtggatgaaattgtgcgggtcggccaggaacaggggtatgtggaaactctgttccacagaagaagataccttcccgagcttgaatctaaaaattttcaccagcgttctttcggaaaaagggttgcaatgaatacgcccatacagggcactgcagccgatattattaaaattgcgatggtgaaggtatacaaggctttgaaagaatccggccttaaatccaggcttatcctccaggtccatgacgaacttgttattgagacttttgaagacgaactggagactgtcaaggaacttgtcaaaaagtgcatggaagaggccgttgaattgagtgtgccgcttgttgtcgacgtttcaatcgggaaaaactggtatgaagcctcctgatatggatcc

SEQ ID NO: 240 - DNA, 2772 bp, Artificial Sequence
  Description of Artificial Sequence: Synthetic Clostridium stercorarium DNA Polymerase A821Q
atgaaatacctgctgccgaccgctgctgctggtctgctgctcctcgctgcccagccggcgatggccatggatccaaaaataatccttatagacggaaacagtattttaaaccgcggtttttatgccctgtcggggcgatccatgctgactacgtccacaggtctgtataccaatgcggttttcgcttttgtaaatatattgaacaaatatatcgaagaggaaaaccctgattatattgccgttgctttcgatcttagggcaaaaactttccggcacggtctatatgagggatacaaagcgcagcggaaaggcatgcccgatgaacttgcaatgcagatacccctcgcgaaggaagtactgagggcgatgaatattgccataatagagcatgaaggttatgaagccgacgatataatcggcagcctttcgttaaaggccgaaaaagagaattttgacgtaataatccttacgggggacagggattctttccagctgatcagcgacagggtgaaagttatcctgccttcgacgaaagccggaaaaacagagaccaacgtatatgataaacaggccatcattgacaaatacggagttttaccccatcagcttattgacgttaaaggcttaatgggagattcgtcagataatatacccggcgttccgggagtgggtgagaaaacggcgttaagccttatttcagcctacggtacactggaaggtgtttacgagcatattgatgaaataaaacagcctaagctgaaagcatcgctgattgaatataaggatcaggcgtttttaagccgtaagctgggtactattgtaagaaatctggagctgtgtgcttcgctggaggatctgaaaagaaaagaaataaaccgcaaagagcttttgaatgttttcagaaaactcgaatttgaaagtatcatatcaaaaatgaatcttgcttccgctgaggtgacagaattacctcccgcgccggaagagcttaaaataacccatatttcagcggcagaggatcttaagaaatggattgcttacctgcttaaccagaaaaacatttccgtccttcaactgattgaccgggaggattcatacagttcccgtctttcagggctggctttgtgcaccggggatgaggttttttatatcgagaccgggactgcactccccgagaatttgattgcaacagagctgaaagaactgtggcagaatgaaaatattcacaaaatcggacacaatataaaagaatttataacctggctgctgaaacacgatgttgaactgaacggcctttatttcgacactatgattgccgaatacctgatagattccataagaaacggctatcctatagcaagcctttctcacaaatacctgaatcgcagcgttccgtcgctggacgaacttttgggcaagggaaagggagcaaaaaagtactctgaaattccgcccgaaaggctgaaagattacagcgcttataacgtcaaagccatttttgacatatggccgatgcagaaaaaagttcttcaggaaaaccggcaggaggagctttttaatgacatagagcttcctcttataaccgtacttgccagtatggaataccacggtttcaaagttgacgccgcaaaacttcacgaatacggcgaagttcttctgtcacgcataaaagacctggaaaaggtaatttacatgctggccggtgaagaattcaacatcaattcaacgaagcagcttggtaccatattattcgaaaaactgaagcttcccgttgtaaaaagtacaaagaccggatactccaccgacgtcgaggttcttgaagagctttattacaagcatgatataataccatgcataatagaataccgccagcttacaaaactttacaccacctacgccgaaggtcttgaaaaagtgataaatcctgtaaccggtaaaattcattcaagttttaaccagacggttacggctacaggccgcatcagcagtaccgaaccaaatttacagaatatcccagtcagacacgaaatgggaagggaaatacggaaagcttttattccgtcgtcggaaaacgctgtttttgttgatgccgattattcacagatagagcttcgcgtgcttgcccatataacaggcgatgaagccctgataaatgctttcgttaagggggaagatattcatacggccacggcgtcgctggtatttgacgtagctcccgaagatgtgacgccggaactgcgcagaaaggcaaaagccgtaaatttcggcatagtgtacgggatcagtgattacgggctggcacgggatttgggaattacccggaaggaagcaaagcggtatatagacgactattttgccaaataccccaaagtaaaaacctatgtggatgaaattgtgcgggtcggccaggaacaggggtatgtggaaactctgttccacagaagaagataccttcccgagcttcaatctaaaaattttcaccagcgttctttcggaaaaagggttgcaatgaatacgcccatacagggcactgcagccgatattattaaaattgcgatggtgaaggtatacaaggctttgaaagaatccggccttaaatccaggcttatcctccaggtccatgacgaacttgttattgagacttttgaagacgaactggagactgtcaaggaacttgtcaaaaagtgcatggaagaggccgttgaattgagtgtgccgcttgttgtcgacgtttcaatcgggaaaaactggtatgaagcctcctgatatggatcc

SEQ ID NO: 241 - DNA, 2772 bp, Artificial Sequence
  Description of Artificial Sequence: Synthetic Clostridium stercorarium DNA Polymerase A821G
atgaaatacctgctgccgaccgctgctgctggtctgctgctcctcgctgcccagccggcgatggccatggatccaaaaataatccttatagacggaaacagtattttaaaccgcggtttttatgccctgtcggggcgatccatgctgactacgtccacaggtctgtataccaatgcggttttcgcttttgtaaatatattgaacaaatatatcgaagaggaaaaccctgattatattgccgttgctttcgatcttagggcaaaaactttccggcacggtctatatgagggatacaaagcgcagcggaaaggcatgcccgatgaacttgcaatgcagatacccctcgcgaaggaagtactgagggcgatgaatattgccataatagagcatgaaggttatgaagccgacgatataatcggcagcctttcgttaaaggccgaaaaagagaattttgacgtaataatccttacgggggacagggattctttccagctgatcagcgacagggtgaaagttatcctgccttcgacgaaagccggaaaaacagagaccaacgtatatgataaacaggccatcattgacaaatacggagttttaccccatcagcttattgacgttaaaggcttaatgggagattcgtcagataatatacccggcgttccgggagtgggtgagaaaacggcgttaagccttatttcagcctacggtacactggaaggtgtttacgagcatattgatgaaataaaacagcctaagctgaaagcatcgctgattgaatataaggatcaggcgtttttaagccgtaagctgggtactattgtaagaaatctggagctgtgtgcttcgctggaggatctgaaaagaaaagaaataaaccgcaaagagcttttgaatgttttcagaaaactcgaatttgaaagtatcatatcaaaaatgaatcttgcttccgctgaggtgacagaattacctcccgcgccggaagagcttaaaataacccatatttcagcggcagaggatcttaagaaatggattgcttacctgcttaaccagaaaaacatttccgtccttcaactgattgaccgggaggattcatacagttcccgtctttcagggctggctttgtgcaccggggatgaggttttttatatcgagaccgggactgcactccccgagaatttgattgcaacagagctgaaagaactgtggcagaatgaaaatattcacaaaatcggacacaatataaaagaatttataacctggctgctgaaacacgatgttgaactgaacggcctttatttcgacactatgattgccgaatacctgatagattccataagaaacggctatcctatagcaagcctttctcacaaatacctgaatcgcagcgttccgtcgctggacgaacttttgggcaagggaaagggagcaaaaaagtactctgaaattccgcccgaaaggctgaaagattacagcgcttataacgtcaaagccatttttgacatatggccgatgcagaaaaaagttcttcaggaaaaccggcaggaggagctttttaatgacatagagcttcctcttataaccgtacttgccagtatggaataccacggtttcaaagttgacgccgcaaaacttcacgaatacggcgaagttcttctgtcacgcataaaagacctggaaaaggtaatttacatgctggccggtgaagaattcaacatcaattcaacgaagcagcttggtaccatattattcgaaaaactgaagcttcccgttgtaaaaagtacaaagaccggatactccaccgacgtcgaggttcttgaagagctttattacaagcatgatataataccatgcataatagaataccgccagcttacaaaactttacaccacctacgccgaaggtcttgaaaaagtgataaatcctgtaaccggtaaaattcattcaagttttaaccagacggttacggctacaggccgcatcagcagtaccgaaccaaatttacagaatatcccagtcagacacgaaatgggaagggaaatacggaaagcttttattccgtcgtcggaaaacgctgtttttgttgatgccgattattcacagatagagcttcgcgtgcttgcccatataacaggcgatgaagccctgataaatgctttcgttaagggggaagatattcatacggccacggcgtcgctggtatttgacgtagctcccgaagatgtgacgccggaactgcgcagaaaggcaaaagccgtaaatttcggcatagtgtacgggatcagtgattacgggctggcacgggatttgggaattacccggaaggaagcaaagcggtatatagacgactattttgccaaataccccaaagtaaaaacctatgtggatgaaattgtgcgggtcggccaggaacaggggtatgtggaaactctgttccacagaagaagataccttcccgagcttggttctaaaaattttcaccagcgttctttcggaaaaagggttgcaatgaatacgcccatacagggcactgcagccgatattattaaaattgcgatggtgaaggtatacaaggctttgaaagaatccggccttaaatccaggcttatcctccaggtccatgacgaacttgttattgagacttttgaagacgaactggagactgtcaaggaacttgtcaaaaagtgcatggaagaggccgttgaattgagtgtgccgcttgttgtcgacgtttcaatcgggaaaaactggtatgaagcctcctgatatggatcc

SEQ ID NO: 242 - DNA, 2772 bp, Artificial Sequence
  Description of Artificial Sequence: Synthetic Clostridium stercorarium DNA Polymerase A821H
atgaaatacctgctgccgaccgctgctgctggtctgctgctcctcgctgcccagccggcgatggccatggatccaaaaataatccttatagacggaaacagtattttaaaccgcggtttttatgccctgtcggggcgatccatgctgactacgtccacaggtctgtataccaatgcggttttcgcttttgtaaatatattgaacaaatatatcgaagaggaaaaccctgattatattgccgttgctttcgatcttagggcaaaaactttccggcacggtctatatgagggatacaaagcgcagcggaaaggcatgcccgatgaacttgcaatgcagatacccctcgcgaaggaagtactgagggcgatgaatattgccataatagagcatgaaggttatgaagccgacgatataatcggcagcctttcgttaaaggccgaaaaagagaattttgacgtaataatccttacgggggacagggattctttccagctgatcagcgacagggtgaaagttatcctgccttcgacgaaagccggaaaaacagagaccaacgtatatgataaacaggccatcattgacaaatacggagttttaccccatcagcttattgacgttaaaggcttaatgggagattcgtcagataatatacccggcgttccgggagtgggtgagaaaacggcgttaagccttatttcagcctacggtacactggaaggtgtttacgagcatattgatgaaataaaacagcctaagctgaaagcatcgctgattgaatataaggatcaggcgtttttaagccgtaagctgggtactattgtaagaaatctggagctgtgtgcttcgctggaggatctgaaaagaaaagaaataaaccgcaaagagcttttgaatgttttcagaaaactcgaatttgaaagtatcatatcaaaaatgaatcttgcttccgctgaggtgacagaattacctcccgcgccggaagagcttaaaataacccatatttcagcggcagaggatcttaagaaatggattgcttacctgcttaaccagaaaaacatttccgtccttcaactgattgaccgggaggattcatacagttcccgtctttcagggctggctttgtgcaccggggatgaggttttttatatcgagaccgggactgcactccccgagaatttgattgcaacagagctgaaagaactgtggcagaatgaaaatattcacaaaatcggacacaatataaaagaatttataacctggctgctgaaacacgatgttgaactgaacggcctttatttcgacactatgattgccgaatacctgatagattccataagaaacggctatcctatagcaagcctttctcacaaatacctgaatcgcagcgttccgtcgctggacgaacttttgggcaagggaaagggagcaaaaaagtactctgaaattccgcccgaaaggctgaaagattacagcgcttataacgtcaaagccatttttgacatatggccgatgcagaaaaaagttcttcaggaaaaccggcaggaggagctttttaatgacatagagcttcctcttataaccgtacttgccagtatggaataccacggtttcaaagttgacgccgcaaaacttcacgaatacggcgaagttcttctgtcacgcataaaagacctggaaaaggtaatttacatgctggccggtgaagaattcaacatcaattcaacgaagcagcttggtaccatattattcgaaaaactgaagcttcccgttgtaaaaagtacaaagaccggatactccaccgacgtcgaggttcttgaagagctttattacaagcatgatataataccatgcataatagaataccgccagcttacaaaactttacaccacctacgccgaaggtcttgaaaaagtgataaatcctgtaaccggtaaaattcattcaagttttaaccagacggttacggctacaggccgcatcagcagtaccgaaccaaatttacagaatatcccagtcagacacgaaatgggaagggaaatacggaaagcttttattccgtcgtcggaaaacgctgtttttgttgatgccgattattcacagatagagcttcgcgtgcttgcccatataacaggcgatgaagccctgataaatgctttcgttaagggggaagatattcatacggccacggcgtcgctggtatttgacgtagctcccgaagatgtgacgccggaactgcgcagaaaggcaaaagccgtaaatttcggcatagtgtacgggatcagtgattacgggctggcacgggatttgggaattacccggaaggaagcaaagcggtatatagacgactattttgccaaataccccaaagtaaaaacctatgtggatgaaattgtgcgggtcggccaggaacaggggtatgtggaaactctgttccacagaagaagataccttcccgagcttcattctaaaaattttcaccagcgttctttcggaaaaagggttgcaatgaatacgcccatacagggcactgcagccgatattattaaaattgcgatggtgaaggtatacaaggctttgaaagaatccggccttaaatccaggcttatcctccaggtccatgacgaacttgttattgagacttttgaagacgaactggagactgtcaaggaacttgtcaaaaagtgcatggaagaggccgttgaattgagtgtgccgcttgttgtcgacgtttcaatcgggaaaaactggtatgaagcctcctgatatggatcc

SEQ ID NO: 243 - DNA, 2772 bp, Artificial Sequence
  Description of Artificial Sequence: Synthetic Clostridium stercorarium DNA Polymerase A821I
atgaaatacctgctgccgaccgctgctgctggtctgctgctcctcgctgcccagccggcgatggccatggatccaaaaataatccttatagacggaaacagtattttaaaccgcggtttttatgccctgtcggggcgatccatgctgactacgtccacaggtctgtataccaatgcggttttcgcttttgtaaatatattgaacaaatatatcgaagaggaaaaccctgattatattgccgttgctttcgatcttagggcaaaaactttccggcacggtctatatgagggatacaaagcgcagcggaaaggcatgcccgatgaacttgcaatgcagatacccctcgcgaaggaagtactgagggcgatgaatattgccataatagagcatgaaggttatgaagccgacgatataatcggcagcctttcgttaaaggccgaaaaagagaattttgacgtaataatccttacgggggacagggattctttccagctgatcagcgacagggtgaaagttatcctgccttcgacgaaagccggaaaaacagagaccaacgtatatgataaacaggccatcattgacaaatacggagttttaccccatcagcttattgacgttaaaggcttaatgggagattcgtcagataatatacccggcgttccgggagtgggtgagaaaacggcgttaagccttatttcagcctacggtacactggaaggtgtttacgagcatattgatgaaataaaacagcctaagctgaaagcatcgctgattgaatataaggatcaggcgtttttaagccgtaagctgggtactattgtaagaaatctggagctgtgtgcttcgctggaggatctgaaaagaaaagaaataaaccgcaaagagcttttgaatgttttcagaaaactcgaatttgaaagtatcatatcaaaaatgaatcttgcttccgctgaggtgacagaattacctcccgcgccggaagagcttaaaataacccatatttcagcggcagaggatcttaagaaatggattgcttacctgcttaaccagaaaaacatttccgtccttcaactgattgaccgggaggattcatacagttcccgtctttcagggctggctttgtgcaccggggatgaggttttttatatcgagaccgggactgcactccccgagaatttgattgcaacagagctgaaagaactgtggcagaatgaaaatattcacaaaatcggacacaatataaaagaatttataacctggctgctgaaacacgatgttgaactgaacggcctttatttcgacactatgattgccgaatacctgatagattccataagaaacggctatcctatagcaagcctttctcacaaatacctgaatcgcagcgttccgtcgctggacgaacttttgggcaagggaaagggagcaaaaaagtactctgaaattccgcccgaaaggctgaaagattacagcgcttataacgtcaaagccatttttgacatatggccgatgcagaaaaaagttcttcaggaaaaccggcaggaggagctttttaatgacatagagcttcctcttataaccgtacttgccagtatggaataccacggtttcaaagttgacgccgcaaaacttcacgaatacggcgaagttcttctgtcacgcataaaagacctggaaaaggtaatttacatgctggccggtgaagaattcaacatcaattcaacgaagcagcttggtaccatattattcgaaaaactgaagcttcccgttgtaaaaagtacaaagaccggatactccaccgacgtcgaggttcttgaagagctttattacaagcatgatataataccatgcataatagaataccgccagcttacaaaactttacaccacctacgccgaaggtcttgaaaaagtgataaatcctgtaaccggtaaaattcattcaagttttaaccagacggttacggctacaggccgcatcagcagtaccgaaccaaatttacagaatatcccagtcagacacgaaatgggaagggaaatacggaaagcttttattccgtcgtcggaaaacgctgtttttgttgatgccgattattcacagatagagcttcgcgtgcttgcccatataacaggcgatgaagccctgataaatgctttcgttaagggggaagatattcatacggccacggcgtcgctggtatttgacgtagctcccgaagatgtgacgccggaactgcgcagaaaggcaaaagccgtaaatttcggcatagtgtacgggatcagtgattacgggctggcacgggatttgggaattacccggaaggaagcaaagcggtatatagacgactattttgccaaataccccaaagtaaaaacctatgtggatgaaattgtgcgggtcggccaggaacaggggtatgtggaaactctgttccacagaagaagataccttcccgagcttatttctaaaaattttcaccagcgttctttcggaaaaagggttgcaatgaatacgcccatacagggcactgcagccgatattattaaaattgcgatggtgaaggtatacaaggctttgaaagaatccggccttaaatccaggcttatcctccaggtccatgacgaacttgttattgagacttttgaagacgaactggagactgtcaaggaacttgtcaaaaagtgcatggaagaggccgttgaattgagtgtgccgcttgttgtcgacgtttcaatcgggaaaaactggtatgaagcctcctgatatggatcc

SEQ ID NO: 244 - DNA, 2772 bp, Artificial Sequence
  Description of Artificial Sequence: Synthetic Clostridium stercorarium DNA Polymerase A821L
atgaaatacctgctgccgaccgctgctgctggtctgctgctcctcgctgcccagccggcgatggccatggatccaaaaataatccttatagacggaaacagtattttaaaccgcggtttttatgccctgtcggggcgatccatgctgactacgtccacaggtctgtataccaatgcggttttcgcttttgtaaatatattgaacaaatatatcgaagaggaaaaccctgattatattgccgttgctttcgatcttagggcaaaaactttccggcacggtctatatgagggatacaaagcgcagcggaaaggcatgcccgatgaacttgcaatgcagatacccctcgcgaaggaagtactgagggcgatgaatattgccataatagagcatgaaggttatgaagccgacgatataatcggcagcctttcgttaaaggccgaaaaagagaattttgacgtaataatccttacgggggacagggattctttccagctgatcagcgacagggtgaaagttatcctgccttcgacgaaagccggaaaaacagagaccaacgtatatgataaacaggccatcattgacaaatacggagttttaccccatcagcttattgacgttaaaggcttaatgggagattcgtcagataatatacccggcgttccgggagtgggtgagaaaacggcgttaagccttatttcagcctacggtacactggaaggtgtttacgagcatattgatgaaataaaacagcctaagctgaaagcatcgctgattgaatataaggatcaggcgtttttaagccgtaagctgggtactattgtaagaaatctggagctgtgtgcttcgctggaggatctgaaaagaaaagaaataaaccgcaaagagcttttgaatgttttcagaaaactcgaatttgaaagtatcatatcaaaaatgaatcttgcttccgctgaggtgacagaattacctcccgcgccggaagagcttaaaataacccatatttcagcggcagaggatcttaagaaatggattgcttacctgcttaaccagaaaaacatttccgtccttcaactgattgaccgggaggattcatacagttcccgtctttcagggctggctttgtgcaccggggatgaggttttttatatcgagaccgggactgcactccccgagaatttgattgcaacagagctgaaagaactgtggcagaatgaaaatattcacaaaatcggacacaatataaaagaatttataacctggctgctgaaacacgatgttgaactgaacggcctttatttcgacactatgattgccgaatacctgatagattccataagaaacggctatcctatagcaagcctttctcacaaatacctgaatcgcagcgttccgtcgctggacgaacttttgggcaagggaaagggagcaaaaaagtactctgaaattccgcccgaaaggctgaaagattacagcgcttataacgtcaaagccatttttgacatatggccgatgcagaaaaaagttcttcaggaaaaccggcaggaggagctttttaatgacatagagcttcctcttataaccgtacttgccagtatggaataccacggtttcaaagttgacgccgcaaaacttcacgaatacggcgaagttcttctgtcacgcataaaagacctggaaaaggtaatttacatgctggccggtgaagaattcaacatcaattcaacgaagcagcttggtaccatattattcgaaaaactgaagcttcccgttgtaaaaagtacaaagaccggatactccaccgacgtcgaggttcttgaagagctttattacaagcatgatataataccatgcataatagaataccgccagcttacaaaactttacaccacctacgccgaaggtcttgaaaaagtgataaatcctgtaaccggtaaaattcattcaagttttaaccagacggttacggctacaggccgcatcagcagtaccgaaccaaatttacagaatatcccagtcagacacgaaatgggaagggaaatacggaaagcttttattccgtcgtcggaaaacgctgtttttgttgatgccgattattcacagatagagcttcgcgtgcttgcccatataacaggcgatgaagccctgataaatgctttcgttaagggggaagatattcatacggccacggcgtcgctggtatttgacgtagctcccgaagatgtgacgccggaactgcgcagaaaggcaaaagccgtaaatttcggcatagtgtacgggatcagtgattacgggctggcacgggatttgggaattacccggaaggaagcaaagcggtatatagacgactattttgccaaataccccaaagtaaaaacctatgtggatgaaattgtgcgggtcggccaggaacaggggtatgtggaaactctgttccacagaagaagataccttcccgagcttctttctaaaaattttcaccagcgttctttcggaaaaagggttgcaatgaatacgcccatacagggcactgcagccgatattattaaaattgcgatggtgaaggtatacaaggctttgaaagaatccggccttaaatccaggcttatcctccaggtccatgacgaacttgttattgagacttttgaagacgaactggagactgtcaaggaacttgtcaaaaagtgcatggaagaggccgttgaattgagtgtgccgcttgttgtcgacgtttcaatcgggaaaaactggtatgaagcctcctgatatggatcc

SEQ ID NO: 245 - DNA, 2772 bp, Artificial Sequence
  Description of Artificial Sequence: Synthetic Clostridium stercorarium DNA Polymerase A821K
atgaaatacctgctgccgaccgctgctgctggtctgctgctcctcgctgcccagccggcgatggccatggatccaaaaataatccttatagacggaaacagtattttaaaccgcggtttttatgccctgtcggggcgatccatgctgactacgtccacaggtctgtataccaatgcggttttcgcttttgtaaatatattgaacaaatatatcgaagaggaaaaccctgattatattgccgttgctttcgatcttagggcaaaaactttccggcacggtctatatgagggatacaaagcgcagcggaaaggcatgcccgatgaacttgcaatgcagatacccctcgcgaaggaagtactgagggcgatgaatattgccataatagagcatgaaggttatgaagccgacgatataatcggcagcctttcgttaaaggccgaaaaagagaattttgacgtaataatccttacgggggacagggattctttccagctgatcagcgacagggtgaaagttatcctgccttcgacgaaagccggaaaaacagagaccaacgtatatgataaacaggccatcattgacaaatacggagttttaccccatcagcttattgacgttaaaggcttaatgggagattcgtcagataatatacccggcgttccgggagtgggtgagaaaacggcgttaagccttatttcagcctacggtacactggaaggtgtttacgagcatattgatgaaataaaacagcctaagctgaaagcatcgctgattgaatataaggatcaggcgtttttaagccgtaagctgggtactattgtaagaaatctggagctgtgtgcttcgctggaggatctgaaaagaaaagaaataaaccgcaaagagcttttgaatgttttcagaaaactcgaatttgaaagtatcatatcaaaaatgaatcttgcttccgctgaggtgacagaattacctcccgcgccggaagagcttaaaataacccatatttcagcggcagaggatcttaagaaatggattgcttacctgcttaaccagaaaaacatttccgtccttcaactgattgaccgggaggattcatacagttcccgtctttcagggctggctttgtgcaccggggatgaggttttttatatcgagaccgggactgcactccccgagaatttgattgcaacagagctgaaagaactgtggcagaatgaaaatattcacaaaatcggacacaatataaaagaatttataacctggctgctgaaacacgatgttgaactgaacggcctttatttcgacactatgattgccgaatacctgatagattccataagaaacggctatcctatagcaagcctttctcacaaatacctgaatcgcagcgttccgtcgctggacgaacttttgggcaagggaaagggagcaaaaaagtactctgaaattccgcccgaaaggctgaaagattacagcgcttataacgtcaaagccatttttgacatatggccgatgcagaaaaaagttcttcaggaaaaccggcaggaggagctttttaatgacatagagcttcctcttataaccgtacttgccagtatggaataccacggtttcaaagttgacgccgcaaaacttcacgaatacggcgaagttcttctgtcacgcataaaagacctggaaaaggtaatttacatgctggccggtgaagaattcaacatcaattcaacgaagcagcttggtaccatattattcgaaaaactgaagcttcccgttgtaaaaagtacaaagaccggatactccaccgacgtcgaggttcttgaagagctttattacaagcatgatataataccatgcataatagaataccgccagcttacaaaactttacaccacctacgccgaaggtcttgaaaaagtgataaatcctgtaaccggtaaaattcattcaagttttaaccagacggttacggctacaggccgcatcagcagtaccgaaccaaatttacagaatatcccagtcagacacgaaatgggaagggaaatacggaaagcttttattccgtcgtcggaaaacgctgtttttgttgatgccgattattcacagatagagcttcgcgtgcttgcccatataacaggcgatgaagccctgataaatgctttcgttaagggggaagatattcatacggccacggcgtcgctggtatttgacgtagctcccgaagatgtgacgccggaactgcgcagaaaggcaaaagccgtaaatttcggcatagtgtacgggatcagtgattacgggctggcacgggatttgggaattacccggaaggaagcaaagcggtatatagacgactattttgccaaataccccaaagtaaaaacctatgtggatgaaattgtgcgggtcggccaggaacaggggtatgtggaaactctgttccacagaagaagataccttcccgagcttaaatctaaaaattttcaccagcgttctttcggaaaaagggttgcaatgaatacgcccatacagggcactgcagccgatattattaaaattgcgatggtgaaggtatacaaggctttgaaagaatccggccttaaatccaggcttatcctccaggtccatgacgaacttgttattgagacttttgaagacgaactggagactgtcaaggaacttgtcaaaaagtgcatggaagaggccgttgaattgagtgtgccgcttgttgtcgacgtttcaatcgggaaaaactggtatgaagcctcctgatatggatcc

SEQ ID NO: 246 - DNA, 2772 bp, Artificial Sequence
  Description of Artificial Sequence: Synthetic Clostridium stercorarium DNA Polymerase A821M
atgaaatacctgctgccgaccgctgctgctggtctgctgctcctcgctgcccagccggcgatggccatggatccaaaaataatccttatagacggaaacagtattttaaaccgcggtttttatgccctgtcggggcgatccatgctgactacgtccacaggtctgtataccaatgcggttttcgcttttgtaaatatattgaacaaatatatcgaagaggaaaaccctgattatattgccgttgctttcgatcttagggcaaaaactttccggcacggtctatatgagggatacaaagcgcagcggaaaggcatgcccgatgaacttgcaatgcagatacccctcgcgaaggaagtactgagggcgatgaatattgccataatagagcatgaaggttatgaagccgacgatataatcggcagcctttcgttaaaggccgaaaaagagaattttgacgtaataatccttacgggggacagggattctttccagctgatcagcgacagggtgaaagttatcctgccttcgacgaaagccggaaaaacagagaccaacgtatatgataaacaggccatcattgacaaatacggagttttaccccatcagcttattgacgttaaaggcttaatgggagattcgtcagataatatacccggcgttccgggagtgggtgagaaaacggcgttaagccttatttcagcctacggtacactggaaggtgtttacgagcatattgatgaaataaaacagcctaagctgaaagcatcgctgattgaatataaggatcaggcgtttttaagccgtaagctgggtactattgtaagaaatctggagctgtgtgcttcgctggaggatctgaaaagaaaagaaataaaccgcaaagagcttttgaatgttttcagaaaactcgaatttgaaagtatcatatcaaaaatgaatcttgcttccgctgaggtgacagaattacctcccgcgccggaagagcttaaaataacccatatttcagcggcagaggatcttaagaaatggattgcttacctgcttaaccagaaaaacatttccgtccttcaactgattgaccgggaggattcatacagttcccgtctttcagggctggctttgtgcaccggggatgaggttttttatatcgagaccgggactgcactccccgagaatttgattgcaacagagctgaaagaactgtggcagaatgaaaatattcacaaaatcggacacaatataaaagaatttataacctggctgctgaaacacgatgttgaactgaacggcctttatttcgacactatgattgccgaatacctgatagattccataagaaacggctatcctatagcaagcctttctcacaaatacctgaatcgcagcgttccgtcgctggacgaacttttgggcaagggaaagggagcaaaaaagtactctgaaattccgcccgaaaggctgaaagattacagcgcttataacgtcaaagccatttttgacatatggccgatgcagaaaaaagttcttcaggaaaaccggcaggaggagctttttaatgacatagagcttcctcttataaccgtacttgccagtatggaataccacggtttcaaagttgacgccgcaaaacttcacgaatacggcgaagttcttctgtcacgcataaaagacctggaaaaggtaatttacatgctggccggtgaagaattcaacatcaattcaacgaagcagcttggtaccatattattcgaaaaactgaagcttcccgttgtaaaaagtacaaagaccggatactccaccgacgtcgaggttcttgaagagctttattacaagcatgatataataccatgcataatagaataccgccagcttacaaaactttacaccacctacgccgaaggtcttgaaaaagtgataaatcctgtaaccggtaaaattcattcaagttttaaccagacggttacggctacaggccgcatcagcagtaccgaaccaaatttacagaatatcccagtcagacacgaaatgggaagggaaatacggaaagcttttattccgtcgtcggaaaacgctgtttttgttgatgccgattattcacagatagagcttcgcgtgcttgcccatataacaggcgatgaagccctgataaatgctttcgttaagggggaagatattcatacggccacggcgtcgctggtatttgacgtagctcccgaagatgtgacgccggaactgcgcagaaaggcaaaagccgtaaatttcggcatagtgtacgggatcagtgattacgggctggcacgggatttgggaattacccggaaggaagcaaagcggtatatagacgactattttgccaaataccccaaagtaaaaacctatgtggatgaaattgtgcgggtcggccaggaacaggggtatgtggaaactctgttccacagaagaagataccttcccgagcttatgtctaaaaattttcaccagcgttctttcggaaaaagggttgcaatgaatacgcccatacagggcactgcagccgatattattaaaattgcgatggtgaaggtatacaaggctttgaaagaatccggccttaaatccaggcttatcctccaggtccatgacgaacttgttattgagacttttgaagacgaactggagactgtcaaggaacttgtcaaaaagtgcatggaagaggccgttgaattgagtgtgccgcttgttgtcgacgtttcaatcgggaaaaactggtatgaagcctcctgatatggatcc

SEQ ID NO: 247 - DNA, 2772 bp, Artificial Sequence
  Description of Artificial Sequence: Synthetic Clostridium stercorarium DNA Polymerase A821F
atgaaatacctgctgccgaccgctgctgctggtctgctgctcctcgctgcccagccggcgatggccatggatccaaaaataatccttatagacggaaacagtattttaaaccgcggtttttatgccctgtcggggcgatccatgctgactacgtccacaggtctgtataccaatgcggttttcgcttttgtaaatatattgaacaaatatatcgaagaggaaaaccctgattatattgccgttgctttcgatcttagggcaaaaactttccggcacggtctatatgagggatacaaagcgcagcggaaaggcatgcccgatgaacttgcaatgcagatacccctcgcgaaggaagtactgagggcgatgaatattgccataatagagcatgaaggttatgaagccgacgatataatcggcagcctttcgttaaaggccgaaaaagagaattttgacgtaataatccttacgggggacagggattctttccagctgatcagcgacagggtgaaagttatcctgccttcgacgaaagccggaaaaacagagaccaacgtatatgataaacaggccatcattgacaaatacggagttttaccccatcagcttattgacgttaaaggcttaatgggagattcgtcagataatatacccggcgttccgggagtgggtgagaaaacggcgttaagccttatttcagcctacggtacactggaaggtgtttacgagcatattgatgaaataaaacagcctaagctgaaagcatcgctgattgaatataaggatcaggcgtttttaagccgtaagctgggtactattgtaagaaatctggagctgtgtgcttcgctggaggatctgaaaagaaaagaaataaaccgcaaagagcttttgaatgttttcagaaaactcgaatttgaaagtatcatatcaaaaatgaatcttgcttccgctgaggtgacagaattacctcccgcgccggaagagcttaaaataacccatatttcagcggcagaggatcttaagaaatggattgcttacctgcttaaccagaaaaacatttccgtccttcaactgattgaccgggaggattcatacagttcccgtctttcagggctggctttgtgcaccggggatgaggttttttatatcgagaccgggactgcactccccgagaatttgattgcaacagagctgaaagaactgtggcagaatgaaaatattcacaaaatcggacacaatataaaagaatttataacctggctgctgaaacacgatgttgaactgaacggcctttatttcgacactatgattgccgaatacctgatagattccataagaaacggctatcctatagcaagcctttctcacaaatacctgaatcgcagcgttccgtcgctggacgaacttttgggcaagggaaagggagcaaaaaagtactctgaaattccgcccgaaaggctgaaagattacagcgcttataacgtcaaagccatttttgacatatggccgatgcagaaaaaagttcttcaggaaaaccggcaggaggagctttttaatgacatagagcttcctcttataaccgtacttgccagtatggaataccacggtttcaaagttgacgccgcaaaacttcacgaatacggcgaagttcttctgtcacgcataaaagacctggaaaaggtaatttacatgctggccggtgaagaattcaacatcaattcaacgaagcagcttggtaccatattattcgaaaaactgaagcttcccgttgtaaaaagtacaaagaccggatactccaccgacgtcgaggttcttgaagagctttattacaagcatgatataataccatgcataatagaataccgccagcttacaaaactttacaccacctacgccgaaggtcttgaaaaagtgataaatcctgtaaccggtaaaattcattcaagttttaaccagacggttacggctacaggccgcatcagcagtaccgaaccaaatttacagaatatcccagtcagacacgaaatgggaagggaaatacggaaagcttttattccgtcgtcggaaaacgctgtttttgttgatgccgattattcacagatagagcttcgcgtgcttgcccatataacaggcgatgaagccctgataaatgctttcgttaagggggaagatattcatacggccacggcgtcgctggtatttgacgtagctcccgaagatgtgacgccggaactgcgcagaaaggcaaaagccgtaaatttcggcatagtgtacgggatcagtgattacgggctggcacgggatttgggaattacccggaaggaagcaaagcggtatatagacgactattttgccaaataccccaaagtaaaaacctatgtggatgaaattgtgcgggtcggccaggaacaggggtatgtggaaactctgttccacagaagaagataccttcccgagcttttttctaaaaattttcaccagcgttctttcggaaaaagggttgcaatgaatacgcccatacagggcactgcagccgatattattaaaattgcgatggtgaaggtatacaaggctttgaaagaatccggccttaaatccaggcttatcctccaggtccatgacgaacttgttattgagacttttgaagacgaactggagactgtcaaggaacttgtcaaaaagtgcatggaagaggccgttgaattgagtgtgccgcttgttgtcgacgtttcaatcgggaaaaactggtatgaagcctcctgatatggatcc

SEQ ID NO: 248 - DNA, 2772 bp, Artificial Sequence
  Description of Artificial Sequence: Synthetic Clostridium stercorarium DNA Polymerase A821P
atgaaatacctgctgccgaccgctgctgctggtctgctgctcctcgctgcccagccggcgatggccatggatccaaaaataatccttatagacggaaacagtattttaaaccgcggtttttatgccctgtcggggcgatccatgctgactacgtccacaggtctgtataccaatgcggttttcgcttttgtaaatatattgaacaaatatatcgaagaggaaaaccctgattatattgccgttgctttcgatcttagggcaaaaactttccggcacggtctatatgagggatacaaagcgcagcggaaaggcatgcccgatgaacttgcaatgcagatacccctcgcgaaggaagtactgagggcgatgaatattgccataatagagcatgaaggttatgaagccgacgatataatcggcagcctttcgttaaaggccgaaaaagagaattttgacgtaataatccttacgggggacagggattctttccagctgatcagcgacagggtgaaagttatcctgccttcgacgaaagccggaaaaacagagaccaacgtatatgataaacaggccatcattgacaaatacggagttttaccccatcagcttattgacgttaaaggcttaatgggagattcgtcagataatatacccggcgttccgggagtgggtgagaaaacggcgttaagccttatttcagcctacggtacactggaaggtgtttacgagcatattgatgaaataaaacagcctaagctgaaagcatcgctgattgaatataaggatcaggcgtttttaagccgtaagctgggtactattgtaagaaatctggagctgtgtgcttcgctggaggatctgaaaagaaaagaaataaaccgcaaagagcttttgaatgttttcagaaaactcgaatttgaaagtatcatatcaaaaatgaatcttgcttccgctgaggtgacagaattacctcccgcgccggaagagcttaaaataacccatatttcagcggcagaggatcttaagaaatggattgcttacctgcttaaccagaaaaacatttccgtccttcaactgattgaccgggaggattcatacagttcccgtctttcagggctggctttgtgcaccggggatgaggttttttatatcgagaccgggactgcactccccgagaatttgattgcaacagagctgaaagaactgtggcagaatgaaaatattcacaaaatcggacacaatataaaagaatttataacctggctgctgaaacacgatgttgaactgaacggcctttatttcgacactatgattgccgaatacctgatagattccataagaaacggctatcctatagcaagcctttctcacaaatacctgaatcgcagcgttccgtcgctggacgaacttttgggcaagggaaagggagcaaaaaagtactctgaaattccgcccgaaaggctgaaagattacagcgcttataacgtcaaagccatttttgacatatggccgatgcagaaaaaagttcttcaggaaaaccggcaggaggagctttttaatgacatagagcttcctcttataaccgtacttgccagtatggaataccacggtttcaaagttgacgccgcaaaacttcacgaatacggcgaagttcttctgtcacgcataaaagacctggaaaaggtaatttacatgctggccggtgaagaattcaacatcaattcaacgaagcagcttggtaccatattattcgaaaaactgaagcttcccgttgtaaaaagtacaaagaccggatactccaccgacgtcgaggttcttgaagagctttattacaagcatgatataataccatgcataatagaataccgccagcttacaaaactttacaccacctacgccgaaggtcttgaaaaagtgataaatcctgtaaccggtaaaattcattcaagttttaaccagacggttacggctacaggccgcatcagcagtaccgaaccaaatttacagaatatcccagtcagacacgaaatgggaagggaaatacggaaagcttttattccgtcgtcggaaaacgctgtttttgttgatgccgattattcacagatagagcttcgcgtgcttgcccatataacaggcgatgaagccctgataaatgctttcgttaagggggaagatattcatacggccacggcgtcgctggtatttgacgtagctcccgaagatgtgacgccggaactgcgcagaaaggcaaaagccgtaaatttcggcatagtgtacgggatcagtgattacgggctggcacgggatttgggaattacccggaaggaagcaaagcggtatatagacgactattttgccaaataccccaaagtaaaaacctatgtggatgaaattgtgcgggtcggccaggaacaggggtatgtggaaactctgttccacagaagaagataccttcccgagcttccttctaaaaattttcaccagcgttctttcggaaaaagggttgcaatgaatacgcccatacagggcactgcagccgatattattaaaattgcgatggtgaaggtatacaaggctttgaaagaatccggccttaaatccaggcttatcctccaggtccatgacgaacttgttattgagacttttgaagacgaactggagactgtcaaggaacttgtcaaaaagtgcatggaagaggccgttgaattgagtgtgccgcttgttgtcgacgtttcaatcgggaaaaactggtatgaagcctcctgatatggatcc

SEQ ID NO: 249 - DNA, 2772 bp, Artificial Sequence
  Description of Artificial Sequence: Synthetic Clostridium stercorarium DNA Polymerase A821S
atgaaatacctgctgccgaccgctgctgctggtctgctgctcctcgctgcccagccggcgatggccatggatccaaaaataatccttatagacggaaacagtattttaaaccgcggtttttatgccctgtcggggcgatccatgctgactacgtccacaggtctgtataccaatgcggttttcgcttttgtaaatatattgaacaaatatatcgaagaggaaaaccctgattatattgccgttgctttcgatcttagggcaaaaactttccggcacggtctatatgagggatacaaagcgcagcggaaaggcatgcccgatgaacttgcaatgcagatacccctcgcgaaggaagtactgagggcgatgaatattgccataatagagcatgaaggttatgaagccgacgatataatcggcagcctttcgttaaaggccgaaaaagagaattttgacgtaataatccttacgggggacagggattctttccagctgatcagcgacagggtgaaagttatcctgccttcgacgaaagccggaaaaacagagaccaacgtatatgataaacaggccatcattgacaaatacggagttttaccccatcagcttattgacgttaaaggcttaatgggagattcgtcagataatatacccggcgttccgggagtgggtgagaaaacggcgttaagccttatttcagcctacggtacactggaaggtgtttacgagcatattgatgaaataaaacagcctaagctgaaagcatcgctgattgaatataaggatcaggcgtttttaagccgtaagctgggtactattgtaagaaatctggagctgtgtgcttcgctggaggatctgaaaagaaaagaaataaaccgcaaagagcttttgaatgttttcagaaaactcgaatttgaaagtatcatatcaaaaatgaatcttgcttccgctgaggtgacagaattacctcccgcgccggaagagcttaaaataacccatatttcagcggcagaggatcttaagaaatggattgcttacctgcttaaccagaaaaacatttccgtccttcaactgattgaccgggaggattcatacagttcccgtctttcagggctggctttgtgcaccggggatgaggttttttatatcgagaccgggactgcactccccgagaatttgattgcaacagagctgaaagaactgtggcagaatgaaaatattcacaaaatcggacacaatataaaagaatttataacctggctgctgaaacacgatgttgaactgaacggcctttatttcgacactatgattgccgaatacctgatagattccataagaaacggctatcctatagcaagcctttctcacaaatacctgaatcgcagcgttccgtcgctggacgaacttttgggcaagggaaagggagcaaaaaagtactctgaaattccgcccgaaaggctgaaagattacagcgcttataacgtcaaagccatttttgacatatggccgatgcagaaaaaagttcttcaggaaaaccggcaggaggagctttttaatgacatagagcttcctcttataaccgtacttgccagtatggaataccacggtttcaaagttgacgccgcaaaacttcacgaatacggcgaagttcttctgtcacgcataaaagacctggaaaaggtaatttacatgctggccggtgaagaattcaacatcaattcaacgaagcagcttggtaccatattattcgaaaaactgaagcttcccgttgtaaaaagtacaaagaccggatactccaccgacgtcgaggttcttgaagagctttattacaagcatgatataataccatgcataatagaataccgccagcttacaaaactttacaccacctacgccgaaggtcttgaaaaagtgataaatcctgtaaccggtaaaattcattcaagttttaaccagacggttacggctacaggccgcatcagcagtaccgaaccaaatttacagaatatcccagtcagacacgaaatgggaagggaaatacggaaagcttttattccgtcgtcggaaaacgctgtttttgttgatgccgattattcacagatagagcttcgcgtgcttgcccatataacaggcgatgaagccctgataaatgctttcgttaagggggaagatattcatacggccacggcgtcgctggtatttgacgtagctcccgaagatgtgacgccggaactgcgcagaaaggcaaaagccgtaaatttcggcatagtgtacgggatcagtgattacgggctggcacgggatttgggaattacccggaaggaagcaaagcggtatatagacgactattttgccaaataccccaaagtaaaaacctatgtggatgaaattgtgcgggtcggccaggaacaggggtatgtggaaactctgttccacagaagaagataccttcccgagctttcttctaaaaattttcaccagcgttctttcggaaaaagggttgcaatgaatacgcccatacagggcactgcagccgatattattaaaattgcgatggtgaaggtatacaaggctttgaaagaatccggccttaaatccaggcttatcctccaggtccatgacgaacttgttattgagacttttgaagacgaactggagactgtcaaggaacttgtcaaaaagtgcatggaagaggccgttgaattgagtgtgccgcttgttgtcgacgtttcaatcgggaaaaactggtatgaagcctcctgatatggatcc

SEQ ID NO: 250 - DNA, 2772 bp, Artificial Sequence
  Description of Artificial Sequence: Synthetic Clostridium stercorarium DNA Polymerase A821T
atgaaatacctgctgccgaccgctgctgctggtctgctgctcctcgctgcccagccggcgatggccatggatccaaaaataatccttatagacggaaacagtattttaaaccgcggtttttatgccctgtcggggcgatccatgctgactacgtccacaggtctgtataccaatgcggttttcgcttttgtaaatatattgaacaaatatatcgaagaggaaaaccctgattatattgccgttgctttcgatcttagggcaaaaactttccggcacggtctatatgagggatacaaagcgcagcggaaaggcatgcccgatgaacttgcaatgcagatacccctcgcgaaggaagtactgagggcgatgaatattgccataatagagcatgaaggttatgaagccgacgatataatcggcagcctttcgttaaaggccgaaaaagagaattttgacgtaataatccttacgggggacagggattctttccagctgatcagcgacagggtgaaagttatcctgccttcgacgaaagccggaaaaacagagaccaacgtatatgataaacaggccatcattgacaaatacggagttttaccccatcagcttattgacgttaaaggcttaatgggagattcgtcagataatatacccggcgttccgggagtgggtgagaaaacggcgttaagccttatttcagcctacggtacactggaaggtgtttacgagcatattgatgaaataaaacagcctaagctgaaagcatcgctgattgaatataaggatcaggcgtttttaagccgtaagctgggtactattgtaagaaatctggagctgtgtgcttcgctggaggatctgaaaagaaaagaaataaaccgcaaagagcttttgaatgttttcagaaaactcgaatttgaaagtatcatatcaaaaatgaatcttgcttccgctgaggtgacagaattacctcccgcgccggaagagcttaaaataacccatatttcagcggcagaggatcttaagaaatggattgcttacctgcttaaccagaaaaacatttccgtccttcaactgattgaccgggaggattcatacagttcccgtctttcagggctggctttgtgcaccggggatgaggttttttatatcgagaccgggactgcactccccgagaatttgattgcaacagagctgaaagaactgtggcagaatgaaaatattcacaaaatcggacacaatataaaagaatttataacctggctgctgaaacacgatgttgaactgaacggcctttatttcgacactatgattgccgaatacctgatagattccataagaaacggctatcctatagcaagcctttctcacaaatacctgaatcgcagcgttccgtcgctggacgaacttttgggcaagggaaagggagcaaaaaagtactctgaaattccgcccgaaaggctgaaagattacagcgcttataacgtcaaagccatttttgacatatggccgatgcagaaaaaagttcttcaggaaaaccggcaggaggagctttttaatgacatagagcttcctcttataaccgtacttgccagtatggaataccacggtttcaaagttgacgccgcaaaacttcacgaatacggcgaagttcttctgtcacgcataaaagacctggaaaaggtaatttacatgctggccggtgaagaattcaacatcaattcaacgaagcagcttggtaccatattattcgaaaaactgaagcttcccgttgtaaaaagtacaaagaccggatactccaccgacgtcgaggttcttgaagagctttattacaagcatgatataataccatgcataatagaataccgccagcttacaaaactttacaccacctacgccgaaggtcttgaaaaagtgataaatcctgtaaccggtaaaattcattcaagttttaaccagacggttacggctacaggccgcatcagcagtaccgaaccaaatttacagaatatcccagtcagacacgaaatgggaagggaaatacggaaagcttttattccgtcgtcggaaaacgctgtttttgttgatgccgattattcacagatagagcttcgcgtgcttgcccatataacaggcgatgaagccctgataaatgctttcgttaagggggaagatattcatacggccacggcgtcgctggtatttgacgtagctcccgaagatgtgacgccggaactgcgcagaaaggcaaaagccgtaaatttcggcatagtgtacgggatcagtgattacgggctggcacgggatttgggaattacccggaaggaagcaaagcggtatatagacgactattttgccaaataccccaaagtaaaaacctatgtggatgaaattgtgcgggtcggccaggaacaggggtatgtggaaactctgttccacagaagaagataccttcccgagcttacttctaaaaattttcaccagcgttctttcggaaaaagggttgcaatgaatacgcccatacagggcactgcagccgatattattaaaattgcgatggtgaaggtatacaaggctttgaaagaatccggccttaaatccaggcttatcctccaggtccatgacgaacttgttattgagacttttgaagacgaactggagactgtcaaggaacttgtcaaaaagtgcatggaagaggccgttgaattgagtgtgccgcttgttgtcgacgtttcaatcgggaaaaactggtatgaagcctcctgatatggatcc

SEQ ID NO: 251 - DNA, 2772 bp, Artificial Sequence
  Description of Artificial Sequence: Synthetic Clostridium stercorarium DNA Polymerase A821W
atgaaatacctgctgccgaccgctgctgctggtctgctgctcctcgctgcccagccggcgatggccatggatccaaaaataatccttatagacggaaacagtattttaaaccgcggtttttatgccctgtcggggcgatccatgctgactacgtccacaggtctgtataccaatgcggttttcgcttttgtaaatatattgaacaaatatatcgaagaggaaaaccctgattatattgccgttgctttcgatcttagggcaaaaactttccggcacggtctatatgagggatacaaagcgcagcggaaaggcatgcccgatgaacttgcaatgcagatacccctcgcgaaggaagtactgagggcgatgaatattgccataatagagcatgaaggttatgaagccgacgatataatcggcagcctttcgttaaaggccgaaaaagagaattttgacgtaataatccttacgggggacagggattctttccagctgatcagcgacagggtgaaagttatcctgccttcgacgaaagccggaaaaacagagaccaacgtatatgataaacaggccatcattgacaaatacggagttttaccccatcagcttattgacgttaaaggcttaatgggagattcgtcagataatatacccggcgttccgggagtgggtgagaaaacggcgttaagccttatttcagcctacggtacactggaaggtgtttacgagcatattgatgaaataaaacagcctaagctgaaagcatcgctgattgaatataaggatcaggcgtttttaagccgtaagctgggtactattgtaagaaatctggagctgtgtgcttcgctggaggatctgaaaagaaaagaaataaaccgcaaagagcttttgaatgttttcagaaaactcgaatttgaaagtatcatatcaaaaatgaatcttgcttccgctgaggtgacagaattacctcccgcgccggaagagcttaaaataacccatatttcagcggcagaggatcttaagaaatggattgcttacctgcttaaccagaaaaacatttccgtccttcaactgattgaccgggaggattcatacagttcccgtctttcagggctggctttgtgcaccggggatgaggttttttatatcgagaccgggactgcactccccgagaatttgattgcaacagagctgaaagaactgtggcagaatgaaaatattcacaaaatcggacacaatataaaagaatttataacctggctgctgaaacacgatgttgaactgaacggcctttatttcgacactatgattgccgaatacctgatagattccataagaaacggctatcctatagcaagcctttctcacaaatacctgaatcgcagcgttccgtcgctggacgaacttttgggcaagggaaagggagcaaaaaagtactctgaaattccgcccgaaaggctgaaagattacagcgcttataacgtcaaagccatttttgacatatggccgatgcagaaaaaagttcttcaggaaaaccggcaggaggagctttttaatgacatagagcttcctcttataaccgtacttgccagtatggaataccacggtttcaaagttgacgccgcaaaacttcacgaatacggcgaagttcttctgtcacgcataaaagacctggaaaaggtaatttacatgctggccggtgaagaattcaacatcaattcaacgaagcagcttggtaccatattattcgaaaaactgaagcttcccgttgtaaaaagtacaaagaccggatactccaccgacgtcgaggttcttgaagagctttattacaagcatgatataataccatgcataatagaataccgccagcttacaaaactttacaccacctacgccgaaggtcttgaaaaagtgataaatcctgtaaccggtaaaattcattcaagttttaaccagacggttacggctacaggccgcatcagcagtaccgaaccaaatttacagaatatcccagtcagacacgaaatgggaagggaaatacggaaagcttttattccgtcgtcggaaaacgctgtttttgttgatgccgattattcacagatagagcttcgcgtgcttgcccatataacaggcgatgaagccctgataaatgctttcgttaagggggaagatattcatacggccacggcgtcgctggtatttgacgtagctcccgaagatgtgacgccggaactgcgcagaaaggcaaaagccgtaaatttcggcatagtgtacgggatcagtgattacgggctggcacgggatttgggaattacccggaaggaagcaaagcggtatatagacgactattttgccaaataccccaaagtaaaaacctatgtggatgaaattgtgcgggtcggccaggaacaggggtatgtggaaactctgttccacagaagaagataccttcccgagctttggtctaaaaattttcaccagcgttctttcggaaaaagggttgcaatgaatacgcccatacagggcactgcagccgatattattaaaattgcgatggtgaaggtatacaaggctttgaaagaatccggccttaaatccaggcttatcctccaggtccatgacgaacttgttattgagacttttgaagacgaactggagactgtcaaggaacttgtcaaaaagtgcatggaagaggccgttgaattgagtgtgccgcttgttgtcgacgtttcaatcgggaaaaactggtatgaagcctcctgatatggatcc

SEQ ID NO: 252 - DNA, 2772 bp, Artificial Sequence
  Description of Artificial Sequence: Synthetic Clostridium stercorarium DNA Polymerase A821Y
atgaaatacctgctgccgaccgctgctgctggtctgctgctcctcgctgcccagccggcgatggccatggatccaaaaataatccttatagacggaaacagtattttaaaccgcggtttttatgccctgtcggggcgatccatgctgactacgtccacaggtctgtataccaatgcggttttcgcttttgtaaatatattgaacaaatatatcgaagaggaaaaccctgattatattgccgttgctttcgatcttagggcaaaaactttccggcacggtctatatgagggatacaaagcgcagcggaaaggcatgcccgatgaacttgcaatgcagatacccctcgcgaaggaagtactgagggcgatgaatattgccataatagagcatgaaggttatgaagccgacgatataatcggcagcctttcgttaaaggccgaaaaagagaattttgacgtaataatccttacgggggacagggattctttccagctgatcagcgacagggtgaaagttatcctgccttcgacgaaagccggaaaaacagagaccaacgtatatgataaacaggccatcattgacaaatacggagttttaccccatcagcttattgacgttaaaggcttaatgggagattcgtcagataatatacccggcgttccgggagtgggtgagaaaacggcgttaagccttatttcagcctacggtacactggaaggtgtttacgagcatattgatgaaataaaacagcctaagctgaaagcatcgctgattgaatataaggatcaggcgtttttaagccgtaagctgggtactattgtaagaaatctggagctgtgtgcttcgctggaggatctgaaaagaaaagaaataaaccgcaaagagcttttgaatgttttcagaaaactcgaatttgaaagtatcatatcaaaaatgaatcttgcttccgctgaggtgacagaattacctcccgcgccggaagagcttaaaataacccatatttcagcggcagaggatcttaagaaatggattgcttacctgcttaaccagaaaaacatttccgtccttcaactgattgaccgggaggattcatacagttcccgtctttcagggctggctttgtgcaccggggatgaggttttttatatcgagaccgggactgcactccccgagaatttgattgcaacagagctgaaagaactgtggcagaatgaaaatattcacaaaatcggacacaatataaaagaatttataacctggctgctgaaacacgatgttgaactgaacggcctttatttcgacactatgattgccgaatacctgatagattccataagaaacggctatcctatagcaagcctttctcacaaatacctgaatcgcagcgttccgtcgctggacgaacttttgggcaagggaaagggagcaaaaaagtactctgaaattccgcccgaaaggctgaaagattacagcgcttataacgtcaaagccatttttgacatatggccgatgcagaaaaaagttcttcaggaaaaccggcaggaggagctttttaatgacatagagcttcctcttataaccgtacttgccagtatggaataccacggtttcaaagttgacgccgcaaaacttcacgaatacggcgaagttcttctgtcacgcataaaagacctggaaaaggtaatttacatgctggccggtgaagaattcaacatcaattcaacgaagcagcttggtaccatattattcgaaaaactgaagcttcccgttgtaaaaagtacaaagaccggatactccaccgacgtcgaggttcttgaagagctttattacaagcatgatataataccatgcataatagaataccgccagcttacaaaactttacaccacctacgccgaaggtcttgaaaaagtgataaatcctgtaaccggtaaaattcattcaagttttaaccagacggttacggctacaggccgcatcagcagtaccgaaccaaatttacagaatatcccagtcagacacgaaatgggaagggaaatacggaaagcttttattccgtcgtcggaaaacgctgtttttgttgatgccgattattcacagatagagcttcgcgtgcttgcccatataacaggcgatgaagccctgataaatgctttcgttaagggggaagatattcatacggccacggcgtcgctggtatttgacgtagctcccgaagatgtgacgccggaactgcgcagaaaggcaaaagccgtaaatttcggcatagtgtacgggatcagtgattacgggctggcacgggatttgggaattacccggaaggaagcaaagcggtatatagacgactattttgccaaataccccaaagtaaaaacctatgtggatgaaattgtgcgggtcggccaggaacaggggtatgtggaaactctgttccacagaagaagataccttcccgagctttattctaaaaattttcaccagcgttctttcggaaaaagggttgcaatgaatacgcccatacagggcactgcagccgatattattaaaattgcgatggtgaaggtatacaaggctttgaaagaatccggccttaaatccaggcttatcctccaggtccatgacgaacttgttattgagacttttgaagacgaactggagactgtcaaggaacttgtcaaaaagtgcatggaagaggccgttgaattgagtgtgccgcttgttgtcgacgtttcaatcgggaaaaactggtatgaagcctcctgatatggatcc

SEQ ID NO: 253 - DNA, 2772 bp, Artificial Sequence
  Description of Artificial Sequence: Synthetic Clostridium stercorarium DNA Polymerase A821V
atgaaatacctgctgccgaccgctgctgctggtctgctgctcctcgctgcccagccggcgatggccatggatccaaaaataatccttatagacggaaacagtattttaaaccgcggtttttatgccctgtcggggcgatccatgctgactacgtccacaggtctgtataccaatgcggttttcgcttttgtaaatatattgaacaaatatatcgaagaggaaaaccctgattatattgccgttgctttcgatcttagggcaaaaactttccggcacggtctatatgagggatacaaagcgcagcggaaaggcatgcccgatgaacttgcaatgcagatacccctcgcgaaggaagtactgagggcgatgaatattgccataatagagcatgaaggttatgaagccgacgatataatcggcagcctttcgttaaaggccgaaaaagagaattttgacgtaataatccttacgggggacagggattctttccagctgatcagcgacagggtgaaagttatcctgccttcgacgaaagccggaaaaacagagaccaacgtatatgataaacaggccatcattgacaaatacggagttttaccccatcagcttattgacgttaaaggcttaatgggagattcgtcagataatatacccggcgttccgggagtgggtgagaaaacggcgttaagccttatttcagcctacggtacactggaaggtgtttacgagcatattgatgaaataaaacagcctaagctgaaagcatcgctgattgaatataaggatcaggcgtttttaagccgtaagctgggtactattgtaagaaatctggagctgtgtgcttcgctggaggatctgaaaagaaaagaaataaaccgcaaagagcttttgaatgttttcagaaaactcgaatttgaaagtatcatatcaaaaatgaatcttgcttccgctgaggtgacagaattacctcccgcgccggaagagcttaaaataacccatatttcagcggcagaggatcttaagaaatggattgcttacctgcttaaccagaaaaacatttccgtccttcaactgattgaccgggaggattcatacagttcccgtctttcagggctggctttgtgcaccggggatgaggttttttatatcgagaccgggactgcactccccgagaatttgattgcaacagagctgaaagaactgtggcagaatgaaaatattcacaaaatcggacacaatataaaagaatttataacctggctgctgaaacacgatgttgaactgaacggcctttatttcgacactatgattgccgaatacctgatagattccataagaaacggctatcctatagcaagcctttctcacaaatacctgaatcgcagcgttccgtcgctggacgaacttttgggcaagggaaagggagcaaaaaagtactctgaaattccgcccgaaaggctgaaagattacagcgcttataacgtcaaagccatttttgacatatggccgatgcagaaaaaagttcttcaggaaaaccggcaggaggagctttttaatgacatagagcttcctcttataaccgtacttgccagtatggaataccacggtttcaaagttgacgccgcaaaacttcacgaatacggcgaagttcttctgtcacgcataaaagacctggaaaaggtaatttacatgctggccggtgaagaattcaacatcaattcaacgaagcagcttggtaccatattattcgaaaaactgaagcttcccgttgtaaaaagtacaaagaccggatactccaccgacgtcgaggttcttgaagagctttattacaagcatgatataataccatgcataatagaataccgccagcttacaaaactttacaccacctacgccgaaggtcttgaaaaagtgataaatcctgtaaccggtaaaattcattcaagttttaaccagacggttacggctacaggccgcatcagcagtaccgaaccaaatttacagaatatcccagtcagacacgaaatgggaagggaaatacggaaagcttttattccgtcgtcggaaaacgctgtttttgttgatgccgattattcacagatagagcttcgcgtgcttgcccatataacaggcgatgaagccctgataaatgctttcgttaagggggaagatattcatacggccacggcgtcgctggtatttgacgtagctcccgaagatgtgacgccggaactgcgcagaaaggcaaaagccgtaaatttcggcatagtgtacgggatcagtgattacgggctggcacgggatttgggaattacccggaaggaagcaaagcggtatatagacgactattttgccaaataccccaaagtaaaaacctatgtggatgaaattgtgcgggtcggccaggaacaggggtatgtggaaactctgttccacagaagaagataccttcccgagcttgtttctaaaaattttcaccagcgttctttcggaaaaagggttgcaatgaatacgcccatacagggcactgcagccgatattattaaaattgcgatggtgaaggtatacaaggctttgaaagaatccggccttaaatccaggcttatcctccaggtccatgacgaacttgttattgagacttttgaagacgaactggagactgtcaaggaacttgtcaaaaagtgcatggaagaggccgttgaattgagtgtgccgcttgttgtcgacgtttcaatcgggaaaaactggtatgaagcctcctgatatggatcc

SEQ ID NO: 254 - DNA, 2772 bp, Artificial Sequence
  Description of Artificial Sequence: Synthetic Clostridium stercorarium DNA Polymerase S822A
atgaaatacctgctgccgaccgctgctgctggtctgctgctcctcgctgcccagccggcgatggccatggatccaaaaataatccttatagacggaaacagtattttaaaccgcggtttttatgccctgtcggggcgatccatgctgactacgtccacaggtctgtataccaatgcggttttcgcttttgtaaatatattgaacaaatatatcgaagaggaaaaccctgattatattgccgttgctttcgatcttagggcaaaaactttccggcacggtctatatgagggatacaaagcgcagcggaaaggcatgcccgatgaacttgcaatgcagatacccctcgcgaaggaagtactgagggcgatgaatattgccataatagagcatgaaggttatgaagccgacgatataatcggcagcctttcgttaaaggccgaaaaagagaattttgacgtaataatccttacgggggacagggattctttccagctgatcagcgacagggtgaaagttatcctgccttcgacgaaagccggaaaaacagagaccaacgtatatgataaacaggccatcattgacaaatacggagttttaccccatcagcttattgacgttaaaggcttaatgggagattcgtcagataatatacccggcgttccgggagtgggtgagaaaacggcgttaagccttatttcagcctacggtacactggaaggtgtttacgagcatattgatgaaataaaacagcctaagctgaaagcatcgctgattgaatataaggatcaggcgtttttaagccgtaagctgggtactattgtaagaaatctggagctgtgtgcttcgctggaggatctgaaaagaaaagaaataaaccgcaaagagcttttgaatgttttcagaaaactcgaatttgaaagtatcatatcaaaaatgaatcttgcttccgctgaggtgacagaattacctcccgcgccggaagagcttaaaataacccatatttcagcggcagaggatcttaagaaatggattgcttacctgcttaaccagaaaaacatttccgtccttcaactgattgaccgggaggattcatacagttcccgtctttcagggctggctttgtgcaccggggatgaggttttttatatcgagaccgggactgcactccccgagaatttgattgcaacagagctgaaagaactgtggcagaatgaaaatattcacaaaatcggacacaatataaaagaatttataacctggctgctgaaacacgatgttgaactgaacggcctttatttcgacactatgattgccgaatacctgatagattccataagaaacggctatcctatagcaagcctttctcacaaatacctgaatcgcagcgttccgtcgctggacgaacttttgggcaagggaaagggagcaaaaaagtactctgaaattccgcccgaaaggctgaaagattacagcgcttataacgtcaaagccatttttgacatatggccgatgcagaaaaaagttcttcaggaaaaccggcaggaggagctttttaatgacatagagcttcctcttataaccgtacttgccagtatggaataccacggtttcaaagttgacgccgcaaaacttcacgaatacggcgaagttcttctgtcacgcataaaagacctggaaaaggtaatttacatgctggccggtgaagaattcaacatcaattcaacgaagcagcttggtaccatattattcgaaaaactgaagcttcccgttgtaaaaagtacaaagaccggatactccaccgacgtcgaggttcttgaagagctttattacaagcatgatataataccatgcataatagaataccgccagcttacaaaactttacaccacctacgccgaaggtcttgaaaaagtgataaatcctgtaaccggtaaaattcattcaagttttaaccagacggttacggctacaggccgcatcagcagtaccgaaccaaatttacagaatatcccagtcagacacgaaatgggaagggaaatacggaaagcttttattccgtcgtcggaaaacgctgtttttgttgatgccgattattcacagatagagcttcgcgtgcttgcccatataacaggcgatgaagccctgataaatgctttcgttaagggggaagatattcatacggccacggcgtcgctggtatttgacgtagctcccgaagatgtgacgccggaactgcgcagaaaggcaaaagccgtaaatttcggcatagtgtacgggatcagtgattacgggctggcacgggatttgggaattacccggaaggaagcaaagcggtatatagacgactattttgccaaataccccaaagtaaaaacctatgtggatgaaattgtgcgggtcggccaggaacaggggtatgtggaaactctgttccacagaagaagataccttcccgagcttgcagctaaaaattttcaccagcgttctttcggaaaaagggttgcaatgaatacgcccatacagggcactgcagccgatattattaaaattgcgatggtgaaggtatacaaggctttgaaagaatccggccttaaatccaggcttatcctccaggtccatgacgaacttgttattgagacttttgaagacgaactggagactgtcaaggaacttgtcaaaaagtgcatggaagaggccgttgaattgagtgtgccgcttgttgtcgacgtttcaatcgggaaaaactggtatgaagcctcctgatatggatcc

SEQ ID NO: 255 - DNA, 2772 bp, Artificial Sequence
  Description of Artificial Sequence: Synthetic Clostridium stercorarium DNA Polymerase S822R
atgaaatacctgctgccgaccgctgctgctggtctgctgctcctcgctgcccagccggcgatggccatggatccaaaaataatccttatagacggaaacagtattttaaaccgcggtttttatgccctgtcggggcgatccatgctgactacgtccacaggtctgtataccaatgcggttttcgcttttgtaaatatattgaacaaatatatcgaagaggaaaaccctgattatattgccgttgctttcgatcttagggcaaaaactttccggcacggtctatatgagggatacaaagcgcagcggaaaggcatgcccgatgaacttgcaatgcagatacccctcgcgaaggaagtactgagggcgatgaatattgccataatagagcatgaaggttatgaagccgacgatataatcggcagcctttcgttaaaggccgaaaaagagaattttgacgtaataatccttacgggggacagggattctttccagctgatcagcgacagggtgaaagttatcctgccttcgacgaaagccggaaaaacagagaccaacgtatatgataaacaggccatcattgacaaatacggagttttaccccatcagcttattgacgttaaaggcttaatgggagattcgtcagataatatacccggcgttccgggagtgggtgagaaaacggcgttaagccttatttcagcctacggtacactggaaggtgtttacgagcatattgatgaaataaaacagcctaagctgaaagcatcgctgattgaatataaggatcaggcgtttttaagccgtaagctgggtactattgtaagaaatctggagctgtgtgcttcgctggaggatctgaaaagaaaagaaataaaccgcaaagagcttttgaatgttttcagaaaactcgaatttgaaagtatcatatcaaaaatgaatcttgcttccgctgaggtgacagaattacctcccgcgccggaagagcttaaaataacccatatttcagcggcagaggatcttaagaaatggattgcttacctgcttaaccagaaaaacatttccgtccttcaactgattgaccgggaggattcatacagttcccgtctttcagggctggctttgtgcaccggggatgaggttttttatatcgagaccgggactgcactccccgagaatttgattgcaacagagctgaaagaactgtggcagaatgaaaatattcacaaaatcggacacaatataaaagaatttataacctggctgctgaaacacgatgttgaactgaacggcctttatttcgacactatgattgccgaatacctgatagattccataagaaacggctatcctatagcaagcctttctcacaaatacctgaatcgcagcgttccgtcgctggacgaacttttgggcaagggaaagggagcaaaaaagtactctgaaattccgcccgaaaggctgaaagattacagcgcttataacgtcaaagccatttttgacatatggccgatgcagaaaaaagttcttcaggaaaaccggcaggaggagctttttaatgacatagagcttcctcttataaccgtacttgccagtatggaataccacggtttcaaagttgacgccgcaaaacttcacgaatacggcgaagttcttctgtcacgcataaaagacctggaaaaggtaatttacatgctggccggtgaagaattcaacatcaattcaacgaagcagcttggtaccatattattcgaaaaactgaagcttcccgttgtaaaaagtacaaagaccggatactccaccgacgtcgaggttcttgaagagctttattacaagcatgatataataccatgcataatagaataccgccagcttacaaaactttacaccacctacgccgaaggtcttgaaaaagtgataaatcctgtaaccggtaaaattcattcaagttttaaccagacggttacggctacaggccgcatcagcagtaccgaaccaaatttacagaatatcccagtcagacacgaaatgggaagggaaatacggaaagcttttattccgtcgtcggaaaacgctgtttttgttgatgccgattattcacagatagagcttcgcgtgcttgcccatataacaggcgatgaagccctgataaatgctttcgttaagggggaagatattcatacggccacggcgtcgctggtatttgacgtagctcccgaagatgtgacgccggaactgcgcagaaaggcaaaagccgtaaatttcggcatagtgtacgggatcagtgattacgggctggcacgggatttgggaattacccggaaggaagcaaagcggtatatagacgactattttgccaaataccccaaagtaaaaacctatgtggatgaaattgtgcgggtcggccaggaacaggggtatgtggaaactctgttccacagaagaagataccttcccgagcttgcacgtaaaaattttcaccagcgttctttcggaaaaagggttgcaatgaatacgcccatacagggcactgcagccgatattattaaaattgcgatggtgaaggtatacaaggctttgaaagaatccggccttaaatccaggcttatcctccaggtccatgacgaacttgttattgagacttttgaagacgaactggagactgtcaaggaacttgtcaaaaagtgcatggaagaggccgttgaattgagtgtgccgcttgttgtcgacgtttcaatcgggaaaaactggtatgaagcctcctgatatggatcc

SEQ ID NO: 256 - DNA, 2772 bp, Artificial Sequence
  Description of Artificial Sequence: Synthetic Clostridium stercorarium DNA Polymerase S822N
atgaaatacctgctgccgaccgctgctgctggtctgctgctcctcgctgcccagccggcgatggccatggatccaaaaataatccttatagacggaaacagtattttaaaccgcggtttttatgccctgtcggggcgatccatgctgactacgtccacaggtctgtataccaatgcggttttcgcttttgtaaatatattgaacaaatatatcgaagaggaaaaccctgattatattgccgttgctttcgatcttagggcaaaaactttccggcacggtctatatgagggatacaaagcgcagcggaaaggcatgcccgatgaacttgcaatgcagatacccctcgcgaaggaagtactgagggcgatgaatattgccataatagagcatgaaggttatgaagccgacgatataatcggcagcctttcgttaaaggccgaaaaagagaattttgacgtaataatccttacgggggacagggattctttccagctgatcagcgacagggtgaaagttatcctgccttcgacgaaagccggaaaaacagagaccaacgtatatgataaacaggccatcattgacaaatacggagttttaccccatcagcttattgacgttaaaggcttaatgggagattcgtcagataatatacccggcgttccgggagtgggtgagaaaacggcgttaagccttatttcagcctacggtacactggaaggtgtttacgagcatattgatgaaataaaacagcctaagctgaaagcatcgctgattgaatataaggatcaggcgtttttaagccgtaagctgggtactattgtaagaaatctggagctgtgtgcttcgctggaggatctgaaaagaaaagaaataaaccgcaaagagcttttgaatgttttcagaaaactcgaatttgaaagtatcatatcaaaaatgaatcttgcttccgctgaggtgacagaattacctcccgcgccggaagagcttaaaataacccatatttcagcggcagaggatcttaagaaatggattgcttacctgcttaaccagaaaaacatttccgtccttcaactgattgaccgggaggattcatacagttcccgtctttcagggctggctttgtgcaccggggatgaggttttttatatcgagaccgggactgcactccccgagaatttgattgcaacagagctgaaagaactgtggcagaatgaaaatattcacaaaatcggacacaatataaaagaatttataacctggctgctgaaacacgatgttgaactgaacggcctttatttcgacactatgattgccgaatacctgatagattccataagaaacggctatcctatagcaagcctttctcacaaatacctgaatcgcagcgttccgtcgctggacgaacttttgggcaagggaaagggagcaaaaaagtactctgaaattccgcccgaaaggctgaaagattacagcgcttataacgtcaaagccatttttgacatatggccgatgcagaaaaaagttcttcaggaaaaccggcaggaggagctttttaatgacatagagcttcctcttataaccgtacttgccagtatggaataccacggtttcaaagttgacgccgcaaaacttcacgaatacggcgaagttcttctgtcacgcataaaagacctggaaaaggtaatttacatgctggccggtgaagaattcaacatcaattcaacgaagcagcttggtaccatattattcgaaaaactgaagcttcccgttgtaaaaagtacaaagaccggatactccaccgacgtcgaggttcttgaagagctttattacaagcatgatataataccatgcataatagaataccgccagcttacaaaactttacaccacctacgccgaaggtcttgaaaaagtgataaatcctgtaaccggtaaaattcattcaagttttaaccagacggttacggctacaggccgcatcagcagtaccgaaccaaatttacagaatatcccagtcagacacgaaatgggaagggaaatacggaaagcttttattccgtcgtcggaaaacgctgtttttgttgatgccgattattcacagatagagcttcgcgtgcttgcccatataacaggcgatgaagccctgataaatgctttcgttaagggggaagatattcatacggccacggcgtcgctggtatttgacgtagctcccgaagatgtgacgccggaactgcgcagaaaggcaaaagccgtaaatttcggcatagtgtacgggatcagtgattacgggctggcacgggatttgggaattacccggaaggaagcaaagcggtatatagacgactattttgccaaataccccaaagtaaaaacctatgtggatgaaattgtgcgggtcggccaggaacaggggtatgtggaaactctgttccacagaagaagataccttcccgagcttgcaaataaaaattttcaccagcgttctttcggaaaaagggttgcaatgaatacgcccatacagggcactgcagccgatattattaaaattgcgatggtgaaggtatacaaggctttgaaagaatccggccttaaatccaggcttatcctccaggtccatgacgaacttgttattgagacttttgaagacgaactggagactgtcaaggaacttgtcaaaaagtgcatggaagaggccgttgaattgagtgtgccgcttgttgtcgacgtttcaatcgggaaaaactggtatgaagcctcctgatatggatcc

SEQ ID NO: 257 - DNA, 2772 bp, Artificial Sequence
  Description of Artificial Sequence: Synthetic Clostridium stercorarium DNA Polymerase S822D
atgaaatacctgctgccgaccgctgctgctggtctgctgctcctcgctgcccagccggcgatggccatggatccaaaaataatccttatagacggaaacagtattttaaaccgcggtttttatgccctgtcggggcgatccatgctgactacgtccacaggtctgtataccaatgcggttttcgcttttgtaaatatattgaacaaatatatcgaagaggaaaaccctgattatattgccgttgctttcgatcttagggcaaaaactttccggcacggtctatatgagggatacaaagcgcagcggaaaggcatgcccgatgaacttgcaatgcagatacccctcgcgaaggaagtactgagggcgatgaatattgccataatagagcatgaaggttatgaagccgacgatataatcggcagcctttcgttaaaggccgaaaaagagaattttgacgtaataatccttacgggggacagggattctttccagctgatcagcgacagggtgaaagttatcctgccttcgacgaaagccggaaaaacagagaccaacgtatatgataaacaggccatcattgacaaatacggagttttaccccatcagcttattgacgttaaaggcttaatgggagattcgtcagataatatacccggcgttccgggagtgggtgagaaaacggcgttaagccttatttcagcctacggtacactggaaggtgtttacgagcatattgatgaaataaaacagcctaagctgaaagcatcgctgattgaatataaggatcaggcgtttttaagccgtaagctgggtactattgtaagaaatctggagctgtgtgcttcgctggaggatctgaaaagaaaagaaataaaccgcaaagagcttttgaatgttttcagaaaactcgaatttgaaagtatcatatcaaaaatgaatcttgcttccgctgaggtgacagaattacctcccgcgccggaagagcttaaaataacccatatttcagcggcagaggatcttaagaaatggattgcttacctgcttaaccagaaaaacatttccgtccttcaactgattgaccgggaggattcatacagttcccgtctttcagggctggctttgtgcaccggggatgaggttttttatatcgagaccgggactgcactccccgagaatttgattgcaacagagctgaaagaactgtggcagaatgaaaatattcacaaaatcggacacaatataaaagaatttataacctggctgctgaaacacgatgttgaactgaacggcctttatttcgacactatgattgccgaatacctgatagattccataagaaacggctatcctatagcaagcctttctcacaaatacctgaatcgcagcgttccgtcgctggacgaacttttgggcaagggaaagggagcaaaaaagtactctgaaattccgcccgaaaggctgaaagattacagcgcttataacgtcaaagccatttttgacatatggccgatgcagaaaaaagttcttcaggaaaaccggcaggaggagctttttaatgacatagagcttcctcttataaccgtacttgccagtatggaataccacggtttcaaagttgacgccgcaaaacttcacgaatacggcgaagttcttctgtcacgcataaaagacctggaaaaggtaatttacatgctggccggtgaagaattcaacatcaattcaacgaagcagcttggtaccatattattcgaaaaactgaagcttcccgttgtaaaaagtacaaagaccggatactccaccgacgtcgaggttcttgaagagctttattacaagcatgatataataccatgcataatagaataccgccagcttacaaaactttacaccacctacgccgaaggtcttgaaaaagtgataaatcctgtaaccggtaaaattcattcaagttttaaccagacggttacggctacaggccgcatcagcagtaccgaaccaaatttacagaatatcccagtcagacacgaaatgggaagggaaatacggaaagcttttattccgtcgtcggaaaacgctgtttttgttgatgccgattattcacagatagagcttcgcgtgcttgcccatataacaggcgatgaagccctgataaatgctttcgttaagggggaagatattcatacggccacggcgtcgctggtatttgacgtagctcccgaagatgtgacgccggaactgcgcagaaaggcaaaagccgtaaatttcggcatagtgtacgggatcagtgattacgggctggcacgggatttgggaattacccggaaggaagcaaagcggtatatagacgactattttgccaaataccccaaagtaaaaacctatgtggatgaaattgtgcgggtcggccaggaacaggggtatgtggaaactctgttccacagaagaagataccttcccgagcttgcagataaaaattttcaccagcgttctttcggaaaaagggttgcaatgaatacgcccatacagggcactgcagccgatattattaaaattgcgatggtgaaggtatacaaggctttgaaagaatccggccttaaatccaggcttatcctccaggtccatgacgaacttgttattgagacttttgaagacgaactggagactgtcaaggaacttgtcaaaaagtgcatggaagaggccgttgaattgagtgtgccgcttgttgtcgacgtttcaatcgggaaaaactggtatgaagcctcctgatatggatcc

SEQ ID NO: 258 - DNA, 2772 bp, Artificial Sequence
  Description of Artificial Sequence: Synthetic Clostridium stercorarium DNA Polymerase S822C
atgaaatacctgctgccgaccgctgctgctggtctgctgctcctcgctgcccagccggcgatggccatggatccaaaaataatccttatagacggaaacagtattttaaaccgcggtttttatgccctgtcggggcgatccatgctgactacgtccacaggtctgtataccaatgcggttttcgcttttgtaaatatattgaacaaatatatcgaagaggaaaaccctgattatattgccgttgctttcgatcttagggcaaaaactttccggcacggtctatatgagggatacaaagcgcagcggaaaggcatgcccgatgaacttgcaatgcagatacccctcgcgaaggaagtactgagggcgatgaatattgccataatagagcatgaaggttatgaagccgacgatataatcggcagcctttcgttaaaggccgaaaaagagaattttgacgtaataatccttacgggggacagggattctttccagctgatcagcgacagggtgaaagttatcctgccttcgacgaaagccggaaaaacagagaccaacgtatatgataaacaggccatcattgacaaatacggagttttaccccatcagcttattgacgttaaaggcttaatgggagattcgtcagataatatacccggcgttccgggagtgggtgagaaaacggcgttaagccttatttcagcctacggtacactggaaggtgtttacgagcatattgatgaaataaaacagcctaagctgaaagcatcgctgattgaatataaggatcaggcgtttttaagccgtaagctgggtactattgtaagaaatctggagctgtgtgcttcgctggaggatctgaaaagaaaagaaataaaccgcaaagagcttttgaatgttttcagaaaactcgaatttgaaagtatcatatcaaaaatgaatcttgcttccgctgaggtgacagaattacctcccgcgccggaagagcttaaaataacccatatttcagcggcagaggatcttaagaaatggattgcttacctgcttaaccagaaaaacatttccgtccttcaactgattgaccgggaggattcatacagttcccgtctttcagggctggctttgtgcaccggggatgaggttttttatatcgagaccgggactgcactccccgagaatttgattgcaacagagctgaaagaactgtggcagaatgaaaatattcacaaaatcggacacaatataaaagaatttataacctggctgctgaaacacgatgttgaactgaacggcctttatttcgacactatgattgccgaatacctgatagattccataagaaacggctatcctatagcaagcctttctcacaaatacctgaatcgcagcgttccgtcgctggacgaacttttgggcaagggaaagggagcaaaaaagtactctgaaattccgcccgaaaggctgaaagattacagcgcttataacgtcaaagccatttttgacatatggccgatgcagaaaaaagttcttcaggaaaaccggcaggaggagctttttaatgacatagagcttcctcttataaccgtacttgccagtatggaataccacggtttcaaagttgacgccgcaaaacttcacgaatacggcgaagttcttctgtcacgcataaaagacctggaaaaggtaatttacatgctggccggtgaagaattcaacatcaattcaacgaagcagcttggtaccatattattcgaaaaactgaagcttcccgttgtaaaaagtacaaagaccggatactccaccgacgtcgaggttcttgaagagctttattacaagcatgatataataccatgcataatagaataccgccagcttacaaaactttacaccacctacgccgaaggtcttgaaaaagtgataaatcctgtaaccggtaaaattcattcaagttttaaccagacggttacggctacaggccgcatcagcagtaccgaaccaaatttacagaatatcccagtcagacacgaaatgggaagggaaatacggaaagcttttattccgtcgtcggaaaacgctgtttttgttgatgccgattattcacagatagagcttcgcgtgcttgcccatataacaggcgatgaagccctgataaatgctttcgttaagggggaagatattcatacggccacggcgtcgctggtatttgacgtagctcccgaagatgtgacgccggaactgcgcagaaaggcaaaagccgtaaatttcggcatagtgtacgggatcagtgattacgggctggcacgggatttgggaattacccggaaggaagcaaagcggtatatagacgactattttgccaaataccccaaagtaaaaacctatgtggatgaaattgtgcgggtcggccaggaacaggggtatgtggaaactctgttccacagaagaagataccttcccgagcttgcatgtaaaaattttcaccagcgttctttcggaaaaagggttgcaatgaatacgcccatacagggcactgcagccgatattattaaaattgcgatggtgaaggtatacaaggctttgaaagaatccggccttaaatccaggcttatcctccaggtccatgacgaacttgttattgagacttttgaagacgaactggagactgtcaaggaacttgtcaaaaagtgcatggaagaggccgttgaattgagtgtgccgcttgttgtcgacgtttcaatcgggaaaaactggtatgaagcctcctgatatggatcc

SEQ ID NO: 259 - DNA, 2772 bp, Artificial Sequence
  Description of Artificial Sequence: Synthetic Clostridium stercorarium DNA Polymerase S822E
atgaaatacctgctgccgaccgctgctgctggtctgctgctcctcgctgcccagccggcgatggccatggatccaaaaataatccttatagacggaaacagtattttaaaccgcggtttttatgccctgtcggggcgatccatgctgactacgtccacaggtctgtataccaatgcggttttcgcttttgtaaatatattgaacaaatatatcgaagaggaaaaccctgattatattgccgttgctttcgatcttagggcaaaaactttccggcacggtctatatgagggatacaaagcgcagcggaaaggcatgcccgatgaacttgcaatgcagatacccctcgcgaaggaagtactgagggcgatgaatattgccataatagagcatgaaggttatgaagccgacgatataatcggcagcctttcgttaaaggccgaaaaagagaattttgacgtaataatccttacgggggacagggattctttccagctgatcagcgacagggtgaaagttatcctgccttcgacgaaagccggaaaaacagagaccaacgtatatgataaacaggccatcattgacaaatacggagttttaccccatcagcttattgacgttaaaggcttaatgggagattcgtcagataatatacccggcgttccgggagtgggtgagaaaacggcgttaagccttatttcagcctacggtacactggaaggtgtttacgagcatattgatgaaataaaacagcctaagctgaaagcatcgctgattgaatataaggatcaggcgtttttaagccgtaagctgggtactattgtaagaaatctggagctgtgtgcttcgctggaggatctgaaaagaaaagaaataaaccgcaaagagcttttgaatgttttcagaaaactcgaatttgaaagtatcatatcaaaaatgaatcttgcttccgctgaggtgacagaattacctcccgcgccggaagagcttaaaataacccatatttcagcggcagaggatcttaagaaatggattgcttacctgcttaaccagaaaaacatttccgtccttcaactgattgaccgggaggattcatacagttcccgtctttcagggctggctttgtgcaccggggatgaggttttttatatcgagaccgggactgcactccccgagaatttgattgcaacagagctgaaagaactgtggcagaatgaaaatattcacaaaatcggacacaatataaaagaatttataacctggctgctgaaacacgatgttgaactgaacggcctttatttcgacactatgattgccgaatacctgatagattccataagaaacggctatcctatagcaagcctttctcacaaatacctgaatcgcagcgttccgtcgctggacgaacttttgggcaagggaaagggagcaaaaaagtactctgaaattccgcccgaaaggctgaaagattacagcgcttataacgtcaaagccatttttgacatatggccgatgcagaaaaaagttcttcaggaaaaccggcaggaggagctttttaatgacatagagcttcctcttataaccgtacttgccagtatggaataccacggtttcaaagttgacgccgcaaaacttcacgaatacggcgaagttcttctgtcacgcataaaagacctggaaaaggtaatttacatgctggccggtgaagaattcaacatcaattcaacgaagcagcttggtaccatattattcgaaaaactgaagcttcccgttgtaaaaagtacaaagaccggatactccaccgacgtcgaggttcttgaagagctttattacaagcatgatataataccatgcataatagaataccgccagcttacaaaactttacaccacctacgccgaaggtcttgaaaaagtgataaatcctgtaaccggtaaaattcattcaagttttaaccagacggttacggctacaggccgcatcagcagtaccgaaccaaatttacagaatatcccagtcagacacgaaatgggaagggaaatacggaaagcttttattccgtcgtcggaaaacgctgtttttgttgatgccgattattcacagatagagcttcgcgtgcttgcccatataacaggcgatgaagccctgataaatgctttcgttaagggggaagatattcatacggccacggcgtcgctggtatttgacgtagctcccgaagatgtgacgccggaactgcgcagaaaggcaaaagccgtaaatttcggcatagtgtacgggatcagtgattacgggctggcacgggatttgggaattacccggaaggaagcaaagcggtatatagacgactattttgccaaataccccaaagtaaaaacctatgtggatgaaattgtgcgggtcggccaggaacaggggtatgtggaaactctgttccacagaagaagataccttcccgagcttgcagaaaaaaattttcaccagcgttctttcggaaaaagggttgcaatgaatacgcccatacagggcactgcagccgatattattaaaattgcgatggtgaaggtatacaaggctttgaaagaatccggccttaaatccaggcttatcctccaggtccatgacgaacttgttattgagacttttgaagacgaactggagactgtcaaggaacttgtcaaaaagtgcatggaagaggccgttgaattgagtgtgccgcttgttgtcgacgtttcaatcgggaaaaactggtatgaagcctcctgatatggatcc

SEQ ID NO: 260 - DNA, 2772 bp, Artificial Sequence
  Description of Artificial Sequence: Synthetic Clostridium stercorarium DNA Polymerase S822Q
atgaaatacctgctgccgaccgctgctgctggtctgctgctcctcgctgcccagccggcgatggccatggatccaaaaataatccttatagacggaaacagtattttaaaccgcggtttttatgccctgtcggggcgatccatgctgactacgtccacaggtctgtataccaatgcggttttcgcttttgtaaatatattgaacaaatatatcgaagaggaaaaccctgattatattgccgttgctttcgatcttagggcaaaaactttccggcacggtctatatgagggatacaaagcgcagcggaaaggcatgcccgatgaacttgcaatgcagatacccctcgcgaaggaagtactgagggcgatgaatattgccataatagagcatgaaggttatgaagccgacgatataatcggcagcctttcgttaaaggccgaaaaagagaattttgacgtaataatccttacgggggacagggattctttccagctgatcagcgacagggtgaaagttatcctgccttcgacgaaagccggaaaaacagagaccaacgtatatgataaacaggccatcattgacaaatacggagttttaccccatcagcttattgacgttaaaggcttaatgggagattcgtcagataatatacccggcgttccgggagtgggtgagaaaacggcgttaagccttatttcagcctacggtacactggaaggtgtttacgagcatattgatgaaataaaacagcctaagctgaaagcatcgctgattgaatataaggatcaggcgtttttaagccgtaagctgggtactattgtaagaaatctggagctgtgtgcttcgctggaggatctgaaaagaaaagaaataaaccgcaaagagcttttgaatgttttcagaaaactcgaatttgaaagtatcatatcaaaaatgaatcttgcttccgctgaggtgacagaattacctcccgcgccggaagagcttaaaataacccatatttcagcggcagaggatcttaagaaatggattgcttacctgcttaaccagaaaaacatttccgtccttcaactgattgaccgggaggattcatacagttcccgtctttcagggctggctttgtgcaccggggatgaggttttttatatcgagaccgggactgcactccccgagaatttgattgcaacagagctgaaagaactgtggcagaatgaaaatattcacaaaatcggacacaatataaaagaatttataacctggctgctgaaacacgatgttgaactgaacggcctttatttcgacactatgattgccgaatacctgatagattccataagaaacggctatcctatagcaagcctttctcacaaatacctgaatcgcagcgttccgtcgctggacgaacttttgggcaagggaaagggagcaaaaaagtactctgaaattccgcccgaaaggctgaaagattacagcgcttataacgtcaaagccatttttgacatatggccgatgcagaaaaaagttcttcaggaaaaccggcaggaggagctttttaatgacatagagcttcctcttataaccgtacttgccagtatggaataccacggtttcaaagttgacgccgcaaaacttcacgaatacggcgaagttcttctgtcacgcataaaagacctggaaaaggtaatttacatgctggccggtgaagaattcaacatcaattcaacgaagcagcttggtaccatattattcgaaaaactgaagcttcccgttgtaaaaagtacaaagaccggatactccaccgacgtcgaggttcttgaagagctttattacaagcatgatataataccatgcataatagaataccgccagcttacaaaactttacaccacctacgccgaaggtcttgaaaaagtgataaatcctgtaaccggtaaaattcattcaagttttaaccagacggttacggctacaggccgcatcagcagtaccgaaccaaatttacagaatatcccagtcagacacgaaatgggaagggaaatacggaaagcttttattccgtcgtcggaaaacgctgtttttgttgatgccgattattcacagatagagcttcgcgtgcttgcccatataacaggcgatgaagccctgataaatgctttcgttaagggggaagatattcatacggccacggcgtcgctggtatttgacgtagctcccgaagatgtgacgccggaactgcgcagaaaggcaaaagccgtaaatttcggcatagtgtacgggatcagtgattacgggctggcacgggatttgggaattacccggaaggaagcaaagcggtatatagacgactattttgccaaataccccaaagtaaaaacctatgtggatgaaattgtgcgggtcggccaggaacaggggtatgtggaaactctgttccacagaagaagataccttcccgagcttgcacaaaaaaattttcaccagcgttctttcggaaaaagggttgcaatgaatacgcccatacagggcactgcagccgatattattaaaattgcgatggtgaaggtatacaaggctttgaaagaatccggccttaaatccaggcttatcctccaggtccatgacgaacttgttattgagacttttgaagacgaactggagactgtcaaggaacttgtcaaaaagtgcatggaagaggccgttgaattgagtgtgccgcttgttgtcgacgtttcaatcgggaaaaactggtatgaagcctcctgatatggatcc

SEQ ID NO: 261 - DNA, 2772 bp, Artificial Sequence
  Description of Artificial Sequence: Synthetic Clostridium stercorarium DNA Polymerase S822G
atgaaatacctgctgccgaccgctgctgctggtctgctgctcctcgctgcccagccggcgatggccatggatccaaaaataatccttatagacggaaacagtattttaaaccgcggtttttatgccctgtcggggcgatccatgctgactacgtccacaggtctgtataccaatgcggttttcgcttttgtaaatatattgaacaaatatatcgaagaggaaaaccctgattatattgccgttgctttcgatcttagggcaaaaactttccggcacggtctatatgagggatacaaagcgcagcggaaaggcatgcccgatgaacttgcaatgcagatacccctcgcgaaggaagtactgagggcgatgaatattgccataatagagcatgaaggttatgaagccgacgatataatcggcagcctttcgttaaaggccgaaaaagagaattttgacgtaataatccttacgggggacagggattctttccagctgatcagcgacagggtgaaagttatcctgccttcgacgaaagccggaaaaacagagaccaacgtatatgataaacaggccatcattgacaaatacggagttttaccccatcagcttattgacgttaaaggcttaatgggagattcgtcagataatatacccggcgttccgggagtgggtgagaaaacggcgttaagccttatttcagcctacggtacactggaaggtgtttacgagcatattgatgaaataaaacagcctaagctgaaagcatcgctgattgaatataaggatcaggcgtttttaagccgtaagctgggtactattgtaagaaatctggagctgtgtgcttcgctggaggatctgaaaagaaaagaaataaaccgcaaagagcttttgaatgttttcagaaaactcgaatttgaaagtatcatatcaaaaatgaatcttgcttccgctgaggtgacagaattacctcccgcgccggaagagcttaaaataacccatatttcagcggcagaggatcttaagaaatggattgcttacctgcttaaccagaaaaacatttccgtccttcaactgattgaccgggaggattcatacagttcccgtctttcagggctggctttgtgcaccggggatgaggttttttatatcgagaccgggactgcactccccgagaatttgattgcaacagagctgaaagaactgtggcagaatgaaaatattcacaaaatcggacacaatataaaagaatttataacctggctgctgaaacacgatgttgaactgaacggcctttatttcgacactatgattgccgaatacctgatagattccataagaaacggctatcctatagcaagcctttctcacaaatacctgaatcgcagcgttccgtcgctggacgaacttttgggcaagggaaagggagcaaaaaagtactctgaaattccgcccgaaaggctgaaagattacagcgcttataacgtcaaagccatttttgacatatggccgatgcagaaaaaagttcttcaggaaaaccggcaggaggagctttttaatgacatagagcttcctcttataaccgtacttgccagtatggaataccacggtttcaaagttgacgccgcaaaacttcacgaatacggcgaagttcttctgtcacgcataaaagacctggaaaaggtaatttacatgctggccggtgaagaattcaacatcaattcaacgaagcagcttggtaccatattattcgaaaaactgaagcttcccgttgtaaaaagtacaaagaccggatactccaccgacgtcgaggttcttgaagagctttattacaagcatgatataataccatgcataatagaataccgccagcttacaaaactttacaccacctacgccgaaggtcttgaaaaagtgataaatcctgtaaccggtaaaattcattcaagttttaaccagacggttacggctacaggccgcatcagcagtaccgaaccaaatttacagaatatcccagtcagacacgaaatgggaagggaaatacggaaagcttttattccgtcgtcggaaaacgctgtttttgttgatgccgattattcacagatagagcttcgcgtgcttgcccatataacaggcgatgaagccctgataaatgctttcgttaagggggaagatattcatacggccacggcgtcgctggtatttgacgtagctcccgaagatgtgacgccggaactgcgcagaaaggcaaaagccgtaaatttcggcatagtgtacgggatcagtgattacgggctggcacgggatttgggaattacccggaaggaagcaaagcggtatatagacgactattttgccaaataccccaaagtaaaaacctatgtggatgaaattgtgcgggtcggccaggaacaggggtatgtggaaactctgttccacagaagaagataccttcccgagcttgcaggtaaaaattttcaccagcgttctttcggaaaaagggttgcaatgaatacgcccatacagggcactgcagccgatattattaaaattgcgatggtgaaggtatacaaggctttgaaagaatccggccttaaatccaggcttatcctccaggtccatgacgaacttgttattgagacttttgaagacgaactggagactgtcaaggaacttgtcaaaaagtgcatggaagaggccgttgaattgagtgtgccgcttgttgtcgacgtttcaatcgggaaaaactggtatgaagcctcctgatatggatcc

SEQ ID NO: 262 - DNA, 2772 bp, Artificial Sequence
  Description of Artificial Sequence: Synthetic Clostridium stercorarium DNA Polymerase S822H
atgaaatacctgctgccgaccgctgctgctggtctgctgctcctcgctgcccagccggcgatggccatggatccaaaaataatccttatagacggaaacagtattttaaaccgcggtttttatgccctgtcggggcgatccatgctgactacgtccacaggtctgtataccaatgcggttttcgcttttgtaaatatattgaacaaatatatcgaagaggaaaaccctgattatattgccgttgctttcgatcttagggcaaaaactttccggcacggtctatatgagggatacaaagcgcagcggaaaggcatgcccgatgaacttgcaatgcagatacccctcgcgaaggaagtactgagggcgatgaatattgccataatagagcatgaaggttatgaagccgacgatataatcggcagcctttcgttaaaggccgaaaaagagaattttgacgtaataatccttacgggggacagggattctttccagctgatcagcgacagggtgaaagttatcctgccttcgacgaaagccggaaaaacagagaccaacgtatatgataaacaggccatcattgacaaatacggagttttaccccatcagcttattgacgttaaaggcttaatgggagattcgtcagataatatacccggcgttccgggagtgggtgagaaaacggcgttaagccttatttcagcctacggtacactggaaggtgtttacgagcatattgatgaaataaaacagcctaagctgaaagcatcgctgattgaatataaggatcaggcgtttttaagccgtaagctgggtactattgtaagaaatctggagctgtgtgcttcgctggaggatctgaaaagaaaagaaataaaccgcaaagagcttttgaatgttttcagaaaactcgaatttgaaagtatcatatcaaaaatgaatcttgcttccgctgaggtgacagaattacctcccgcgccggaagagcttaaaataacccatatttcagcggcagaggatcttaagaaatggattgcttacctgcttaaccagaaaaacatttccgtccttcaactgattgaccgggaggattcatacagttcccgtctttcagggctggctttgtgcaccggggatgaggttttttatatcgagaccgggactgcactccccgagaatttgattgcaacagagctgaaagaactgtggcagaatgaaaatattcacaaaatcggacacaatataaaagaatttataacctggctgctgaaacacgatgttgaactgaacggcctttatttcgacactatgattgccgaatacctgatagattccataagaaacggctatcctatagcaagcctttctcacaaatacctgaatcgcagcgttccgtcgctggacgaacttttgggcaagggaaagggagcaaaaaagtactctgaaattccgcccgaaaggctgaaagattacagcgcttataacgtcaaagccatttttgacatatggccgatgcagaaaaaagttcttcaggaaaaccggcaggaggagctttttaatgacatagagcttcctcttataaccgtacttgccagtatggaataccacggtttcaaagttgacgccgcaaaacttcacgaatacggcgaagttcttctgtcacgcataaaagacctggaaaaggtaatttacatgctggccggtgaagaattcaacatcaattcaacgaagcagcttggtaccatattattcgaaaaactgaagcttcccgttgtaaaaagtacaaagaccggatactccaccgacgtcgaggttcttgaagagctttattacaagcatgatataataccatgcataatagaataccgccagcttacaaaactttacaccacctacgccgaaggtcttgaaaaagtgataaatcctgtaaccggtaaaattcattcaagttttaaccagacggttacggctacaggccgcatcagcagtaccgaaccaaatttacagaatatcccagtcagacacgaaatgggaagggaaatacggaaagcttttattccgtcgtcggaaaacgctgtttttgttgatgccgattattcacagatagagcttcgcgtgcttgcccatataacaggcgatgaagccctgataaatgctttcgttaagggggaagatattcatacggccacggcgtcgctggtatttgacgtagctcccgaagatgtgacgccggaactgcgcagaaaggcaaaagccgtaaatttcggcatagtgtacgggatcagtgattacgggctggcacgggatttgggaattacccggaaggaagcaaagcggtatatagacgactattttgccaaataccccaaagtaaaaacctatgtggatgaaattgtgcgggtcggccaggaacaggggtatgtggaaactctgttccacagaagaagataccttcccgagcttgcacataaaaattttcaccagcgttctttcggaaaaagggttgcaatgaatacgcccatacagggcactgcagccgatattattaaaattgcgatggtgaaggtatacaaggctttgaaagaatccggccttaaatccaggcttatcctccaggtccatgacgaacttgttattgagacttttgaagacgaactggagactgtcaaggaacttgtcaaaaagtgcatggaagaggccgttgaattgagtgtgccgcttgttgtcgacgtttcaatcgggaaaaactggtatgaagcctcctgatatggatcc

SEQ ID NO: 263 - DNA, 2772 bp, Artificial Sequence
  Description of Artificial Sequence: Synthetic Clostridium stercorarium DNA Polymerase S822I
atgaaatacctgctgccgaccgctgctgctggtctgctgctcctcgctgcccagccggcgatggccatggatccaaaaataatccttatagacggaaacagtattttaaaccgcggtttttatgccctgtcggggcgatccatgctgactacgtccacaggtctgtataccaatgcggttttcgcttttgtaaatatattgaacaaatatatcgaagaggaaaaccctgattatattgccgttgctttcgatcttagggcaaaaactttccggcacggtctatatgagggatacaaagcgcagcggaaaggcatgcccgatgaacttgcaatgcagatacccctcgcgaaggaagtactgagggcgatgaatattgccataatagagcatgaaggttatgaagccgacgatataatcggcagcctttcgttaaaggccgaaaaagagaattttgacgtaataatccttacgggggacagggattctttccagctgatcagcgacagggtgaaagttatcctgccttcgacgaaagccggaaaaacagagaccaacgtatatgataaacaggccatcattgacaaatacggagttttaccccatcagcttattgacgttaaaggcttaatgggagattcgtcagataatatacccggcgttccgggagtgggtgagaaaacggcgttaagccttatttcagcctacggtacactggaaggtgtttacgagcatattgatgaaataaaacagcctaagctgaaagcatcgctgattgaatataaggatcaggcgtttttaagccgtaagctgggtactattgtaagaaatctggagctgtgtgcttcgctggaggatctgaaaagaaaagaaataaaccgcaaagagcttttgaatgttttcagaaaactcgaatttgaaagtatcatatcaaaaatgaatcttgcttccgctgaggtgacagaattacctcccgcgccggaagagcttaaaataacccatatttcagcggcagaggatcttaagaaatggattgcttacctgcttaaccagaaaaacatttccgtccttcaactgattgaccgggaggattcatacagttcccgtctttcagggctggctttgtgcaccggggatgaggttttttatatcgagaccgggactgcactccccgagaatttgattgcaacagagctgaaagaactgtggcagaatgaaaatattcacaaaatcggacacaatataaaagaatttataacctggctgctgaaacacgatgttgaactgaacggcctttatttcgacactatgattgccgaatacctgatagattccataagaaacggctatcctatagcaagcctttctcacaaatacctgaatcgcagcgttccgtcgctggacgaacttttgggcaagggaaagggagcaaaaaagtactctgaaattccgcccgaaaggctgaaagattacagcgcttataacgtcaaagccatttttgacatatggccgatgcagaaaaaagttcttcaggaaaaccggcaggaggagctttttaatgacatagagcttcctcttataaccgtacttgccagtatggaataccacggtttcaaagttgacgccgcaaaacttcacgaatacggcgaagttcttctgtcacgcataaaagacctggaaaaggtaatttacatgctggccggtgaagaattcaacatcaattcaacgaagcagcttggtaccatattattcgaaaaactgaagcttcccgttgtaaaaagtacaaagaccggatactccaccgacgtcgaggttcttgaagagctttattacaagcatgatataataccatgcataatagaataccgccagcttacaaaactttacaccacctacgccgaaggtcttgaaaaagtgataaatcctgtaaccggtaaaattcattcaagttttaaccagacggttacggctacaggccgcatcagcagtaccgaaccaaatttacagaatatcccagtcagacacgaaatgggaagggaaatacggaaagcttttattccgtcgtcggaaaacgctgtttttgttgatgccgattattcacagatagagcttcgcgtgcttgcccatataacaggcgatgaagccctgataaatgctttcgttaagggggaagatattcatacggccacggcgtcgctggtatttgacgtagctcccgaagatgtgacgccggaactgcgcagaaaggcaaaagccgtaaatttcggcatagtgtacgggatcagtgattacgggctggcacgggatttgggaattacccggaaggaagcaaagcggtatatagacgactattttgccaaataccccaaagtaaaaacctatgtggatgaaattgtgcgggtcggccaggaacaggggtatgtggaaactctgttccacagaagaagataccttcccgagcttgcaattaaaaattttcaccagcgttctttcggaaaaagggttgcaatgaatacgcccatacagggcactgcagccgatattattaaaattgcgatggtgaaggtatacaaggctttgaaagaatccggccttaaatccaggcttatcctccaggtccatgacgaacttgttattgagacttttgaagacgaactggagactgtcaaggaacttgtcaaaaagtgcatggaagaggccgttgaattgagtgtgccgcttgttgtcgacgtttcaatcgggaaaaactggtatgaagcctcctgatatggatcc

SEQ ID NO: 264 - DNA, 2772 bp, Artificial Sequence
  Description of Artificial Sequence: Synthetic Clostridium stercorarium DNA Polymerase S822L
atgaaatacctgctgccgaccgctgctgctggtctgctgctcctcgctgcccagccggcgatggccatggatccaaaaataatccttatagacggaaacagtattttaaaccgcggtttttatgccctgtcggggcgatccatgctgactacgtccacaggtctgtataccaatgcggttttcgcttttgtaaatatattgaacaaatatatcgaagaggaaaaccctgattatattgccgttgctttcgatcttagggcaaaaactttccggcacggtctatatgagggatacaaagcgcagcggaaaggcatgcccgatgaacttgcaatgcagatacccctcgcgaaggaagtactgagggcgatgaatattgccataatagagcatgaaggttatgaagccgacgatataatcggcagcctttcgttaaaggccgaaaaagagaattttgacgtaataatccttacgggggacagggattctttccagctgatcagcgacagggtgaaagttatcctgccttcgacgaaagccggaaaaacagagaccaacgtatatgataaacaggccatcattgacaaatacggagttttaccccatcagcttattgacgttaaaggcttaatgggagattcgtcagataatatacccggcgttccgggagtgggtgagaaaacggcgttaagccttatttcagcctacggtacactggaaggtgtttacgagcatattgatgaaataaaacagcctaagctgaaagcatcgctgattgaatataaggatcaggcgtttttaagccgtaagctgggtactattgtaagaaatctggagctgtgtgcttcgctggaggatctgaaaagaaaagaaataaaccgcaaagagcttttgaatgttttcagaaaactcgaatttgaaagtatcatatcaaaaatgaatcttgcttccgctgaggtgacagaattacctcccgcgccggaagagcttaaaataacccatatttcagcggcagaggatcttaagaaatggattgcttacctgcttaaccagaaaaacatttccgtccttcaactgattgaccgggaggattcatacagttcccgtctttcagggctggctttgtgcaccggggatgaggttttttatatcgagaccgggactgcactccccgagaatttgattgcaacagagctgaaagaactgtggcagaatgaaaatattcacaaaatcggacacaatataaaagaatttataacctggctgctgaaacacgatgttgaactgaacggcctttatttcgacactatgattgccgaatacctgatagattccataagaaacggctatcctatagcaagcctttctcacaaatacctgaatcgcagcgttccgtcgctggacgaacttttgggcaagggaaagggagcaaaaaagtactctgaaattccgcccgaaaggctgaaagattacagcgcttataacgtcaaagccatttttgacatatggccgatgcagaaaaaagttcttcaggaaaaccggcaggaggagctttttaatgacatagagcttcctcttataaccgtacttgccagtatggaataccacggtttcaaagttgacgccgcaaaacttcacgaatacggcgaagttcttctgtcacgcataaaagacctggaaaaggtaatttacatgctggccggtgaagaattcaacatcaattcaacgaagcagcttggtaccatattattcgaaaaactgaagcttcccgttgtaaaaagtacaaagaccggatactccaccgacgtcgaggttcttgaagagctttattacaagcatgatataataccatgcataatagaataccgccagcttacaaaactttacaccacctacgccgaaggtcttgaaaaagtgataaatcctgtaaccggtaaaattcattcaagttttaaccagacggttacggctacaggccgcatcagcagtaccgaaccaaatttacagaatatcccagtcagacacgaaatgggaagggaaatacggaaagcttttattccgtcgtcggaaaacgctgtttttgttgatgccgattattcacagatagagcttcgcgtgcttgcccatataacaggcgatgaagccctgataaatgctttcgttaagggggaagatattcatacggccacggcgtcgctggtatttgacgtagctcccgaagatgtgacgccggaactgcgcagaaaggcaaaagccgtaaatttcggcatagtgtacgggatcagtgattacgggctggcacgggatttgggaattacccggaaggaagcaaagcggtatatagacgactattttgccaaataccccaaagtaaaaacctatgtggatgaaattgtgcgggtcggccaggaacaggggtatgtggaaactctgttccacagaagaagataccttcccgagcttgcacttaaaaattttcaccagcgttctttcggaaaaagggttgcaatgaatacgcccatacagggcactgcagccgatattattaaaattgcgatggtgaaggtatacaaggctttgaaagaatccggccttaaatccaggcttatcctccaggtccatgacgaacttgttattgagacttttgaagacgaactggagactgtcaaggaacttgtcaaaaagtgcatggaagaggccgttgaattgagtgtgccgcttgttgtcgacgtttcaatcgggaaaaactggtatgaagcctcctgatatggatcc

SEQ ID NO: 265 - DNA, 2772 bp, Artificial Sequence
  Description of Artificial Sequence: Synthetic Clostridium stercorarium DNA Polymerase S822K
atgaaatacctgctgccgaccgctgctgctggtctgctgctcctcgctgcccagccggcgatggccatggatccaaaaataatccttatagacggaaacagtattttaaaccgcggtttttatgccctgtcggggcgatccatgctgactacgtccacaggtctgtataccaatgcggttttcgcttttgtaaatatattgaacaaatatatcgaagaggaaaaccctgattatattgccgttgctttcgatcttagggcaaaaactttccggcacggtctatatgagggatacaaagcgcagcggaaaggcatgcccgatgaacttgcaatgcagatacccctcgcgaaggaagtactgagggcgatgaatattgccataatagagcatgaaggttatgaagccgacgatataatcggcagcctttcgttaaaggccgaaaaagagaattttgacgtaataatccttacgggggacagggattctttccagctgatcagcgacagggtgaaagttatcctgccttcgacgaaagccggaaaaacagagaccaacgtatatgataaacaggccatcattgacaaatacggagttttaccccatcagcttattgacgttaaaggcttaatgggagattcgtcagataatatacccggcgttccgggagtgggtgagaaaacggcgttaagccttatttcagcctacggtacactggaaggtgtttacgagcatattgatgaaataaaacagcctaagctgaaagcatcgctgattgaatataaggatcaggcgtttttaagccgtaagctgggtactattgtaagaaatctggagctgtgtgcttcgctggaggatctgaaaagaaaagaaataaaccgcaaagagcttttgaatgttttcagaaaactcgaatttgaaagtatcatatcaaaaatgaatcttgcttccgctgaggtgacagaattacctcccgcgccggaagagcttaaaataacccatatttcagcggcagaggatcttaagaaatggattgcttacctgcttaaccagaaaaacatttccgtccttcaactgattgaccgggaggattcatacagttcccgtctttcagggctggctttgtgcaccggggatgaggttttttatatcgagaccgggactgcactccccgagaatttgattgcaacagagctgaaagaactgtggcagaatgaaaatattcacaaaatcggacacaatataaaagaatttataacctggctgctgaaacacgatgttgaactgaacggcctttatttcgacactatgattgccgaatacctgatagattccataagaaacggctatcctatagcaagcctttctcacaaatacctgaatcgcagcgttccgtcgctggacgaacttttgggcaagggaaagggagcaaaaaagtactctgaaattccgcccgaaaggctgaaagattacagcgcttataacgtcaaagccatttttgacatatggccgatgcagaaaaaagttcttcaggaaaaccggcaggaggagctttttaatgacatagagcttcctcttataaccgtacttgccagtatggaataccacggtttcaaagttgacgccgcaaaacttcacgaatacggcgaagttcttctgtcacgcataaaagacctggaaaaggtaatttacatgctggccggtgaagaattcaacatcaattcaacgaagcagcttggtaccatattattcgaaaaactgaagcttcccgttgtaaaaagtacaaagaccggatactccaccgacgtcgaggttcttgaagagctttattacaagcatgatataataccatgcataatagaataccgccagcttacaaaactttacaccacctacgccgaaggtcttgaaaaagtgataaatcctgtaaccggtaaaattcattcaagttttaaccagacggttacggctacaggccgcatcagcagtaccgaaccaaatttacagaatatcccagtcagacacgaaatgggaagggaaatacggaaagcttttattccgtcgtcggaaaacgctgtttttgttgatgccgattattcacagatagagcttcgcgtgcttgcccatataacaggcgatgaagccctgataaatgctttcgttaagggggaagatattcatacggccacggcgtcgctggtatttgacgtagctcccgaagatgtgacgccggaactgcgcagaaaggcaaaagccgtaaatttcggcatagtgtacgggatcagtgattacgggctggcacgggatttgggaattacccggaaggaagcaaagcggtatatagacgactattttgccaaataccccaaagtaaaaacctatgtggatgaaattgtgcgggtcggccaggaacaggggtatgtggaaactctgttccacagaagaagataccttcccgagcttgcaaaaaaaaattttcaccagcgttctttcggaaaaagggttgcaatgaatacgcccatacagggcactgcagccgatattattaaaattgcgatggtgaaggtatacaaggctttgaaagaatccggccttaaatccaggcttatcctccaggtccatgacgaacttgttattgagacttttgaagacgaactggagactgtcaaggaacttgtcaaaaagtgcatggaagaggccgttgaattgagtgtgccgcttgttgtcgacgtttcaatcgggaaaaactggtatgaagcctcctgatatggatcc

SEQ ID NO: 266 - DNA, 2772 bp, Artificial Sequence
  Description of Artificial Sequence: Synthetic Clostridium stercorarium DNA Polymerase S822M
atgaaatacctgctgccgaccgctgctgctggtctgctgctcctcgctgcccagccggcgatggccatggatccaaaaataatccttatagacggaaacagtattttaaaccgcggtttttatgccctgtcggggcgatccatgctgactacgtccacaggtctgtataccaatgcggttttcgcttttgtaaatatattgaacaaatatatcgaagaggaaaaccctgattatattgccgttgctttcgatcttagggcaaaaactttccggcacggtctatatgagggatacaaagcgcagcggaaaggcatgcccgatgaacttgcaatgcagatacccctcgcgaaggaagtactgagggcgatgaatattgccataatagagcatgaaggttatgaagccgacgatataatcggcagcctttcgttaaaggccgaaaaagagaattttgacgtaataatccttacgggggacagggattctttccagctgatcagcgacagggtgaaagttatcctgccttcgacgaaagccggaaaaacagagaccaacgtatatgataaacaggccatcattgacaaatacggagttttaccccatcagcttattgacgttaaaggcttaatgggagattcgtcagataatatacccggcgttccgggagtgggtgagaaaacggcgttaagccttatttcagcctacggtacactggaaggtgtttacgagcatattgatgaaataaaacagcctaagctgaaagcatcgctgattgaatataaggatcaggcgtttttaagccgtaagctgggtactattgtaagaaatctggagctgtgtgcttcgctggaggatctgaaaagaaaagaaataaaccgcaaagagcttttgaatgttttcagaaaactcgaatttgaaagtatcatatcaaaaatgaatcttgcttccgctgaggtgacagaattacctcccgcgccggaagagcttaaaataacccatatttcagcggcagaggatcttaagaaatggattgcttacctgcttaaccagaaaaacatttccgtccttcaactgattgaccgggaggattcatacagttcccgtctttcagggctggctttgtgcaccggggatgaggttttttatatcgagaccgggactgcactccccgagaatttgattgcaacagagctgaaagaactgtggcagaatgaaaatattcacaaaatcggacacaatataaaagaatttataacctggctgctgaaacacgatgttgaactgaacggcctttatttcgacactatgattgccgaatacctgatagattccataagaaacggctatcctatagcaagcctttctcacaaatacctgaatcgcagcgttccgtcgctggacgaacttttgggcaagggaaagggagcaaaaaagtactctgaaattccgcccgaaaggctgaaagattacagcgcttataacgtcaaagccatttttgacatatggccgatgcagaaaaaagttcttcaggaaaaccggcaggaggagctttttaatgacatagagcttcctcttataaccgtacttgccagtatggaataccacggtttcaaagttgacgccgcaaaacttcacgaatacggcgaagttcttctgtcacgcataaaagacctggaaaaggtaatttacatgctggccggtgaagaattcaacatcaattcaacgaagcagcttggtaccatattattcgaaaaactgaagcttcccgttgtaaaaagtacaaagaccggatactccaccgacgtcgaggttcttgaagagctttattacaagcatgatataataccatgcataatagaataccgccagcttacaaaactttacaccacctacgccgaaggtcttgaaaaagtgataaatcctgtaaccggtaaaattcattcaagttttaaccagacggttacggctacaggccgcatcagcagtaccgaaccaaatttacagaatatcccagtcagacacgaaatgggaagggaaatacggaaagcttttattccgtcgtcggaaaacgctgtttttgttgatgccgattattcacagatagagcttcgcgtgcttgcccatataacaggcgatgaagccctgataaatgctttcgttaagggggaagatattcatacggccacggcgtcgctggtatttgacgtagctcccgaagatgtgacgccggaactgcgcagaaaggcaaaagccgtaaatttcggcatagtgtacgggatcagtgattacgggctggcacgggatttgggaattacccggaaggaagcaaagcggtatatagacgactattttgccaaataccccaaagtaaaaacctatgtggatgaaattgtgcgggtcggccaggaacaggggtatgtggaaactctgttccacagaagaagataccttcccgagcttgcaatgaaaaattttcaccagcgttctttcggaaaaagggttgcaatgaatacgcccatacagggcactgcagccgatattattaaaattgcgatggtgaaggtatacaaggctttgaaagaatccggccttaaatccaggcttatcctccaggtccatgacgaacttgttattgagacttttgaagacgaactggagactgtcaaggaacttgtcaaaaagtgcatggaagaggccgttgaattgagtgtgccgcttgttgtcgacgtttcaatcgggaaaaactggtatgaagcctcctgatatggatcc

SEQ ID NO: 267 - DNA, 2772 bp, Artificial Sequence
  Description of Artificial Sequence: Synthetic Clostridium stercorarium DNA Polymerase S822F
atgaaatacctgctgccgaccgctgctgctggtctgctgctcctcgctgcccagccggcgatggccatggatccaaaaataatccttatagacggaaacagtattttaaaccgcggtttttatgccctgtcggggcgatccatgctgactacgtccacaggtctgtataccaatgcggttttcgcttttgtaaatatattgaacaaatatatcgaagaggaaaaccctgattatattgccgttgctttcgatcttagggcaaaaactttccggcacggtctatatgagggatacaaagcgcagcggaaaggcatgcccgatgaacttgcaatgcagatacccctcgcgaaggaagtactgagggcgatgaatattgccataatagagcatgaaggttatgaagccgacgatataatcggcagcctttcgttaaaggccgaaaaagagaattttgacgtaataatccttacgggggacagggattctttccagctgatcagcgacagggtgaaagttatcctgccttcgacgaaagccggaaaaacagagaccaacgtatatgataaacaggccatcattgacaaatacggagttttaccccatcagcttattgacgttaaaggcttaatgggagattcgtcagataatatacccggcgttccgggagtgggtgagaaaacggcgttaagccttatttcagcctacggtacactggaaggtgtttacgagcatattgatgaaataaaacagcctaagctgaaagcatcgctgattgaatataaggatcaggcgtttttaagccgtaagctgggtactattgtaagaaatctggagctgtgtgcttcgctggaggatctgaaaagaaaagaaataaaccgcaaagagcttttgaatgttttcagaaaactcgaatttgaaagtatcatatcaaaaatgaatcttgcttccgctgaggtgacagaattacctcccgcgccggaagagcttaaaataacccatatttcagcggcagaggatcttaagaaatggattgcttacctgcttaaccagaaaaacatttccgtccttcaactgattgaccgggaggattcatacagttcccgtctttcagggctggctttgtgcaccggggatgaggttttttatatcgagaccgggactgcactccccgagaatttgattgcaacagagctgaaagaactgtggcagaatgaaaatattcacaaaatcggacacaatataaaagaatttataacctggctgctgaaacacgatgttgaactgaacggcctttatttcgacactatgattgccgaatacctgatagattccataagaaacggctatcctatagcaagcctttctcacaaatacctgaatcgcagcgttccgtcgctggacgaacttttgggcaagggaaagggagcaaaaaagtactctgaaattccgcccgaaaggctgaaagattacagcgcttataacgtcaaagccatttttgacatatggccgatgcagaaaaaagttcttcaggaaaaccggcaggaggagctttttaatgacatagagcttcctcttataaccgtacttgccagtatggaataccacggtttcaaagttgacgccgcaaaacttcacgaatacggcgaagttcttctgtcacgcataaaagacctggaaaaggtaatttacatgctggccggtgaagaattcaacatcaattcaacgaagcagcttggtaccatattattcgaaaaactgaagcttcccgttgtaaaaagtacaaagaccggatactccaccgacgtcgaggttcttgaagagctttattacaagcatgatataataccatgcataatagaataccgccagcttacaaaactttacaccacctacgccgaaggtcttgaaaaagtgataaatcctgtaaccggtaaaattcattcaagttttaaccagacggttacggctacaggccgcatcagcagtaccgaaccaaatttacagaatatcccagtcagacacgaaatgggaagggaaatacggaaagcttttattccgtcgtcggaaaacgctgtttttgttgatgccgattattcacagatagagcttcgcgtgcttgcccatataacaggcgatgaagccctgataaatgctttcgttaagggggaagatattcatacggccacggcgtcgctggtatttgacgtagctcccgaagatgtgacgccggaactgcgcagaaaggcaaaagccgtaaatttcggcatagtgtacgggatcagtgattacgggctggcacgggatttgggaattacccggaaggaagcaaagcggtatatagacgactattttgccaaataccccaaagtaaaaacctatgtggatgaaattgtgcgggtcggccaggaacaggggtatgtggaaactctgttccacagaagaagataccttcccgagcttgcatttaaaaattttcaccagcgttctttcggaaaaagggttgcaatgaatacgcccatacagggcactgcagccgatattattaaaattgcgatggtgaaggtatacaaggctttgaaagaatccggccttaaatccaggcttatcctccaggtccatgacgaacttgttattgagacttttgaagacgaactggagactgtcaaggaacttgtcaaaaagtgcatggaagaggccgttgaattgagtgtgccgcttgttgtcgacgtttcaatcgggaaaaactggtatgaagcctcctgatatggatcc

SEQ ID NO: 268 - DNA, 2772 bp, Artificial Sequence
  Description of Artificial Sequence: Synthetic Clostridium stercorarium DNA Polymerase S822P
atgaaatacctgctgccgaccgctgctgctggtctgctgctcctcgctgcccagccggcgatggccatggatccaaaaataatccttatagacggaaacagtattttaaaccgcggtttttatgccctgtcggggcgatccatgctgactacgtccacaggtctgtataccaatgcggttttcgcttttgtaaatatattgaacaaatatatcgaagaggaaaaccctgattatattgccgttgctttcgatcttagggcaaaaactttccggcacggtctatatgagggatacaaagcgcagcggaaaggcatgcccgatgaacttgcaatgcagatacccctcgcgaaggaagtactgagggcgatgaatattgccataatagagcatgaaggttatgaagccgacgatataatcggcagcctttcgttaaaggccgaaaaagagaattttgacgtaataatccttacgggggacagggattctttccagctgatcagcgacagggtgaaagttatcctgccttcgacgaaagccggaaaaacagagaccaacgtatatgataaacaggccatcattgacaaatacggagttttaccccatcagcttattgacgttaaaggcttaatgggagattcgtcagataatatacccggcgttccgggagtgggtgagaaaacggcgttaagccttatttcagcctacggtacactggaaggtgtttacgagcatattgatgaaataaaacagcctaagctgaaagcatcgctgattgaatataaggatcaggcgtttttaagccgtaagctgggtactattgtaagaaatctggagctgtgtgcttcgctggaggatctgaaaagaaaagaaataaaccgcaaagagcttttgaatgttttcagaaaactcgaatttgaaagtatcatatcaaaaatgaatcttgcttccgctgaggtgacagaattacctcccgcgccggaagagcttaaaataacccatatttcagcggcagaggatcttaagaaatggattgcttacctgcttaaccagaaaaacatttccgtccttcaactgattgaccgggaggattcatacagttcccgtctttcagggctggctttgtgcaccggggatgaggttttttatatcgagaccgggactgcactccccgagaatttgattgcaacagagctgaaagaactgtggcagaatgaaaatattcacaaaatcggacacaatataaaagaatttataacctggctgctgaaacacgatgttgaactgaacggcctttatttcgacactatgattgccgaatacctgatagattccataagaaacggctatcctatagcaagcctttctcacaaatacctgaatcgcagcgttccgtcgctggacgaacttttgggcaagggaaagggagcaaaaaagtactctgaaattccgcccgaaaggctgaaagattacagcgcttataacgtcaaagccatttttgacatatggccgatgcagaaaaaagttcttcaggaaaaccggcaggaggagctttttaatgacatagagcttcctcttataaccgtacttgccagtatggaataccacggtttcaaagttgacgccgcaaaacttcacgaatacggcgaagttcttctgtcacgcataaaagacctggaaaaggtaatttacatgctggccggtgaagaattcaacatcaattcaacgaagcagcttggtaccatattattcgaaaaactgaagcttcccgttgtaaaaagtacaaagaccggatactccaccgacgtcgaggttcttgaagagctttattacaagcatgatataataccatgcataatagaataccgccagcttacaaaactttacaccacctacgccgaaggtcttgaaaaagtgataaatcctgtaaccggtaaaattcattcaagttttaaccagacggttacggctacaggccgcatcagcagtaccgaaccaaatttacagaatatcccagtcagacacgaaatgggaagggaaatacggaaagcttttattccgtcgtcggaaaacgctgtttttgttgatgccgattattcacagatagagcttcgcgtgcttgcccatataacaggcgatgaagccctgataaatgctttcgttaagggggaagatattcatacggccacggcgtcgctggtatttgacgtagctcccgaagatgtgacgccggaactgcgcagaaaggcaaaagccgtaaatttcggcatagtgtacgggatcagtgattacgggctggcacgggatttgggaattacccggaaggaagcaaagcggtatatagacgactattttgccaaataccccaaagtaaaaacctatgtggatgaaattgtgcgggtcggccaggaacaggggtatgtggaaactctgttccacagaagaagataccttcccgagcttgcacctaaaaattttcaccagcgttctttcggaaaaagggttgcaatgaatacgcccatacagggcactgcagccgatattattaaaattgcgatggtgaaggtatacaaggctttgaaagaatccggccttaaatccaggcttatcctccaggtccatgacgaacttgttattgagacttttgaagacgaactggagactgtcaaggaacttgtcaaaaagtgcatggaagaggccgttgaattgagtgtgccgcttgttgtcgacgtttcaatcgggaaaaactggtatgaagcctcctgatatggatcc

SEQ ID NO: 269 - DNA, 2772 bp, Artificial Sequence
  Description of Artificial Sequence: Synthetic Clostridium stercorarium DNA Polymerase S822T
atgaaatacctgctgccgaccgctgctgctggtctgctgctcctcgctgcccagccggcgatggccatggatccaaaaataatccttatagacggaaacagtattttaaaccgcggtttttatgccctgtcggggcgatccatgctgactacgtccacaggtctgtataccaatgcggttttcgcttttgtaaatatattgaacaaatatatcgaagaggaaaaccctgattatattgccgttgctttcgatcttagggcaaaaactttccggcacggtctatatgagggatacaaagcgcagcggaaaggcatgcccgatgaacttgcaatgcagatacccctcgcgaaggaagtactgagggcgatgaatattgccataatagagcatgaaggttatgaagccgacgatataatcggcagcctttcgttaaaggccgaaaaagagaattttgacgtaataatccttacgggggacagggattctttccagctgatcagcgacagggtgaaagttatcctgccttcgacgaaagccggaaaaacagagaccaacgtatatgataaacaggccatcattgacaaatacggagttttaccccatcagcttattgacgttaaaggcttaatgggagattcgtcagataatatacccggcgttccgggagtgggtgagaaaacggcgttaagccttatttcagcctacggtacactggaaggtgtttacgagcatattgatgaaataaaacagcctaagctgaaagcatcgctgattgaatataaggatcaggcgtttttaagccgtaagctgggtactattgtaagaaatctggagctgtgtgcttcgctggaggatctgaaaagaaaagaaataaaccgcaaagagcttttgaatgttttcagaaaactcgaatttgaaagtatcatatcaaaaatgaatcttgcttccgctgaggtgacagaattacctcccgcgccggaagagcttaaaataacccatatttcagcggcagaggatcttaagaaatggattgcttacctgcttaaccagaaaaacatttccgtccttcaactgattgaccgggaggattcatacagttcccgtctttcagggctggctttgtgcaccggggatgaggttttttatatcgagaccgggactgcactccccgagaatttgattgcaacagagctgaaagaactgtggcagaatgaaaatattcacaaaatcggacacaatataaaagaatttataacctggctgctgaaacacgatgttgaactgaacggcctttatttcgacactatgattgccgaatacctgatagattccataagaaacggctatcctatagcaagcctttctcacaaatacctgaatcgcagcgttccgtcgctggacgaacttttgggcaagggaaagggagcaaaaaagtactctgaaattccgcccgaaaggctgaaagattacagcgcttataacgtcaaagccatttttgacatatggccgatgcagaaaaaagttcttcaggaaaaccggcaggaggagctttttaatgacatagagcttcctcttataaccgtacttgccagtatggaataccacggtttcaaagttgacgccgcaaaacttcacgaatacggcgaagttcttctgtcacgcataaaagacctggaaaaggtaatttacatgctggccggtgaagaattcaacatcaattcaacgaagcagcttggtaccatattattcgaaaaactgaagcttcccgttgtaaaaagtacaaagaccggatactccaccgacgtcgaggttcttgaagagctttattacaagcatgatataataccatgcataatagaataccgccagcttacaaaactttacaccacctacgccgaaggtcttgaaaaagtgataaatcctgtaaccggtaaaattcattcaagttttaaccagacggttacggctacaggccgcatcagcagtaccgaaccaaatttacagaatatcccagtcagacacgaaatgggaagggaaatacggaaagcttttattccgtcgtcggaaaacgctgtttttgttgatgccgattattcacagatagagcttcgcgtgcttgcccatataacaggcgatgaagccctgataaatgctttcgttaagggggaagatattcatacggccacggcgtcgctggtatttgacgtagctcccgaagatgtgacgccggaactgcgcagaaaggcaaaagccgtaaatttcggcatagtgtacgggatcagtgattacgggctggcacgggatttgggaattacccggaaggaagcaaagcggtatatagacgactattttgccaaataccccaaagtaaaaacctatgtggatgaaattgtgcgggtcggccaggaacaggggtatgtggaaactctgttccacagaagaagataccttcccgagcttgcaactaaaaattttcaccagcgttctttcggaaaaagggttgcaatgaatacgcccatacagggcactgcagccgatattattaaaattgcgatggtgaaggtatacaaggctttgaaagaatccggccttaaatccaggcttatcctccaggtccatgacgaacttgttattgagacttttgaagacgaactggagactgtcaaggaacttgtcaaaaagtgcatggaagaggccgttgaattgagtgtgccgcttgttgtcgacgtttcaatcgggaaaaactggtatgaagcctcctgatatggatcc

SEQ ID NO: 270 - DNA, 2772 bp, Artificial Sequence
  Description of Artificial Sequence: Synthetic Clostridium stercorarium DNA Polymerase S822W
atgaaatacctgctgccgaccgctgctgctggtctgctgctcctcgctgcccagccggcgatggccatggatccaaaaataatccttatagacggaaacagtattttaaaccgcggtttttatgccctgtcggggcgatccatgctgactacgtccacaggtctgtataccaatgcggttttcgcttttgtaaatatattgaacaaatatatcgaagaggaaaaccctgattatattgccgttgctttcgatcttagggcaaaaactttccggcacggtctatatgagggatacaaagcgcagcggaaaggcatgcccgatgaacttgcaatgcagatacccctcgcgaaggaagtactgagggcgatgaatattgccataatagagcatgaaggttatgaagccgacgatataatcggcagcctttcgttaaaggccgaaaaagagaattttgacgtaataatccttacgggggacagggattctttccagctgatcagcgacagggtgaaagttatcctgccttcgacgaaagccggaaaaacagagaccaacgtatatgataaacaggccatcattgacaaatacggagttttaccccatcagcttattgacgttaaaggcttaatgggagattcgtcagataatatacccggcgttccgggagtgggtgagaaaacggcgttaagccttatttcagcctacggtacactggaaggtgtttacgagcatattgatgaaataaaacagcctaagctgaaagcatcgctgattgaatataaggatcaggcgtttttaagccgtaagctgggtactattgtaagaaatctggagctgtgtgcttcgctggaggatctgaaaagaaaagaaataaaccgcaaagagcttttgaatgttttcagaaaactcgaatttgaaagtatcatatcaaaaatgaatcttgcttccgctgaggtgacagaattacctcccgcgccggaagagcttaaaataacccatatttcagcggcagaggatcttaagaaatggattgcttacctgcttaaccagaaaaacatttccgtccttcaactgattgaccgggaggattcatacagttcccgtctttcagggctggctttgtgcaccggggatgaggttttttatatcgagaccgggactgcactccccgagaatttgattgcaacagagctgaaagaactgtggcagaatgaaaatattcacaaaatcggacacaatataaaagaatttataacctggctgctgaaacacgatgttgaactgaacggcctttatttcgacactatgattgccgaatacctgatagattccataagaaacggctatcctatagcaagcctttctcacaaatacctgaatcgcagcgttccgtcgctggacgaacttttgggcaagggaaagggagcaaaaaagtactctgaaattccgcccgaaaggctgaaagattacagcgcttataacgtcaaagccatttttgacatatggccgatgcagaaaaaagttcttcaggaaaaccggcaggaggagctttttaatgacatagagcttcctcttataaccgtacttgccagtatggaataccacggtttcaaagttgacgccgcaaaacttcacgaatacggcgaagttcttctgtcacgcataaaagacctggaaaaggtaatttacatgctggccggtgaagaattcaacatcaattcaacgaagcagcttggtaccatattattcgaaaaactgaagcttcccgttgtaaaaagtacaaagaccggatactccaccgacgtcgaggttcttgaagagctttattacaagcatgatataataccatgcataatagaataccgccagcttacaaaactttacaccacctacgccgaaggtcttgaaaaagtgataaatcctgtaaccggtaaaattcattcaagttttaaccagacggttacggctacaggccgcatcagcagtaccgaaccaaatttacagaatatcccagtcagacacgaaatgggaagggaaatacggaaagcttttattccgtcgtcggaaaacgctgtttttgttgatgccgattattcacagatagagcttcgcgtgcttgcccatataacaggcgatgaagccctgataaatgctttcgttaagggggaagatattcatacggccacggcgtcgctggtatttgacgtagctcccgaagatgtgacgccggaactgcgcagaaaggcaaaagccgtaaatttcggcatagtgtacgggatcagtgattacgggctggcacgggatttgggaattacccggaaggaagcaaagcggtatatagacgactattttgccaaataccccaaagtaaaaacctatgtggatgaaattgtgcgggtcggccaggaacaggggtatgtggaaactctgttccacagaagaagataccttcccgagcttgcatggaaaaattttcaccagcgttctttcggaaaaagggttgcaatgaatacgcccatacagggcactgcagccgatattattaaaattgcgatggtgaaggtatacaaggctttgaaagaatccggccttaaatccaggcttatcctccaggtccatgacgaacttgttattgagacttttgaagacgaactggagactgtcaaggaacttgtcaaaaagtgcatggaagaggccgttgaattgagtgtgccgcttgttgtcgacgtttcaatcgggaaaaactggtatgaagcctcctgatatggatcc

SEQ ID NO: 271 - DNA, 2772 bp, Artificial Sequence
  Description of Artificial Sequence: Synthetic Clostridium stercorarium DNA Polymerase S822Y
atgaaatacctgctgccgaccgctgctgctggtctgctgctcctcgctgcccagccggcgatggccatggatccaaaaataatccttatagacggaaacagtattttaaaccgcggtttttatgccctgtcggggcgatccatgctgactacgtccacaggtctgtataccaatgcggttttcgcttttgtaaatatattgaacaaatatatcgaagaggaaaaccctgattatattgccgttgctttcgatcttagggcaaaaactttccggcacggtctatatgagggatacaaagcgcagcggaaaggcatgcccgatgaacttgcaatgcagatacccctcgcgaaggaagtactgagggcgatgaatattgccataatagagcatgaaggttatgaagccgacgatataatcggcagcctttcgttaaaggccgaaaaagagaattttgacgtaataatccttacgggggacagggattctttccagctgatcagcgacagggtgaaagttatcctgccttcgacgaaagccggaaaaacagagaccaacgtatatgataaacaggccatcattgacaaatacggagttttaccccatcagcttattgacgttaaaggcttaatgggagattcgtcagataatatacccggcgttccgggagtgggtgagaaaacggcgttaagccttatttcagcctacggtacactggaaggtgtttacgagcatattgatgaaataaaacagcctaagctgaaagcatcgctgattgaatataaggatcaggcgtttttaagccgtaagctgggtactattgtaagaaatctggagctgtgtgcttcgctggaggatctgaaaagaaaagaaataaaccgcaaagagcttttgaatgttttcagaaaactcgaatttgaaagtatcatatcaaaaatgaatcttgcttccgctgaggtgacagaattacctcccgcgccggaagagcttaaaataacccatatttcagcggcagaggatcttaagaaatggattgcttacctgcttaaccagaaaaacatttccgtccttcaactgattgaccgggaggattcatacagttcccgtctttcagggctggctttgtgcaccggggatgaggttttttatatcgagaccgggactgcactccccgagaatttgattgcaacagagctgaaagaactgtggcagaatgaaaatattcacaaaatcggacacaatataaaagaatttataacctggctgctgaaacacgatgttgaactgaacggcctttatttcgacactatgattgccgaatacctgatagattccataagaaacggctatcctatagcaagcctttctcacaaatacctgaatcgcagcgttccgtcgctggacgaacttttgggcaagggaaagggagcaaaaaagtactctgaaattccgcccgaaaggctgaaagattacagcgcttataacgtcaaagccatttttgacatatggccgatgcagaaaaaagttcttcaggaaaaccggcaggaggagctttttaatgacatagagcttcctcttataaccgtacttgccagtatggaataccacggtttcaaagttgacgccgcaaaacttcacgaatacggcgaagttcttctgtcacgcataaaagacctggaaaaggtaatttacatgctggccggtgaagaattcaacatcaattcaacgaagcagcttggtaccatattattcgaaaaactgaagcttcccgttgtaaaaagtacaaagaccggatactccaccgacgtcgaggttcttgaagagctttattacaagcatgatataataccatgcataatagaataccgccagcttacaaaactttacaccacctacgccgaaggtcttgaaaaagtgataaatcctgtaaccggtaaaattcattcaagttttaaccagacggttacggctacaggccgcatcagcagtaccgaaccaaatttacagaatatcccagtcagacacgaaatgggaagggaaatacggaaagcttttattccgtcgtcggaaaacgctgtttttgttgatgccgattattcacagatagagcttcgcgtgcttgcccatataacaggcgatgaagccctgataaatgctttcgttaagggggaagatattcatacggccacggcgtcgctggtatttgacgtagctcccgaagatgtgacgccggaactgcgcagaaaggcaaaagccgtaaatttcggcatagtgtacgggatcagtgattacgggctggcacgggatttgggaattacccggaaggaagcaaagcggtatatagacgactattttgccaaataccccaaagtaaaaacctatgtggatgaaattgtgcgggtcggccaggaacaggggtatgtggaaactctgttccacagaagaagataccttcccgagcttgcatataaaaattttcaccagcgttctttcggaaaaagggttgcaatgaatacgcccatacagggcactgcagccgatattattaaaattgcgatggtgaaggtatacaaggctttgaaagaatccggccttaaatccaggcttatcctccaggtccatgacgaacttgttattgagacttttgaagacgaactggagactgtcaaggaacttgtcaaaaagtgcatggaagaggccgttgaattgagtgtgccgcttgttgtcgacgtttcaatcgggaaaaactggtatgaagcctcctgatatggatcc

SEQ ID NO: 272 - DNA, 2772 bp, Artificial Sequence
  Description of Artificial Sequence: Synthetic Clostridium stercorarium DNA Polymerase S822V
atgaaatacctgctgccgaccgctgctgctggtctgctgctcctcgctgcccagccggcgatggccatggatccaaaaataatccttatagacggaaacagtattttaaaccgcggtttttatgccctgtcggggcgatccatgctgactacgtccacaggtctgtataccaatgcggttttcgcttttgtaaatatattgaacaaatatatcgaagaggaaaaccctgattatattgccgttgctttcgatcttagggcaaaaactttccggcacggtctatatgagggatacaaagcgcagcggaaaggcatgcccgatgaacttgcaatgcagatacccctcgcgaaggaagtactgagggcgatgaatattgccataatagagcatgaaggttatgaagccgacgatataatcggcagcctttcgttaaaggccgaaaaagagaattttgacgtaataatccttacgggggacagggattctttccagctgatcagcgacagggtgaaagttatcctgccttcgacgaaagccggaaaaacagagaccaacgtatatgataaacaggccatcattgacaaatacggagttttaccccatcagcttattgacgttaaaggcttaatgggagattcgtcagataatatacccggcgttccgggagtgggtgagaaaacggcgttaagccttatttcagcctacggtacactggaaggtgtttacgagcatattgatgaaataaaacagcctaagctgaaagcatcgctgattgaatataaggatcaggcgtttttaagccgtaagctgggtactattgtaagaaatctggagctgtgtgcttcgctggaggatctgaaaagaaaagaaataaaccgcaaagagcttttgaatgttttcagaaaactcgaatttgaaagtatcatatcaaaaatgaatcttgcttccgctgaggtgacagaattacctcccgcgccggaagagcttaaaataacccatatttcagcggcagaggatcttaagaaatggattgcttacctgcttaaccagaaaaacatttccgtccttcaactgattgaccgggaggattcatacagttcccgtctttcagggctggctttgtgcaccggggatgaggttttttatatcgagaccgggactgcactccccgagaatttgattgcaacagagctgaaagaactgtggcagaatgaaaatattcacaaaatcggacacaatataaaagaatttataacctggctgctgaaacacgatgttgaactgaacggcctttatttcgacactatgattgccgaatacctgatagattccataagaaacggctatcctatagcaagcctttctcacaaatacctgaatcgcagcgttccgtcgctggacgaacttttgggcaagggaaagggagcaaaaaagtactctgaaattccgcccgaaaggctgaaagattacagcgcttataacgtcaaagccatttttgacatatggccgatgcagaaaaaagttcttcaggaaaaccggcaggaggagctttttaatgacatagagcttcctcttataaccgtacttgccagtatggaataccacggtttcaaagttgacgccgcaaaacttcacgaatacggcgaagttcttctgtcacgcataaaagacctggaaaaggtaatttacatgctggccggtgaagaattcaacatcaattcaacgaagcagcttggtaccatattattcgaaaaactgaagcttcccgttgtaaaaagtacaaagaccggatactccaccgacgtcgaggttcttgaagagctttattacaagcatgatataataccatgcataatagaataccgccagcttacaaaactttacaccacctacgccgaaggtcttgaaaaagtgataaatcctgtaaccggtaaaattcattcaagttttaaccagacggttacggctacaggccgcatcagcagtaccgaaccaaatttacagaatatcccagtcagacacgaaatgggaagggaaatacggaaagcttttattccgtcgtcggaaaacgctgtttttgttgatgccgattattcacagatagagcttcgcgtgcttgcccatataacaggcgatgaagccctgataaatgctttcgttaagggggaagatattcatacggccacggcgtcgctggtatttgacgtagctcccgaagatgtgacgccggaactgcgcagaaaggcaaaagccgtaaatttcggcatagtgtacgggatcagtgattacgggctggcacgggatttgggaattacccggaaggaagcaaagcggtatatagacgactattttgccaaataccccaaagtaaaaacctatgtggatgaaattgtgcgggtcggccaggaacaggggtatgtggaaactctgttccacagaagaagataccttcccgagcttgcagttaaaaattttcaccagcgttctttcggaaaaagggttgcaatgaatacgcccatacagggcactgcagccgatattattaaaattgcgatggtgaaggtatacaaggctttgaaagaatccggccttaaatccaggcttatcctccaggtccatgacgaacttgttattgagacttttgaagacgaactggagactgtcaaggaacttgtcaaaaagtgcatggaagaggccgttgaattgagtgtgccgcttgttgtcgacgtttcaatcgggaaaaactggtatgaagcctcctgatatggatcc

SEQ ID NO: 273 - DNA, 2772 bp, Artificial Sequence
  Description of Artificial Sequence: Synthetic Clostridium stercorarium DNA Polymerase K823A
atgaaatacctgctgccgaccgctgctgctggtctgctgctcctcgctgcccagccggcgatggccatggatccaaaaataatccttatagacggaaacagtattttaaaccgcggtttttatgccctgtcggggcgatccatgctgactacgtccacaggtctgtataccaatgcggttttcgcttttgtaaatatattgaacaaatatatcgaagaggaaaaccctgattatattgccgttgctttcgatcttagggcaaaaactttccggcacggtctatatgagggatacaaagcgcagcggaaaggcatgcccgatgaacttgcaatgcagatacccctcgcgaaggaagtactgagggcgatgaatattgccataatagagcatgaaggttatgaagccgacgatataatcggcagcctttcgttaaaggccgaaaaagagaattttgacgtaataatccttacgggggacagggattctttccagctgatcagcgacagggtgaaagttatcctgccttcgacgaaagccggaaaaacagagaccaacgtatatgataaacaggccatcattgacaaatacggagttttaccccatcagcttattgacgttaaaggcttaatgggagattcgtcagataatatacccggcgttccgggagtgggtgagaaaacggcgttaagccttatttcagcctacggtacactggaaggtgtttacgagcatattgatgaaataaaacagcctaagctgaaagcatcgctgattgaatataaggatcaggcgtttttaagccgtaagctgggtactattgtaagaaatctggagctgtgtgcttcgctggaggatctgaaaagaaaagaaataaaccgcaaagagcttttgaatgttttcagaaaactcgaatttgaaagtatcatatcaaaaatgaatcttgcttccgctgaggtgacagaattacctcccgcgccggaagagcttaaaataacccatatttcagcggcagaggatcttaagaaatggattgcttacctgcttaaccagaaaaacatttccgtccttcaactgattgaccgggaggattcatacagttcccgtctttcagggctggctttgtgcaccggggatgaggttttttatatcgagaccgggactgcactccccgagaatttgattgcaacagagctgaaagaactgtggcagaatgaaaatattcacaaaatcggacacaatataaaagaatttataacctggctgctgaaacacgatgttgaactgaacggcctttatttcgacactatgattgccgaatacctgatagattccataagaaacggctatcctatagcaagcctttctcacaaatacctgaatcgcagcgttccgtcgctggacgaacttttgggcaagggaaagggagcaaaaaagtactctgaaattccgcccgaaaggctgaaagattacagcgcttataacgtcaaagccatttttgacatatggccgatgcagaaaaaagttcttcaggaaaaccggcaggaggagctttttaatgacatagagcttcctcttataaccgtacttgccagtatggaataccacggtttcaaagttgacgccgcaaaacttcacgaatacggcgaagttcttctgtcacgcataaaagacctggaaaaggtaatttacatgctggccggtgaagaattcaacatcaattcaacgaagcagcttggtaccatattattcgaaaaactgaagcttcccgttgtaaaaagtacaaagaccggatactccaccgacgtcgaggttcttgaagagctttattacaagcatgatataataccatgcataatagaataccgccagcttacaaaactttacaccacctacgccgaaggtcttgaaaaagtgataaatcctgtaaccggtaaaattcattcaagttttaaccagacggttacggctacaggccgcatcagcagtaccgaaccaaatttacagaatatcccagtcagacacgaaatgggaagggaaatacggaaagcttttattccgtcgtcggaaaacgctgtttttgttgatgccgattattcacagatagagcttcgcgtgcttgcccatataacaggcgatgaagccctgataaatgctttcgttaagggggaagatattcatacggccacggcgtcgctggtatttgacgtagctcccgaagatgtgacgccggaactgcgcagaaaggcaaaagccgtaaatttcggcatagtgtacgggatcagtgattacgggctggcacgggatttgggaattacccggaaggaagcaaagcggtatatagacgactattttgccaaataccccaaagtaaaaacctatgtggatgaaattgtgcgggtcggccaggaacaggggtatgtggaaactctgttccacagaagaagataccttcccgagcttgcatctgctaattttcaccagcgttctttcggaaaaagggttgcaatgaatacgcccatacagggcactgcagccgatattattaaaattgcgatggtgaaggtatacaaggctttgaaagaatccggccttaaatccaggcttatcctccaggtccatgacgaacttgttattgagacttttgaagacgaactggagactgtcaaggaacttgtcaaaaagtgcatggaagaggccgttgaattgagtgtgccgcttgttgtcgacgtttcaatcgggaaaaactggtatgaagcctcctgatatggatcc

SEQ ID NO: 274 - DNA, 2772 bp, Artificial Sequence
  Description of Artificial Sequence: Synthetic Clostridium stercorarium DNA Polymerase K823R
atgaaatacctgctgccgaccgctgctgctggtctgctgctcctcgctgcccagccggcgatggccatggatccaaaaataatccttatagacggaaacagtattttaaaccgcggtttttatgccctgtcggggcgatccatgctgactacgtccacaggtctgtataccaatgcggttttcgcttttgtaaatatattgaacaaatatatcgaagaggaaaaccctgattatattgccgttgctttcgatcttagggcaaaaactttccggcacggtctatatgagggatacaaagcgcagcggaaaggcatgcccgatgaacttgcaatgcagatacccctcgcgaaggaagtactgagggcgatgaatattgccataatagagcatgaaggttatgaagccgacgatataatcggcagcctttcgttaaaggccgaaaaagagaattttgacgtaataatccttacgggggacagggattctttccagctgatcagcgacagggtgaaagttatcctgccttcgacgaaagccggaaaaacagagaccaacgtatatgataaacaggccatcattgacaaatacggagttttaccccatcagcttattgacgttaaaggcttaatgggagattcgtcagataatatacccggcgttccgggagtgggtgagaaaacggcgttaagccttatttcagcctacggtacactggaaggtgtttacgagcatattgatgaaataaaacagcctaagctgaaagcatcgctgattgaatataaggatcaggcgtttttaagccgtaagctgggtactattgtaagaaatctggagctgtgtgcttcgctggaggatctgaaaagaaaagaaataaaccgcaaagagcttttgaatgttttcagaaaactcgaatttgaaagtatcatatcaaaaatgaatcttgcttccgctgaggtgacagaattacctcccgcgccggaagagcttaaaataacccatatttcagcggcagaggatcttaagaaatggattgcttacctgcttaaccagaaaaacatttccgtccttcaactgattgaccgggaggattcatacagttcccgtctttcagggctggctttgtgcaccggggatgaggttttttatatcgagaccgggactgcactccccgagaatttgattgcaacagagctgaaagaactgtggcagaatgaaaatattcacaaaatcggacacaatataaaagaatttataacctggctgctgaaacacgatgttgaactgaacggcctttatttcgacactatgattgccgaatacctgatagattccataagaaacggctatcctatagcaagcctttctcacaaatacctgaatcgcagcgttccgtcgctggacgaacttttgggcaagggaaagggagcaaaaaagtactctgaaattccgcccgaaaggctgaaagattacagcgcttataacgtcaaagccatttttgacatatggccgatgcagaaaaaagttcttcaggaaaaccggcaggaggagctttttaatgacatagagcttcctcttataaccgtacttgccagtatggaataccacggtttcaaagttgacgccgcaaaacttcacgaatacggcgaagttcttctgtcacgcataaaagacctggaaaaggtaatttacatgctggccggtgaagaattcaacatcaattcaacgaagcagcttggtaccatattattcgaaaaactgaagcttcccgttgtaaaaagtacaaagaccggatactccaccgacgtcgaggttcttgaagagctttattacaagcatgatataataccatgcataatagaataccgccagcttacaaaactttacaccacctacgccgaaggtcttgaaaaagtgataaatcctgtaaccggtaaaattcattcaagttttaaccagacggttacggctacaggccgcatcagcagtaccgaaccaaatttacagaatatcccagtcagacacgaaatgggaagggaaatacggaaagcttttattccgtcgtcggaaaacgctgtttttgttgatgccgattattcacagatagagcttcgcgtgcttgcccatataacaggcgatgaagccctgataaatgctttcgttaagggggaagatattcatacggccacggcgtcgctggtatttgacgtagctcccgaagatgtgacgccggaactgcgcagaaaggcaaaagccgtaaatttcggcatagtgtacgggatcagtgattacgggctggcacgggatttgggaattacccggaaggaagcaaagcggtatatagacgactattttgccaaataccccaaagtaaaaacctatgtggatgaaattgtgcgggtcggccaggaacaggggtatgtggaaactctgttccacagaagaagataccttcccgagcttgcatctcgtaattttcaccagcgttctttcggaaaaagggttgcaatgaatacgcccatacagggcactgcagccgatattattaaaattgcgatggtgaaggtatacaaggctttgaaagaatccggccttaaatccaggcttatcctccaggtccatgacgaacttgttattgagacttttgaagacgaactggagactgtcaaggaacttgtcaaaaagtgcatggaagaggccgttgaattgagtgtgccgcttgttgtcgacgtttcaatcgggaaaaactggtatgaagcctcctgatatggatcc

SEQ ID NO: 275 - DNA, 2772 bp, Artificial Sequence
  Description of Artificial Sequence: Synthetic Clostridium stercorarium DNA Polymerase K823N
atgaaatacctgctgccgaccgctgctgctggtctgctgctcctcgctgcccagccggcgatggccatggatccaaaaataatccttatagacggaaacagtattttaaaccgcggtttttatgccctgtcggggcgatccatgctgactacgtccacaggtctgtataccaatgcggttttcgcttttgtaaatatattgaacaaatatatcgaagaggaaaaccctgattatattgccgttgctttcgatcttagggcaaaaactttccggcacggtctatatgagggatacaaagcgcagcggaaaggcatgcccgatgaacttgcaatgcagatacccctcgcgaaggaagtactgagggcgatgaatattgccataatagagcatgaaggttatgaagccgacgatataatcggcagcctttcgttaaaggccgaaaaagagaattttgacgtaataatccttacgggggacagggattctttccagctgatcagcgacagggtgaaagttatcctgccttcgacgaaagccggaaaaacagagaccaacgtatatgataaacaggccatcattgacaaatacggagttttaccccatcagcttattgacgttaaaggcttaatgggagattcgtcagataatatacccggcgttccgggagtgggtgagaaaacggcgttaagccttatttcagcctacggtacactggaaggtgtttacgagcatattgatgaaataaaacagcctaagctgaaagcatcgctgattgaatataaggatcaggcgtttttaagccgtaagctgggtactattgtaagaaatctggagctgtgtgcttcgctggaggatctgaaaagaaaagaaataaaccgcaaagagcttttgaatgttttcagaaaactcgaatttgaaagtatcatatcaaaaatgaatcttgcttccgctgaggtgacagaattacctcccgcgccggaagagcttaaaataacccatatttcagcggcagaggatcttaagaaatggattgcttacctgcttaaccagaaaaacatttccgtccttcaactgattgaccgggaggattcatacagttcccgtctttcagggctggctttgtgcaccggggatgaggttttttatatcgagaccgggactgcactccccgagaatttgattgcaacagagctgaaagaactgtggcagaatgaaaatattcacaaaatcggacacaatataaaagaatttataacctggctgctgaaacacgatgttgaactgaacggcctttatttcgacactatgattgccgaatacctgatagattccataagaaacggctatcctatagcaagcctttctcacaaatacctgaatcgcagcgttccgtcgctggacgaacttttgggcaagggaaagggagcaaaaaagtactctgaaattccgcccgaaaggctgaaagattacagcgcttataacgtcaaagccatttttgacatatggccgatgcagaaaaaagttcttcaggaaaaccggcaggaggagctttttaatgacatagagcttcctcttataaccgtacttgccagtatggaataccacggtttcaaagttgacgccgcaaaacttcacgaatacggcgaagttcttctgtcacgcataaaagacctggaaaaggtaatttacatgctggccggtgaagaattcaacatcaattcaacgaagcagcttggtaccatattattcgaaaaactgaagcttcccgttgtaaaaagtacaaagaccggatactccaccgacgtcgaggttcttgaagagctttattacaagcatgatataataccatgcataatagaataccgccagcttacaaaactttacaccacctacgccgaaggtcttgaaaaagtgataaatcctgtaaccggtaaaattcattcaagttttaaccagacggttacggctacaggccgcatcagcagtaccgaaccaaatttacagaatatcccagtcagacacgaaatgggaagggaaatacggaaagcttttattccgtcgtcggaaaacgctgtttttgttgatgccgattattcacagatagagcttcgcgtgcttgcccatataacaggcgatgaagccctgataaatgctttcgttaagggggaagatattcatacggccacggcgtcgctggtatttgacgtagctcccgaagatgtgacgccggaactgcgcagaaaggcaaaagccgtaaatttcggcatagtgtacgggatcagtgattacgggctggcacgggatttgggaattacccggaaggaagcaaagcggtatatagacgactattttgccaaataccccaaagtaaaaacctatgtggatgaaattgtgcgggtcggccaggaacaggggtatgtggaaactctgttccacagaagaagataccttcccgagcttgcatctaataattttcaccagcgttctttcggaaaaagggttgcaatgaatacgcccatacagggcactgcagccgatattattaaaattgcgatggtgaaggtatacaaggctttgaaagaatccggccttaaatccaggcttatcctccaggtccatgacgaacttgttattgagacttttgaagacgaactggagactgtcaaggaacttgtcaaaaagtgcatggaagaggccgttgaattgagtgtgccgcttgttgtcgacgtttcaatcgggaaaaactggtatgaagcctcctgatatggatcc

SEQ ID NO: 276 - DNA, 2772 bp, Artificial Sequence
  Description of Artificial Sequence: Synthetic Clostridium stercorarium DNA Polymerase K823D
atgaaatacctgctgccgaccgctgctgctggtctgctgctcctcgctgcccagccggcgatggccatggatccaaaaataatccttatagacggaaacagtattttaaaccgcggtttttatgccctgtcggggcgatccatgctgactacgtccacaggtctgtataccaatgcggttttcgcttttgtaaatatattgaacaaatatatcgaagaggaaaaccctgattatattgccgttgctttcgatcttagggcaaaaactttccggcacggtctatatgagggatacaaagcgcagcggaaaggcatgcccgatgaacttgcaatgcagatacccctcgcgaaggaagtactgagggcgatgaatattgccataatagagcatgaaggttatgaagccgacgatataatcggcagcctttcgttaaaggccgaaaaagagaattttgacgtaataatccttacgggggacagggattctttccagctgatcagcgacagggtgaaagttatcctgccttcgacgaaagccggaaaaacagagaccaacgtatatgataaacaggccatcattgacaaatacggagttttaccccatcagcttattgacgttaaaggcttaatgggagattcgtcagataatatacccggcgttccgggagtgggtgagaaaacggcgttaagccttatttcagcctacggtacactggaaggtgtttacgagcatattgatgaaataaaacagcctaagctgaaagcatcgctgattgaatataaggatcaggcgtttttaagccgtaagctgggtactattgtaagaaatctggagctgtgtgcttcgctggaggatctgaaaagaaaagaaataaaccgcaaagagcttttgaatgttttcagaaaactcgaatttgaaagtatcatatcaaaaatgaatcttgcttccgctgaggtgacagaattacctcccgcgccggaagagcttaaaataacccatatttcagcggcagaggatcttaagaaatggattgcttacctgcttaaccagaaaaacatttccgtccttcaactgattgaccgggaggattcatacagttcccgtctttcagggctggctttgtgcaccggggatgaggttttttatatcgagaccgggactgcactccccgagaatttgattgcaacagagctgaaagaactgtggcagaatgaaaatattcacaaaatcggacacaatataaaagaatttataacctggctgctgaaacacgatgttgaactgaacggcctttatttcgacactatgattgccgaatacctgatagattccataagaaacggctatcctatagcaagcctttctcacaaatacctgaatcgcagcgttccgtcgctggacgaacttttgggcaagggaaagggagcaaaaaagtactctgaaattccgcccgaaaggctgaaagattacagcgcttataacgtcaaagccatttttgacatatggccgatgcagaaaaaagttcttcaggaaaaccggcaggaggagctttttaatgacatagagcttcctcttataaccgtacttgccagtatggaataccacggtttcaaagttgacgccgcaaaacttcacgaatacggcgaagttcttctgtcacgcataaaagacctggaaaaggtaatttacatgctggccggtgaagaattcaacatcaattcaacgaagcagcttggtaccatattattcgaaaaactgaagcttcccgttgtaaaaagtacaaagaccggatactccaccgacgtcgaggttcttgaagagctttattacaagcatgatataataccatgcataatagaataccgccagcttacaaaactttacaccacctacgccgaaggtcttgaaaaagtgataaatcctgtaaccggtaaaattcattcaagttttaaccagacggttacggctacaggccgcatcagcagtaccgaaccaaatttacagaatatcccagtcagacacgaaatgggaagggaaatacggaaagcttttattccgtcgtcggaaaacgctgtttttgttgatgccgattattcacagatagagcttcgcgtgcttgcccatataacaggcgatgaagccctgataaatgctttcgttaagggggaagatattcatacggccacggcgtcgctggtatttgacgtagctcccgaagatgtgacgccggaactgcgcagaaaggcaaaagccgtaaatttcggcatagtgtacgggatcagtgattacgggctggcacgggatttgggaattacccggaaggaagcaaagcggtatatagacgactattttgccaaataccccaaagtaaaaacctatgtggatgaaattgtgcgggtcggccaggaacaggggtatgtggaaactctgttccacagaagaagataccttcccgagcttgcatctgataattttcaccagcgttctttcggaaaaagggttgcaatgaatacgcccatacagggcactgcagccgatattattaaaattgcgatggtgaaggtatacaaggctttgaaagaatccggccttaaatccaggcttatcctccaggtccatgacgaacttgttattgagacttttgaagacgaactggagactgtcaaggaacttgtcaaaaagtgcatggaagaggccgttgaattgagtgtgccgcttgttgtcgacgtttcaatcgggaaaaactggtatgaagcctcctgatatggatcc

SEQ ID NO: 277 - DNA, 2772 bp, Artificial Sequence
  Description of Artificial Sequence: Synthetic Clostridium stercorarium DNA Polymerase K823C
atgaaatacctgctgccgaccgctgctgctggtctgctgctcctcgctgcccagccggcgatggccatggatccaaaaataatccttatagacggaaacagtattttaaaccgcggtttttatgccctgtcggggcgatccatgctgactacgtccacaggtctgtataccaatgcggttttcgcttttgtaaatatattgaacaaatatatcgaagaggaaaaccctgattatattgccgttgctttcgatcttagggcaaaaactttccggcacggtctatatgagggatacaaagcgcagcggaaaggcatgcccgatgaacttgcaatgcagatacccctcgcgaaggaagtactgagggcgatgaatattgccataatagagcatgaaggttatgaagccgacgatataatcggcagcctttcgttaaaggccgaaaaagagaattttgacgtaataatccttacgggggacagggattctttccagctgatcagcgacagggtgaaagttatcctgccttcgacgaaagccggaaaaacagagaccaacgtatatgataaacaggccatcattgacaaatacggagttttaccccatcagcttattgacgttaaaggcttaatgggagattcgtcagataatatacccggcgttccgggagtgggtgagaaaacggcgttaagccttatttcagcctacggtacactggaaggtgtttacgagcatattgatgaaataaaacagcctaagctgaaagcatcgctgattgaatataaggatcaggcgtttttaagccgtaagctgggtactattgtaagaaatctggagctgtgtgcttcgctggaggatctgaaaagaaaagaaataaaccgcaaagagcttttgaatgttttcagaaaactcgaatttgaaagtatcatatcaaaaatgaatcttgcttccgctgaggtgacagaattacctcccgcgccggaagagcttaaaataacccatatttcagcggcagaggatcttaagaaatggattgcttacctgcttaaccagaaaaacatttccgtccttcaactgattgaccgggaggattcatacagttcccgtctttcagggctggctttgtgcaccggggatgaggttttttatatcgagaccgggactgcactccccgagaatttgattgcaacagagctgaaagaactgtggcagaatgaaaatattcacaaaatcggacacaatataaaagaatttataacctggctgctgaaacacgatgttgaactgaacggcctttatttcgacactatgattgccgaatacctgatagattccataagaaacggctatcctatagcaagcctttctcacaaatacctgaatcgcagcgttccgtcgctggacgaacttttgggcaagggaaagggagcaaaaaagtactctgaaattccgcccgaaaggctgaaagattacagcgcttataacgtcaaagccatttttgacatatggccgatgcagaaaaaagttcttcaggaaaaccggcaggaggagctttttaatgacatagagcttcctcttataaccgtacttgccagtatggaataccacggtttcaaagttgacgccgcaaaacttcacgaatacggcgaagttcttctgtcacgcataaaagacctggaaaaggtaatttacatgctggccggtgaagaattcaacatcaattcaacgaagcagcttggtaccatattattcgaaaaactgaagcttcccgttgtaaaaagtacaaagaccggatactccaccgacgtcgaggttcttgaagagctttattacaagcatgatataataccatgcataatagaataccgccagcttacaaaactttacaccacctacgccgaaggtcttgaaaaagtgataaatcctgtaaccggtaaaattcattcaagttttaaccagacggttacggctacaggccgcatcagcagtaccgaaccaaatttacagaatatcccagtcagacacgaaatgggaagggaaatacggaaagcttttattccgtcgtcggaaaacgctgtttttgttgatgccgattattcacagatagagcttcgcgtgcttgcccatataacaggcgatgaagccctgataaatgctttcgttaagggggaagatattcatacggccacggcgtcgctggtatttgacgtagctcccgaagatgtgacgccggaactgcgcagaaaggcaaaagccgtaaatttcggcatagtgtacgggatcagtgattacgggctggcacgggatttgggaattacccggaaggaagcaaagcggtatatagacgactattttgccaaataccccaaagtaaaaacctatgtggatgaaattgtgcgggtcggccaggaacaggggtatgtggaaactctgttccacagaagaagataccttcccgagcttgcatcttgtaattttcaccagcgttctttcggaaaaagggttgcaatgaatacgcccatacagggcactgcagccgatattattaaaattgcgatggtgaaggtatacaaggctttgaaagaatccggccttaaatccaggcttatcctccaggtccatgacgaacttgttattgagacttttgaagacgaactggagactgtcaaggaacttgtcaaaaagtgcatggaagaggccgttgaattgagtgtgccgcttgttgtcgacgtttcaatcgggaaaaactggtatgaagcctcctgatatggatcc

SEQ ID NO: 278 - DNA, 2772 bp, Artificial Sequence
  Description of Artificial Sequence: Synthetic Clostridium stercorarium DNA Polymerase K823E
atgaaatacctgctgccgaccgctgctgctggtctgctgctcctcgctgcccagccggcgatggccatggatccaaaaataatccttatagacggaaacagtattttaaaccgcggtttttatgccctgtcggggcgatccatgctgactacgtccacaggtctgtataccaatgcggttttcgcttttgtaaatatattgaacaaatatatcgaagaggaaaaccctgattatattgccgttgctttcgatcttagggcaaaaactttccggcacggtctatatgagggatacaaagcgcagcggaaaggcatgcccgatgaacttgcaatgcagatacccctcgcgaaggaagtactgagggcgatgaatattgccataatagagcatgaaggttatgaagccgacgatataatcggcagcctttcgttaaaggccgaaaaagagaattttgacgtaataatccttacgggggacagggattctttccagctgatcagcgacagggtgaaagttatcctgccttcgacgaaagccggaaaaacagagaccaacgtatatgataaacaggccatcattgacaaatacggagttttaccccatcagcttattgacgttaaaggcttaatgggagattcgtcagataatatacccggcgttccgggagtgggtgagaaaacggcgttaagccttatttcagcctacggtacactggaaggtgtttacgagcatattgatgaaataaaacagcctaagctgaaagcatcgctgattgaatataaggatcaggcgtttttaagccgtaagctgggtactattgtaagaaatctggagctgtgtgcttcgctggaggatctgaaaagaaaagaaataaaccgcaaagagcttttgaatgttttcagaaaactcgaatttgaaagtatcatatcaaaaatgaatcttgcttccgctgaggtgacagaattacctcccgcgccggaagagcttaaaataacccatatttcagcggcagaggatcttaagaaatggattgcttacctgcttaaccagaaaaacatttccgtccttcaactgattgaccgggaggattcatacagttcccgtctttcagggctggctttgtgcaccggggatgaggttttttatatcgagaccgggactgcactccccgagaatttgattgcaacagagctgaaagaactgtggcagaatgaaaatattcacaaaatcggacacaatataaaagaatttataacctggctgctgaaacacgatgttgaactgaacggcctttatttcgacactatgattgccgaatacctgatagattccataagaaacggctatcctatagcaagcctttctcacaaatacctgaatcgcagcgttccgtcgctggacgaacttttgggcaagggaaagggagcaaaaaagtactctgaaattccgcccgaaaggctgaaagattacagcgcttataacgtcaaagccatttttgacatatggccgatgcagaaaaaagttcttcaggaaaaccggcaggaggagctttttaatgacatagagcttcctcttataaccgtacttgccagtatggaataccacggtttcaaagttgacgccgcaaaacttcacgaatacggcgaagttcttctgtcacgcataaaagacctggaaaaggtaatttacatgctggccggtgaagaattcaacatcaattcaacgaagcagcttggtaccatattattcgaaaaactgaagcttcccgttgtaaaaagtacaaagaccggatactccaccgacgtcgaggttcttgaagagctttattacaagcatgatataataccatgcataatagaataccgccagcttacaaaactttacaccacctacgccgaaggtcttgaaaaagtgataaatcctgtaaccggtaaaattcattcaagttttaaccagacggttacggctacaggccgcatcagcagtaccgaaccaaatttacagaatatcccagtcagacacgaaatgggaagggaaatacggaaagcttttattccgtcgtcggaaaacgctgtttttgttgatgccgattattcacagatagagcttcgcgtgcttgcccatataacaggcgatgaagccctgataaatgctttcgttaagggggaagatattcatacggccacggcgtcgctggtatttgacgtagctcccgaagatgtgacgccggaactgcgcagaaaggcaaaagccgtaaatttcggcatagtgtacgggatcagtgattacgggctggcacgggatttgggaattacccggaaggaagcaaagcggtatatagacgactattttgccaaataccccaaagtaaaaacctatgtggatgaaattgtgcgggtcggccaggaacaggggtatgtggaaactctgttccacagaagaagataccttcccgagcttgcatctgaaaattttcaccagcgttctttcggaaaaagggttgcaatgaatacgcccatacagggcactgcagccgatattattaaaattgcgatggtgaaggtatacaaggctttgaaagaatccggccttaaatccaggcttatcctccaggtccatgacgaacttgttattgagacttttgaagacgaactggagactgtcaaggaacttgtcaaaaagtgcatggaagaggccgttgaattgagtgtgccgcttgttgtcgacgtttcaatcgggaaaaactggtatgaagcctcctgatatggatcc

SEQ ID NO: 279 - DNA, 2772 bp, Artificial Sequence
  Description of Artificial Sequence: Synthetic Clostridium stercorarium DNA Polymerase K823Q
atgaaatacctgctgccgaccgctgctgctggtctgctgctcctcgctgcccagccggcgatggccatggatccaaaaataatccttatagacggaaacagtattttaaaccgcggtttttatgccctgtcggggcgatccatgctgactacgtccacaggtctgtataccaatgcggttttcgcttttgtaaatatattgaacaaatatatcgaagaggaaaaccctgattatattgccgttgctttcgatcttagggcaaaaactttccggcacggtctatatgagggatacaaagcgcagcggaaaggcatgcccgatgaacttgcaatgcagatacccctcgcgaaggaagtactgagggcgatgaatattgccataatagagcatgaaggttatgaagccgacgatataatcggcagcctttcgttaaaggccgaaaaagagaattttgacgtaataatccttacgggggacagggattctttccagctgatcagcgacagggtgaaagttatcctgccttcgacgaaagccggaaaaacagagaccaacgtatatgataaacaggccatcattgacaaatacggagttttaccccatcagcttattgacgttaaaggcttaatgggagattcgtcagataatatacccggcgttccgggagtgggtgagaaaacggcgttaagccttatttcagcctacggtacactggaaggtgtttacgagcatattgatgaaataaaacagcctaagctgaaagcatcgctgattgaatataaggatcaggcgtttttaagccgtaagctgggtactattgtaagaaatctggagctgtgtgcttcgctggaggatctgaaaagaaaagaaataaaccgcaaagagcttttgaatgttttcagaaaactcgaatttgaaagtatcatatcaaaaatgaatcttgcttccgctgaggtgacagaattacctcccgcgccggaagagcttaaaataacccatatttcagcggcagaggatcttaagaaatggattgcttacctgcttaaccagaaaaacatttccgtccttcaactgattgaccgggaggattcatacagttcccgtctttcagggctggctttgtgcaccggggatgaggttttttatatcgagaccgggactgcactccccgagaatttgattgcaacagagctgaaagaactgtggcagaatgaaaatattcacaaaatcggacacaatataaaagaatttataacctggctgctgaaacacgatgttgaactgaacggcctttatttcgacactatgattgccgaatacctgatagattccataagaaacggctatcctatagcaagcctttctcacaaatacctgaatcgcagcgttccgtcgctggacgaacttttgggcaagggaaagggagcaaaaaagtactctgaaattccgcccgaaaggctgaaagattacagcgcttataacgtcaaagccatttttgacatatggccgatgcagaaaaaagttcttcaggaaaaccggcaggaggagctttttaatgacatagagcttcctcttataaccgtacttgccagtatggaataccacggtttcaaagttgacgccgcaaaacttcacgaatacggcgaagttcttctgtcacgcataaaagacctggaaaaggtaatttacatgctggccggtgaagaattcaacatcaattcaacgaagcagcttggtaccatattattcgaaaaactgaagcttcccgttgtaaaaagtacaaagaccggatactccaccgacgtcgaggttcttgaagagctttattacaagcatgatataataccatgcataatagaataccgccagcttacaaaactttacaccacctacgccgaaggtcttgaaaaagtgataaatcctgtaaccggtaaaattcattcaagttttaaccagacggttacggctacaggccgcatcagcagtaccgaaccaaatttacagaatatcccagtcagacacgaaatgggaagggaaatacggaaagcttttattccgtcgtcggaaaacgctgtttttgttgatgccgattattcacagatagagcttcgcgtgcttgcccatataacaggcgatgaagccctgataaatgctttcgttaagggggaagatattcatacggccacggcgtcgctggtatttgacgtagctcccgaagatgtgacgccggaactgcgcagaaaggcaaaagccgtaaatttcggcatagtgtacgggatcagtgattacgggctggcacgggatttgggaattacccggaaggaagcaaagcggtatatagacgactattttgccaaataccccaaagtaaaaacctatgtggatgaaattgtgcgggtcggccaggaacaggggtatgtggaaactctgttccacagaagaagataccttcccgagcttgcatctcaaaattttcaccagcgttctttcggaaaaagggttgcaatgaatacgcccatacagggcactgcagccgatattattaaaattgcgatggtgaaggtatacaaggctttgaaagaatccggccttaaatccaggcttatcctccaggtccatgacgaacttgttattgagacttttgaagacgaactggagactgtcaaggaacttgtcaaaaagtgcatggaagaggccgttgaattgagtgtgccgcttgttgtcgacgtttcaatcgggaaaaactggtatgaagcctcctgatatggatcc

SEQ ID NO: 280 - DNA, 2772 bp, Artificial Sequence
  Description of Artificial Sequence: Synthetic Clostridium stercorarium DNA Polymerase K823G
atgaaatacctgctgccgaccgctgctgctggtctgctgctcctcgctgcccagccggcgatggccatggatccaaaaataatccttatagacggaaacagtattttaaaccgcggtttttatgccctgtcggggcgatccatgctgactacgtccacaggtctgtataccaatgcggttttcgcttttgtaaatatattgaacaaatatatcgaagaggaaaaccctgattatattgccgttgctttcgatcttagggcaaaaactttccggcacggtctatatgagggatacaaagcgcagcggaaaggcatgcccgatgaacttgcaatgcagatacccctcgcgaaggaagtactgagggcgatgaatattgccataatagagcatgaaggttatgaagccgacgatataatcggcagcctttcgttaaaggccgaaaaagagaattttgacgtaataatccttacgggggacagggattctttccagctgatcagcgacagggtgaaagttatcctgccttcgacgaaagccggaaaaacagagaccaacgtatatgataaacaggccatcattgacaaatacggagttttaccccatcagcttattgacgttaaaggcttaatgggagattcgtcagataatatacccggcgttccgggagtgggtgagaaaacggcgttaagccttatttcagcctacggtacactggaaggtgtttacgagcatattgatgaaataaaacagcctaagctgaaagcatcgctgattgaatataaggatcaggcgtttttaagccgtaagctgggtactattgtaagaaatctggagctgtgtgcttcgctggaggatctgaaaagaaaagaaataaaccgcaaagagcttttgaatgttttcagaaaactcgaatttgaaagtatcatatcaaaaatgaatcttgcttccgctgaggtgacagaattacctcccgcgccggaagagcttaaaataacccatatttcagcggcagaggatcttaagaaatggattgcttacctgcttaaccagaaaaacatttccgtccttcaactgattgaccgggaggattcatacagttcccgtctttcagggctggctttgtgcaccggggatgaggttttttatatcgagaccgggactgcactccccgagaatttgattgcaacagagctgaaagaactgtggcagaatgaaaatattcacaaaatcggacacaatataaaagaatttataacctggctgctgaaacacgatgttgaactgaacggcctttatttcgacactatgattgccgaatacctgatagattccataagaaacggctatcctatagcaagcctttctcacaaatacctgaatcgcagcgttccgtcgctggacgaacttttgggcaagggaaagggagcaaaaaagtactctgaaattccgcccgaaaggctgaaagattacagcgcttataacgtcaaagccatttttgacatatggccgatgcagaaaaaagttcttcaggaaaaccggcaggaggagctttttaatgacatagagcttcctcttataaccgtacttgccagtatggaataccacggtttcaaagttgacgccgcaaaacttcacgaatacggcgaagttcttctgtcacgcataaaagacctggaaaaggtaatttacatgctggccggtgaagaattcaacatcaattcaacgaagcagcttggtaccatattattcgaaaaactgaagcttcccgttgtaaaaagtacaaagaccggatactccaccgacgtcgaggttcttgaagagctttattacaagcatgatataataccatgcataatagaataccgccagcttacaaaactttacaccacctacgccgaaggtcttgaaaaagtgataaatcctgtaaccggtaaaattcattcaagttttaaccagacggttacggctacaggccgcatcagcagtaccgaaccaaatttacagaatatcccagtcagacacgaaatgggaagggaaatacggaaagcttttattccgtcgtcggaaaacgctgtttttgttgatgccgattattcacagatagagcttcgcgtgcttgcccatataacaggcgatgaagccctgataaatgctttcgttaagggggaagatattcatacggccacggcgtcgctggtatttgacgtagctcccgaagatgtgacgccggaactgcgcagaaaggcaaaagccgtaaatttcggcatagtgtacgggatcagtgattacgggctggcacgggatttgggaattacccggaaggaagcaaagcggtatatagacgactattttgccaaataccccaaagtaaaaacctatgtggatgaaattgtgcgggtcggccaggaacaggggtatgtggaaactctgttccacagaagaagataccttcccgagcttgcatctggtaattttcaccagcgttctttcggaaaaagggttgcaatgaatacgcccatacagggcactgcagccgatattattaaaattgcgatggtgaaggtatacaaggctttgaaagaatccggccttaaatccaggcttatcctccaggtccatgacgaacttgttattgagacttttgaagacgaactggagactgtcaaggaacttgtcaaaaagtgcatggaagaggccgttgaattgagtgtgccgcttgttgtcgacgtttcaatcgggaaaaactggtatgaagcctcctgatatggatcc

SEQ ID NO: 281 - DNA, 2772 bp, Artificial Sequence
  Description of Artificial Sequence: Synthetic Clostridium stercorarium DNA Polymerase K823H
atgaaatacctgctgccgaccgctgctgctggtctgctgctcctcgctgcccagccggcgatggccatggatccaaaaataatccttatagacggaaacagtattttaaaccgcggtttttatgccctgtcggggcgatccatgctgactacgtccacaggtctgtataccaatgcggttttcgcttttgtaaatatattgaacaaatatatcgaagaggaaaaccctgattatattgccgttgctttcgatcttagggcaaaaactttccggcacggtctatatgagggatacaaagcgcagcggaaaggcatgcccgatgaacttgcaatgcagatacccctcgcgaaggaagtactgagggcgatgaatattgccataatagagcatgaaggttatgaagccgacgatataatcggcagcctttcgttaaaggccgaaaaagagaattttgacgtaataatccttacgggggacagggattctttccagctgatcagcgacagggtgaaagttatcctgccttcgacgaaagccggaaaaacagagaccaacgtatatgataaacaggccatcattgacaaatacggagttttaccccatcagcttattgacgttaaaggcttaatgggagattcgtcagataatatacccggcgttccgggagtgggtgagaaaacggcgttaagccttatttcagcctacggtacactggaaggtgtttacgagcatattgatgaaataaaacagcctaagctgaaagcatcgctgattgaatataaggatcaggcgtttttaagccgtaagctgggtactattgtaagaaatctggagctgtgtgcttcgctggaggatctgaaaagaaaagaaataaaccgcaaagagcttttgaatgttttcagaaaactcgaatttgaaagtatcatatcaaaaatgaatcttgcttccgctgaggtgacagaattacctcccgcgccggaagagcttaaaataacccatatttcagcggcagaggatcttaagaaatggattgcttacctgcttaaccagaaaaacatttccgtccttcaactgattgaccgggaggattcatacagttcccgtctttcagggctggctttgtgcaccggggatgaggttttttatatcgagaccgggactgcactccccgagaatttgattgcaacagagctgaaagaactgtggcagaatgaaaatattcacaaaatcggacacaatataaaagaatttataacctggctgctgaaacacgatgttgaactgaacggcctttatttcgacactatgattgccgaatacctgatagattccataagaaacggctatcctatagcaagcctttctcacaaatacctgaatcgcagcgttccgtcgctggacgaacttttgggcaagggaaagggagcaaaaaagtactctgaaattccgcccgaaaggctgaaagattacagcgcttataacgtcaaagccatttttgacatatggccgatgcagaaaaaagttcttcaggaaaaccggcaggaggagctttttaatgacatagagcttcctcttataaccgtacttgccagtatggaataccacggtttcaaagttgacgccgcaaaacttcacgaatacggcgaagttcttctgtcacgcataaaagacctggaaaaggtaatttacatgctggccggtgaagaattcaacatcaattcaacgaagcagcttggtaccatattattcgaaaaactgaagcttcccgttgtaaaaagtacaaagaccggatactccaccgacgtcgaggttcttgaagagctttattacaagcatgatataataccatgcataatagaataccgccagcttacaaaactttacaccacctacgccgaaggtcttgaaaaagtgataaatcctgtaaccggtaaaattcattcaagttttaaccagacggttacggctacaggccgcatcagcagtaccgaaccaaatttacagaatatcccagtcagacacgaaatgggaagggaaatacggaaagcttttattccgtcgtcggaaaacgctgtttttgttgatgccgattattcacagatagagcttcgcgtgcttgcccatataacaggcgatgaagccctgataaatgctttcgttaagggggaagatattcatacggccacggcgtcgctggtatttgacgtagctcccgaagatgtgacgccggaactgcgcagaaaggcaaaagccgtaaatttcggcatagtgtacgggatcagtgattacgggctggcacgggatttgggaattacccggaaggaagcaaagcggtatatagacgactattttgccaaataccccaaagtaaaaacctatgtggatgaaattgtgcgggtcggccaggaacaggggtatgtggaaactctgttccacagaagaagataccttcccgagcttgcatctcataattttcaccagcgttctttcggaaaaagggttgcaatgaatacgcccatacagggcactgcagccgatattattaaaattgcgatggtgaaggtatacaaggctttgaaagaatccggccttaaatccaggcttatcctccaggtccatgacgaacttgttattgagacttttgaagacgaactggagactgtcaaggaacttgtcaaaaagtgcatggaagaggccgttgaattgagtgtgccgcttgttgtcgacgtttcaatcgggaaaaactggtatgaagcctcctgatatggatcc

SEQ ID NO: 282 - DNA, 2772 bp, Artificial Sequence
  Description of Artificial Sequence: Synthetic Clostridium stercorarium DNA Polymerase K823I
atgaaatacctgctgccgaccgctgctgctggtctgctgctcctcgctgcccagccggcgatggccatggatccaaaaataatccttatagacggaaacagtattttaaaccgcggtttttatgccctgtcggggcgatccatgctgactacgtccacaggtctgtataccaatgcggttttcgcttttgtaaatatattgaacaaatatatcgaagaggaaaaccctgattatattgccgttgctttcgatcttagggcaaaaactttccggcacggtctatatgagggatacaaagcgcagcggaaaggcatgcccgatgaacttgcaatgcagatacccctcgcgaaggaagtactgagggcgatgaatattgccataatagagcatgaaggttatgaagccgacgatataatcggcagcctttcgttaaaggccgaaaaagagaattttgacgtaataatccttacgggggacagggattctttccagctgatcagcgacagggtgaaagttatcctgccttcgacgaaagccggaaaaacagagaccaacgtatatgataaacaggccatcattgacaaatacggagttttaccccatcagcttattgacgttaaaggcttaatgggagattcgtcagataatatacccggcgttccgggagtgggtgagaaaacggcgttaagccttatttcagcctacggtacactggaaggtgtttacgagcatattgatgaaataaaacagcctaagctgaaagcatcgctgattgaatataaggatcaggcgtttttaagccgtaagctgggtactattgtaagaaatctggagctgtgtgcttcgctggaggatctgaaaagaaaagaaataaaccgcaaagagcttttgaatgttttcagaaaactcgaatttgaaagtatcatatcaaaaatgaatcttgcttccgctgaggtgacagaattacctcccgcgccggaagagcttaaaataacccatatttcagcggcagaggatcttaagaaatggattgcttacctgcttaaccagaaaaacatttccgtccttcaactgattgaccgggaggattcatacagttcccgtctttcagggctggctttgtgcaccggggatgaggttttttatatcgagaccgggactgcactccccgagaatttgattgcaacagagctgaaagaactgtggcagaatgaaaatattcacaaaatcggacacaatataaaagaatttataacctggctgctgaaacacgatgttgaactgaacggcctttatttcgacactatgattgccgaatacctgatagattccataagaaacggctatcctatagcaagcctttctcacaaatacctgaatcgcagcgttccgtcgctggacgaacttttgggcaagggaaagggagcaaaaaagtactctgaaattccgcccgaaaggctgaaagattacagcgcttataacgtcaaagccatttttgacatatggccgatgcagaaaaaagttcttcaggaaaaccggcaggaggagctttttaatgacatagagcttcctcttataaccgtacttgccagtatggaataccacggtttcaaagttgacgccgcaaaacttcacgaatacggcgaagttcttctgtcacgcataaaagacctggaaaaggtaatttacatgctggccggtgaagaattcaacatcaattcaacgaagcagcttggtaccatattattcgaaaaactgaagcttcccgttgtaaaaagtacaaagaccggatactccaccgacgtcgaggttcttgaagagctttattacaagcatgatataataccatgcataatagaataccgccagcttacaaaactttacaccacctacgccgaaggtcttgaaaaagtgataaatcctgtaaccggtaaaattcattcaagttttaaccagacggttacggctacaggccgcatcagcagtaccgaaccaaatttacagaatatcccagtcagacacgaaatgggaagggaaatacggaaagcttttattccgtcgtcggaaaacgctgtttttgttgatgccgattattcacagatagagcttcgcgtgcttgcccatataacaggcgatgaagccctgataaatgctttcgttaagggggaagatattcatacggccacggcgtcgctggtatttgacgtagctcccgaagatgtgacgccggaactgcgcagaaaggcaaaagccgtaaatttcggcatagtgtacgggatcagtgattacgggctggcacgggatttgggaattacccggaaggaagcaaagcggtatatagacgactattttgccaaataccccaaagtaaaaacctatgtggatgaaattgtgcgggtcggccaggaacaggggtatgtggaaactctgttccacagaagaagataccttcccgagcttgcatctattaattttcaccagcgttctttcggaaaaagggttgcaatgaatacgcccatacagggcactgcagccgatattattaaaattgcgatggtgaaggtatacaaggctttgaaagaatccggccttaaatccaggcttatcctccaggtccatgacgaacttgttattgagacttttgaagacgaactggagactgtcaaggaacttgtcaaaaagtgcatggaagaggccgttgaattgagtgtgccgcttgttgtcgacgtttcaatcgggaaaaactggtatgaagcctcctgatatggatcc

SEQ ID NO: 283 - DNA, 2772 bp, Artificial Sequence
  Description of Artificial Sequence: Synthetic Clostridium stercorarium DNA Polymerase K823L
atgaaatacctgctgccgaccgctgctgctggtctgctgctcctcgctgcccagccggcgatggccatggatccaaaaataatccttatagacggaaacagtattttaaaccgcggtttttatgccctgtcggggcgatccatgctgactacgtccacaggtctgtataccaatgcggttttcgcttttgtaaatatattgaacaaatatatcgaagaggaaaaccctgattatattgccgttgctttcgatcttagggcaaaaactttccggcacggtctatatgagggatacaaagcgcagcggaaaggcatgcccgatgaacttgcaatgcagatacccctcgcgaaggaagtactgagggcgatgaatattgccataatagagcatgaaggttatgaagccgacgatataatcggcagcctttcgttaaaggccgaaaaagagaattttgacgtaataatccttacgggggacagggattctttccagctgatcagcgacagggtgaaagttatcctgccttcgacgaaagccggaaaaacagagaccaacgtatatgataaacaggccatcattgacaaatacggagttttaccccatcagcttattgacgttaaaggcttaatgggagattcgtcagataatatacccggcgttccgggagtgggtgagaaaacggcgttaagccttatttcagcctacggtacactggaaggtgtttacgagcatattgatgaaataaaacagcctaagctgaaagcatcgctgattgaatataaggatcaggcgtttttaagccgtaagctgggtactattgtaagaaatctggagctgtgtgcttcgctggaggatctgaaaagaaaagaaataaaccgcaaagagcttttgaatgttttcagaaaactcgaatttgaaagtatcatatcaaaaatgaatcttgcttccgctgaggtgacagaattacctcccgcgccggaagagcttaaaataacccatatttcagcggcagaggatcttaagaaatggattgcttacctgcttaaccagaaaaacatttccgtccttcaactgattgaccgggaggattcatacagttcccgtctttcagggctggctttgtgcaccggggatgaggttttttatatcgagaccgggactgcactccccgagaatttgattgcaacagagctgaaagaactgtggcagaatgaaaatattcacaaaatcggacacaatataaaagaatttataacctggctgctgaaacacgatgttgaactgaacggcctttatttcgacactatgattgccgaatacctgatagattccataagaaacggctatcctatagcaagcctttctcacaaatacctgaatcgcagcgttccgtcgctggacgaacttttgggcaagggaaagggagcaaaaaagtactctgaaattccgcccgaaaggctgaaagattacagcgcttataacgtcaaagccatttttgacatatggccgatgcagaaaaaagttcttcaggaaaaccggcaggaggagctttttaatgacatagagcttcctcttataaccgtacttgccagtatggaataccacggtttcaaagttgacgccgcaaaacttcacgaatacggcgaagttcttctgtcacgcataaaagacctggaaaaggtaatttacatgctggccggtgaagaattcaacatcaattcaacgaagcagcttggtaccatattattcgaaaaactgaagcttcccgttgtaaaaagtacaaagaccggatactccaccgacgtcgaggttcttgaagagctttattacaagcatgatataataccatgcataatagaataccgccagcttacaaaactttacaccacctacgccgaaggtcttgaaaaagtgataaatcctgtaaccggtaaaattcattcaagttttaaccagacggttacggctacaggccgcatcagcagtaccgaaccaaatttacagaatatcccagtcagacacgaaatgggaagggaaatacggaaagcttttattccgtcgtcggaaaacgctgtttttgttgatgccgattattcacagatagagcttcgcgtgcttgcccatataacaggcgatgaagccctgataaatgctttcgttaagggggaagatattcatacggccacggcgtcgctggtatttgacgtagctcccgaagatgtgacgccggaactgcgcagaaaggcaaaagccgtaaatttcggcatagtgtacgggatcagtgattacgggctggcacgggatttgggaattacccggaaggaagcaaagcggtatatagacgactattttgccaaataccccaaagtaaaaacctatgtggatgaaattgtgcgggtcggccaggaacaggggtatgtggaaactctgttccacagaagaagataccttcccgagcttgcatctcttaattttcaccagcgttctttcggaaaaagggttgcaatgaatacgcccatacagggcactgcagccgatattattaaaattgcgatggtgaaggtatacaaggctttgaaagaatccggccttaaatccaggcttatcctccaggtccatgacgaacttgttattgagacttttgaagacgaactggagactgtcaaggaacttgtcaaaaagtgcatggaagaggccgttgaattgagtgtgccgcttgttgtcgacgtttcaatcgggaaaaactggtatgaagcctcctgatatggatcc

SEQ ID NO: 284 - DNA, 2772 bp, Artificial Sequence
  Description of Artificial Sequence: Synthetic Clostridium stercorarium DNA Polymerase K823M
atgaaatacctgctgccgaccgctgctgctggtctgctgctcctcgctgcccagccggcgatggccatggatccaaaaataatccttatagacggaaacagtattttaaaccgcggtttttatgccctgtcggggcgatccatgctgactacgtccacaggtctgtataccaatgcggttttcgcttttgtaaatatattgaacaaatatatcgaagaggaaaaccctgattatattgccgttgctttcgatcttagggcaaaaactttccggcacggtctatatgagggatacaaagcgcagcggaaaggcatgcccgatgaacttgcaatgcagatacccctcgcgaaggaagtactgagggcgatgaatattgccataatagagcatgaaggttatgaagccgacgatataatcggcagcctttcgttaaaggccgaaaaagagaattttgacgtaataatccttacgggggacagggattctttccagctgatcagcgacagggtgaaagttatcctgccttcgacgaaagccggaaaaacagagaccaacgtatatgataaacaggccatcattgacaaatacggagttttaccccatcagcttattgacgttaaaggcttaatgggagattcgtcagataatatacccggcgttccgggagtgggtgagaaaacggcgttaagccttatttcagcctacggtacactggaaggtgtttacgagcatattgatgaaataaaacagcctaagctgaaagcatcgctgattgaatataaggatcaggcgtttttaagccgtaagctgggtactattgtaagaaatctggagctgtgtgcttcgctggaggatctgaaaagaaaagaaataaaccgcaaagagcttttgaatgttttcagaaaactcgaatttgaaagtatcatatcaaaaatgaatcttgcttccgctgaggtgacagaattacctcccgcgccggaagagcttaaaataacccatatttcagcggcagaggatcttaagaaatggattgcttacctgcttaaccagaaaaacatttccgtccttcaactgattgaccgggaggattcatacagttcccgtctttcagggctggctttgtgcaccggggatgaggttttttatatcgagaccgggactgcactccccgagaatttgattgcaacagagctgaaagaactgtggcagaatgaaaatattcacaaaatcggacacaatataaaagaatttataacctggctgctgaaacacgatgttgaactgaacggcctttatttcgacactatgattgccgaatacctgatagattccataagaaacggctatcctatagcaagcctttctcacaaatacctgaatcgcagcgttccgtcgctggacgaacttttgggcaagggaaagggagcaaaaaagtactctgaaattccgcccgaaaggctgaaagattacagcgcttataacgtcaaagccatttttgacatatggccgatgcagaaaaaagttcttcaggaaaaccggcaggaggagctttttaatgacatagagcttcctcttataaccgtacttgccagtatggaataccacggtttcaaagttgacgccgcaaaacttcacgaatacggcgaagttcttctgtcacgcataaaagacctggaaaaggtaatttacatgctggccggtgaagaattcaacatcaattcaacgaagcagcttggtaccatattattcgaaaaactgaagcttcccgttgtaaaaagtacaaagaccggatactccaccgacgtcgaggttcttgaagagctttattacaagcatgatataataccatgcataatagaataccgccagcttacaaaactttacaccacctacgccgaaggtcttgaaaaagtgataaatcctgtaaccggtaaaattcattcaagttttaaccagacggttacggctacaggccgcatcagcagtaccgaaccaaatttacagaatatcccagtcagacacgaaatgggaagggaaatacggaaagcttttattccgtcgtcggaaaacgctgtttttgttgatgccgattattcacagatagagcttcgcgtgcttgcccatataacaggcgatgaagccctgataaatgctttcgttaagggggaagatattcatacggccacggcgtcgctggtatttgacgtagctcccgaagatgtgacgccggaactgcgcagaaaggcaaaagccgtaaatttcggcatagtgtacgggatcagtgattacgggctggcacgggatttgggaattacccggaaggaagcaaagcggtatatagacgactattttgccaaataccccaaagtaaaaacctatgtggatgaaattgtgcgggtcggccaggaacaggggtatgtggaaactctgttccacagaagaagataccttcccgagcttgcatctatgaattttcaccagcgttctttcggaaaaagggttgcaatgaatacgcccatacagggcactgcagccgatattattaaaattgcgatggtgaaggtatacaaggctttgaaagaatccggccttaaatccaggcttatcctccaggtccatgacgaacttgttattgagacttttgaagacgaactggagactgtcaaggaacttgtcaaaaagtgcatggaagaggccgttgaattgagtgtgccgcttgttgtcgacgtttcaatcgggaaaaactggtatgaagcctcctgatatggatcc

SEQ ID NO: 285 - DNA, 2772 bp, Artificial Sequence
  Description of Artificial Sequence: Synthetic Clostridium stercorarium DNA Polymerase K823F
atgaaatacctgctgccgaccgctgctgctggtctgctgctcctcgctgcccagccggcgatggccatggatccaaaaataatccttatagacggaaacagtattttaaaccgcggtttttatgccctgtcggggcgatccatgctgactacgtccacaggtctgtataccaatgcggttttcgcttttgtaaatatattgaacaaatatatcgaagaggaaaaccctgattatattgccgttgctttcgatcttagggcaaaaactttccggcacggtctatatgagggatacaaagcgcagcggaaaggcatgcccgatgaacttgcaatgcagatacccctcgcgaaggaagtactgagggcgatgaatattgccataatagagcatgaaggttatgaagccgacgatataatcggcagcctttcgttaaaggccgaaaaagagaattttgacgtaataatccttacgggggacagggattctttccagctgatcagcgacagggtgaaagttatcctgccttcgacgaaagccggaaaaacagagaccaacgtatatgataaacaggccatcattgacaaatacggagttttaccccatcagcttattgacgttaaaggcttaatgggagattcgtcagataatatacccggcgttccgggagtgggtgagaaaacggcgttaagccttatttcagcctacggtacactggaaggtgtttacgagcatattgatgaaataaaacagcctaagctgaaagcatcgctgattgaatataaggatcaggcgtttttaagccgtaagctgggtactattgtaagaaatctggagctgtgtgcttcgctggaggatctgaaaagaaaagaaataaaccgcaaagagcttttgaatgttttcagaaaactcgaatttgaaagtatcatatcaaaaatgaatcttgcttccgctgaggtgacagaattacctcccgcgccggaagagcttaaaataacccatatttcagcggcagaggatcttaagaaatggattgcttacctgcttaaccagaaaaacatttccgtccttcaactgattgaccgggaggattcatacagttcccgtctttcagggctggctttgtgcaccggggatgaggttttttatatcgagaccgggactgcactccccgagaatttgattgcaacagagctgaaagaactgtggcagaatgaaaatattcacaaaatcggacacaatataaaagaatttataacctggctgctgaaacacgatgttgaactgaacggcctttatttcgacactatgattgccgaatacctgatagattccataagaaacggctatcctatagcaagcctttctcacaaatacctgaatcgcagcgttccgtcgctggacgaacttttgggcaagggaaagggagcaaaaaagtactctgaaattccgcccgaaaggctgaaagattacagcgcttataacgtcaaagccatttttgacatatggccgatgcagaaaaaagttcttcaggaaaaccggcaggaggagctttttaatgacatagagcttcctcttataaccgtacttgccagtatggaataccacggtttcaaagttgacgccgcaaaacttcacgaatacggcgaagttcttctgtcacgcataaaagacctggaaaaggtaatttacatgctggccggtgaagaattcaacatcaattcaacgaagcagcttggtaccatattattcgaaaaactgaagcttcccgttgtaaaaagtacaaagaccggatactccaccgacgtcgaggttcttgaagagctttattacaagcatgatataataccatgcataatagaataccgccagcttacaaaactttacaccacctacgccgaaggtcttgaaaaagtgataaatcctgtaaccggtaaaattcattcaagttttaaccagacggttacggctacaggccgcatcagcagtaccgaaccaaatttacagaatatcccagtcagacacgaaatgggaagggaaatacggaaagcttttattccgtcgtcggaaaacgctgtttttgttgatgccgattattcacagatagagcttcgcgtgcttgcccatataacaggcgatgaagccctgataaatgctttcgttaagggggaagatattcatacggccacggcgtcgctggtatttgacgtagctcccgaagatgtgacgccggaactgcgcagaaaggcaaaagccgtaaatttcggcatagtgtacgggatcagtgattacgggctggcacgggatttgggaattacccggaaggaagcaaagcggtatatagacgactattttgccaaataccccaaagtaaaaacctatgtggatgaaattgtgcgggtcggccaggaacaggggtatgtggaaactctgttccacagaagaagataccttcccgagcttgcatcttttaattttcaccagcgttctttcggaaaaagggttgcaatgaatacgcccatacagggcactgcagccgatattattaaaattgcgatggtgaaggtatacaaggctttgaaagaatccggccttaaatccaggcttatcctccaggtccatgacgaacttgttattgagacttttgaagacgaactggagactgtcaaggaacttgtcaaaaagtgcatggaagaggccgttgaattgagtgtgccgcttgttgtcgacgtttcaatcgggaaaaactggtatgaagcctcctgatatggatcc

SEQ ID NO: 286 - DNA, 2772 bp, Artificial Sequence
  Description of Artificial Sequence: Synthetic Clostridium stercorarium DNA Polymerase K823P
atgaaatacctgctgccgaccgctgctgctggtctgctgctcctcgctgcccagccggcgatggccatggatccaaaaataatccttatagacggaaacagtattttaaaccgcggtttttatgccctgtcggggcgatccatgctgactacgtccacaggtctgtataccaatgcggttttcgcttttgtaaatatattgaacaaatatatcgaagaggaaaaccctgattatattgccgttgctttcgatcttagggcaaaaactttccggcacggtctatatgagggatacaaagcgcagcggaaaggcatgcccgatgaacttgcaatgcagatacccctcgcgaaggaagtactgagggcgatgaatattgccataatagagcatgaaggttatgaagccgacgatataatcggcagcctttcgttaaaggccgaaaaagagaattttgacgtaataatccttacgggggacagggattctttccagctgatcagcgacagggtgaaagttatcctgccttcgacgaaagccggaaaaacagagaccaacgtatatgataaacaggccatcattgacaaatacggagttttaccccatcagcttattgacgttaaaggcttaatgggagattcgtcagataatatacccggcgttccgggagtgggtgagaaaacggcgttaagccttatttcagcctacggtacactggaaggtgtttacgagcatattgatgaaataaaacagcctaagctgaaagcatcgctgattgaatataaggatcaggcgtttttaagccgtaagctgggtactattgtaagaaatctggagctgtgtgcttcgctggaggatctgaaaagaaaagaaataaaccgcaaagagcttttgaatgttttcagaaaactcgaatttgaaagtatcatatcaaaaatgaatcttgcttccgctgaggtgacagaattacctcccgcgccggaagagcttaaaataacccatatttcagcggcagaggatcttaagaaatggattgcttacctgcttaaccagaaaaacatttccgtccttcaactgattgaccgggaggattcatacagttcccgtctttcagggctggctttgtgcaccggggatgaggttttttatatcgagaccgggactgcactccccgagaatttgattgcaacagagctgaaagaactgtggcagaatgaaaatattcacaaaatcggacacaatataaaagaatttataacctggctgctgaaacacgatgttgaactgaacggcctttatttcgacactatgattgccgaatacctgatagattccataagaaacggctatcctatagcaagcctttctcacaaatacctgaatcgcagcgttccgtcgctggacgaacttttgggcaagggaaagggagcaaaaaagtactctgaaattccgcccgaaaggctgaaagattacagcgcttataacgtcaaagccatttttgacatatggccgatgcagaaaaaagttcttcaggaaaaccggcaggaggagctttttaatgacatagagcttcctcttataaccgtacttgccagtatggaataccacggtttcaaagttgacgccgcaaaacttcacgaatacggcgaagttcttctgtcacgcataaaagacctggaaaaggtaatttacatgctggccggtgaagaattcaacatcaattcaacgaagcagcttggtaccatattattcgaaaaactgaagcttcccgttgtaaaaagtacaaagaccggatactccaccgacgtcgaggttcttgaagagctttattacaagcatgatataataccatgcataatagaataccgccagcttacaaaactttacaccacctacgccgaaggtcttgaaaaagtgataaatcctgtaaccggtaaaattcattcaagttttaaccagacggttacggctacaggccgcatcagcagtaccgaaccaaatttacagaatatcccagtcagacacgaaatgggaagggaaatacggaaagcttttattccgtcgtcggaaaacgctgtttttgttgatgccgattattcacagatagagcttcgcgtgcttgcccatataacaggcgatgaagccctgataaatgctttcgttaagggggaagatattcatacggccacggcgtcgctggtatttgacgtagctcccgaagatgtgacgccggaactgcgcagaaaggcaaaagccgtaaatttcggcatagtgtacgggatcagtgattacgggctggcacgggatttgggaattacccggaaggaagcaaagcggtatatagacgactattttgccaaataccccaaagtaaaaacctatgtggatgaaattgtgcgggtcggccaggaacaggggtatgtggaaactctgttccacagaagaagataccttcccgagcttgcatctcctaattttcaccagcgttctttcggaaaaagggttgcaatgaatacgcccatacagggcactgcagccgatattattaaaattgcgatggtgaaggtatacaaggctttgaaagaatccggccttaaatccaggcttatcctccaggtccatgacgaacttgttattgagacttttgaagacgaactggagactgtcaaggaacttgtcaaaaagtgcatggaagaggccgttgaattgagtgtgccgcttgttgtcgacgtttcaatcgggaaaaactggtatgaagcctcctgatatggatcc

SEQ ID NO: 287 - DNA, 2772 bp, Artificial Sequence
  Description of Artificial Sequence: Synthetic Clostridium stercorarium DNA Polymerase K823S
atgaaatacctgctgccgaccgctgctgctggtctgctgctcctcgctgcccagccggcgatggccatggatccaaaaataatccttatagacggaaacagtattttaaaccgcggtttttatgccctgtcggggcgatccatgctgactacgtccacaggtctgtataccaatgcggttttcgcttttgtaaatatattgaacaaatatatcgaagaggaaaaccctgattatattgccgttgctttcgatcttagggcaaaaactttccggcacggtctatatgagggatacaaagcgcagcggaaaggcatgcccgatgaacttgcaatgcagatacccctcgcgaaggaagtactgagggcgatgaatattgccataatagagcatgaaggttatgaagccgacgatataatcggcagcctttcgttaaaggccgaaaaagagaattttgacgtaataatccttacgggggacagggattctttccagctgatcagcgacagggtgaaagttatcctgccttcgacgaaagccggaaaaacagagaccaacgtatatgataaacaggccatcattgacaaatacggagttttaccccatcagcttattgacgttaaaggcttaatgggagattcgtcagataatatacccggcgttccgggagtgggtgagaaaacggcgttaagccttatttcagcctacggtacactggaaggtgtttacgagcatattgatgaaataaaacagcctaagctgaaagcatcgctgattgaatataaggatcaggcgtttttaagccgtaagctgggtactattgtaagaaatctggagctgtgtgcttcgctggaggatctgaaaagaaaagaaataaaccgcaaagagcttttgaatgttttcagaaaactcgaatttgaaagtatcatatcaaaaatgaatcttgcttccgctgaggtgacagaattacctcccgcgccggaagagcttaaaataacccatatttcagcggcagaggatcttaagaaatggattgcttacctgcttaaccagaaaaacatttccgtccttcaactgattgaccgggaggattcatacagttcccgtctttcagggctggctttgtgcaccggggatgaggttttttatatcgagaccgggactgcactccccgagaatttgattgcaacagagctgaaagaactgtggcagaatgaaaatattcacaaaatcggacacaatataaaagaatttataacctggctgctgaaacacgatgttgaactgaacggcctttatttcgacactatgattgccgaatacctgatagattccataagaaacggctatcctatagcaagcctttctcacaaatacctgaatcgcagcgttccgtcgctggacgaacttttgggcaagggaaagggagcaaaaaagtactctgaaattccgcccgaaaggctgaaagattacagcgcttataacgtcaaagccatttttgacatatggccgatgcagaaaaaagttcttcaggaaaaccggcaggaggagctttttaatgacatagagcttcctcttataaccgtacttgccagtatggaataccacggtttcaaagttgacgccgcaaaacttcacgaatacggcgaagttcttctgtcacgcataaaagacctggaaaaggtaatttacatgctggccggtgaagaattcaacatcaattcaacgaagcagcttggtaccatattattcgaaaaactgaagcttcccgttgtaaaaagtacaaagaccggatactccaccgacgtcgaggttcttgaagagctttattacaagcatgatataataccatgcataatagaataccgccagcttacaaaactttacaccacctacgccgaaggtcttgaaaaagtgataaatcctgtaaccggtaaaattcattcaagttttaaccagacggttacggctacaggccgcatcagcagtaccgaaccaaatttacagaatatcccagtcagacacgaaatgggaagggaaatacggaaagcttttattccgtcgtcggaaaacgctgtttttgttgatgccgattattcacagatagagcttcgcgtgcttgcccatataacaggcgatgaagccctgataaatgctttcgttaagggggaagatattcatacggccacggcgtcgctggtatttgacgtagctcccgaagatgtgacgccggaactgcgcagaaaggcaaaagccgtaaatttcggcatagtgtacgggatcagtgattacgggctggcacgggatttgggaattacccggaaggaagcaaagcggtatatagacgactattttgccaaataccccaaagtaaaaacctatgtggatgaaattgtgcgggtcggccaggaacaggggtatgtggaaactctgttccacagaagaagataccttcccgagcttgcatcttctaattttcaccagcgttctttcggaaaaagggttgcaatgaatacgcccatacagggcactgcagccgatattattaaaattgcgatggtgaaggtatacaaggctttgaaagaatccggccttaaatccaggcttatcctccaggtccatgacgaacttgttattgagacttttgaagacgaactggagactgtcaaggaacttgtcaaaaagtgcatggaagaggccgttgaattgagtgtgccgcttgttgtcgacgtttcaatcgggaaaaactggtatgaagcctcctgatatggatcc

SEQ ID NO: 288 - DNA, 2772 bp, Artificial Sequence
  Description of Artificial Sequence: Synthetic Clostridium stercorarium DNA Polymerase K823T
atgaaatacctgctgccgaccgctgctgctggtctgctgctcctcgctgcccagccggcgatggccatggatccaaaaataatccttatagacggaaacagtattttaaaccgcggtttttatgccctgtcggggcgatccatgctgactacgtccacaggtctgtataccaatgcggttttcgcttttgtaaatatattgaacaaatatatcgaagaggaaaaccctgattatattgccgttgctttcgatcttagggcaaaaactttccggcacggtctatatgagggatacaaagcgcagcggaaaggcatgcccgatgaacttgcaatgcagatacccctcgcgaaggaagtactgagggcgatgaatattgccataatagagcatgaaggttatgaagccgacgatataatcggcagcctttcgttaaaggccgaaaaagagaattttgacgtaataatccttacgggggacagggattctttccagctgatcagcgacagggtgaaagttatcctgccttcgacgaaagccggaaaaacagagaccaacgtatatgataaacaggccatcattgacaaatacggagttttaccccatcagcttattgacgttaaaggcttaatgggagattcgtcagataatatacccggcgttccgggagtgggtgagaaaacggcgttaagccttatttcagcctacggtacactggaaggtgtttacgagcatattgatgaaataaaacagcctaagctgaaagcatcgctgattgaatataaggatcaggcgtttttaagccgtaagctgggtactattgtaagaaatctggagctgtgtgcttcgctggaggatctgaaaagaaaagaaataaaccgcaaagagcttttgaatgttttcagaaaactcgaatttgaaagtatcatatcaaaaatgaatcttgcttccgctgaggtgacagaattacctcccgcgccggaagagcttaaaataacccatatttcagcggcagaggatcttaagaaatggattgcttacctgcttaaccagaaaaacatttccgtccttcaactgattgaccgggaggattcatacagttcccgtctttcagggctggctttgtgcaccggggatgaggttttttatatcgagaccgggactgcactccccgagaatttgattgcaacagagctgaaagaactgtggcagaatgaaaatattcacaaaatcggacacaatataaaagaatttataacctggctgctgaaacacgatgttgaactgaacggcctttatttcgacactatgattgccgaatacctgatagattccataagaaacggctatcctatagcaagcctttctcacaaatacctgaatcgcagcgttccgtcgctggacgaacttttgggcaagggaaagggagcaaaaaagtactctgaaattccgcccgaaaggctgaaagattacagcgcttataacgtcaaagccatttttgacatatggccgatgcagaaaaaagttcttcaggaaaaccggcaggaggagctttttaatgacatagagcttcctcttataaccgtacttgccagtatggaataccacggtttcaaagttgacgccgcaaaacttcacgaatacggcgaagttcttctgtcacgcataaaagacctggaaaaggtaatttacatgctggccggtgaagaattcaacatcaattcaacgaagcagcttggtaccatattattcgaaaaactgaagcttcccgttgtaaaaagtacaaagaccggatactccaccgacgtcgaggttcttgaagagctttattacaagcatgatataataccatgcataatagaataccgccagcttacaaaactttacaccacctacgccgaaggtcttgaaaaagtgataaatcctgtaaccggtaaaattcattcaagttttaaccagacggttacggctacaggccgcatcagcagtaccgaaccaaatttacagaatatcccagtcagacacgaaatgggaagggaaatacggaaagcttttattccgtcgtcggaaaacgctgtttttgttgatgccgattattcacagatagagcttcgcgtgcttgcccatataacaggcgatgaagccctgataaatgctttcgttaagggggaagatattcatacggccacggcgtcgctggtatttgacgtagctcccgaagatgtgacgccggaactgcgcagaaaggcaaaagccgtaaatttcggcatagtgtacgggatcagtgattacgggctggcacgggatttgggaattacccggaaggaagcaaagcggtatatagacgactattttgccaaataccccaaagtaaaaacctatgtggatgaaattgtgcgggtcggccaggaacaggggtatgtggaaactctgttccacagaagaagataccttcccgagcttgcatctactaattttcaccagcgttctttcggaaaaagggttgcaatgaatacgcccatacagggcactgcagccgatattattaaaattgcgatggtgaaggtatacaaggctttgaaagaatccggccttaaatccaggcttatcctccaggtccatgacgaacttgttattgagacttttgaagacgaactggagactgtcaaggaacttgtcaaaaagtgcatggaagaggccgttgaattgagtgtgccgcttgttgtcgacgtttcaatcgggaaaaactggtatgaagcctcctgatatggatcc

SEQ ID NO: 289 - DNA, 2772 bp, Artificial Sequence
  Description of Artificial Sequence: Synthetic Clostridium stercorarium DNA Polymerase K823W
atgaaatacctgctgccgaccgctgctgctggtctgctgctcctcgctgcccagccggcgatggccatggatccaaaaataatccttatagacggaaacagtattttaaaccgcggtttttatgccctgtcggggcgatccatgctgactacgtccacaggtctgtataccaatgcggttttcgcttttgtaaatatattgaacaaatatatcgaagaggaaaaccctgattatattgccgttgctttcgatcttagggcaaaaactttccggcacggtctatatgagggatacaaagcgcagcggaaaggcatgcccgatgaacttgcaatgcagatacccctcgcgaaggaagtactgagggcgatgaatattgccataatagagcatgaaggttatgaagccgacgatataatcggcagcctttcgttaaaggccgaaaaagagaattttgacgtaataatccttacgggggacagggattctttccagctgatcagcgacagggtgaaagttatcctgccttcgacgaaagccggaaaaacagagaccaacgtatatgataaacaggccatcattgacaaatacggagttttaccccatcagcttattgacgttaaaggcttaatgggagattcgtcagataatatacccggcgttccgggagtgggtgagaaaacggcgttaagccttatttcagcctacggtacactggaaggtgtttacgagcatattgatgaaataaaacagcctaagctgaaagcatcgctgattgaatataaggatcaggcgtttttaagccgtaagctgggtactattgtaagaaatctggagctgtgtgcttcgctggaggatctgaaaagaaaagaaataaaccgcaaagagcttttgaatgttttcagaaaactcgaatttgaaagtatcatatcaaaaatgaatcttgcttccgctgaggtgacagaattacctcccgcgccggaagagcttaaaataacccatatttcagcggcagaggatcttaagaaatggattgcttacctgcttaaccagaaaaacatttccgtccttcaactgattgaccgggaggattcatacagttcccgtctttcagggctggctttgtgcaccggggatgaggttttttatatcgagaccgggactgcactccccgagaatttgattgcaacagagctgaaagaactgtggcagaatgaaaatattcacaaaatcggacacaatataaaagaatttataacctggctgctgaaacacgatgttgaactgaacggcctttatttcgacactatgattgccgaatacctgatagattccataagaaacggctatcctatagcaagcctttctcacaaatacctgaatcgcagcgttccgtcgctggacgaacttttgggcaagggaaagggagcaaaaaagtactctgaaattccgcccgaaaggctgaaagattacagcgcttataacgtcaaagccatttttgacatatggccgatgcagaaaaaagttcttcaggaaaaccggcaggaggagctttttaatgacatagagcttcctcttataaccgtacttgccagtatggaataccacggtttcaaagttgacgccgcaaaacttcacgaatacggcgaagttcttctgtcacgcataaaagacctggaaaaggtaatttacatgctggccggtgaagaattcaacatcaattcaacgaagcagcttggtaccatattattcgaaaaactgaagcttcccgttgtaaaaagtacaaagaccggatactccaccgacgtcgaggttcttgaagagctttattacaagcatgatataataccatgcataatagaataccgccagcttacaaaactttacaccacctacgccgaaggtcttgaaaaagtgataaatcctgtaaccggtaaaattcattcaagttttaaccagacggttacggctacaggccgcatcagcagtaccgaaccaaatttacagaatatcccagtcagacacgaaatgggaagggaaatacggaaagcttttattccgtcgtcggaaaacgctgtttttgttgatgccgattattcacagatagagcttcgcgtgcttgcccatataacaggcgatgaagccctgataaatgctttcgttaagggggaagatattcatacggccacggcgtcgctggtatttgacgtagctcccgaagatgtgacgccggaactgcgcagaaaggcaaaagccgtaaatttcggcatagtgtacgggatcagtgattacgggctggcacgggatttgggaattacccggaaggaagcaaagcggtatatagacgactattttgccaaataccccaaagtaaaaacctatgtggatgaaattgtgcgggtcggccaggaacaggggtatgtggaaactctgttccacagaagaagataccttcccgagcttgcatcttggaattttcaccagcgttctttcggaaaaagggttgcaatgaatacgcccatacagggcactgcagccgatattattaaaattgcgatggtgaaggtatacaaggctttgaaagaatccggccttaaatccaggcttatcctccaggtccatgacgaacttgttattgagacttttgaagacgaactggagactgtcaaggaacttgtcaaaaagtgcatggaagaggccgttgaattgagtgtgccgcttgttgtcgacgtttcaatcgggaaaaactggtatgaagcctcctgatatggatcc

SEQ ID NO: 290 - DNA, 2772 bp, Artificial Sequence
  Description of Artificial Sequence: Synthetic Clostridium stercorarium DNA Polymerase K823Y
atgaaatacctgctgccgaccgctgctgctggtctgctgctcctcgctgcccagccggcgatggccatggatccaaaaataatccttatagacggaaacagtattttaaaccgcggtttttatgccctgtcggggcgatccatgctgactacgtccacaggtctgtataccaatgcggttttcgcttttgtaaatatattgaacaaatatatcgaagaggaaaaccctgattatattgccgttgctttcgatcttagggcaaaaactttccggcacggtctatatgagggatacaaagcgcagcggaaaggcatgcccgatgaacttgcaatgcagatacccctcgcgaaggaagtactgagggcgatgaatattgccataatagagcatgaaggttatgaagccgacgatataatcggcagcctttcgttaaaggccgaaaaagagaattttgacgtaataatccttacgggggacagggattctttccagctgatcagcgacagggtgaaagttatcctgccttcgacgaaagccggaaaaacagagaccaacgtatatgataaacaggccatcattgacaaatacggagttttaccccatcagcttattgacgttaaaggcttaatgggagattcgtcagataatatacccggcgttccgggagtgggtgagaaaacggcgttaagccttatttcagcctacggtacactggaaggtgtttacgagcatattgatgaaataaaacagcctaagctgaaagcatcgctgattgaatataaggatcaggcgtttttaagccgtaagctgggtactattgtaagaaatctggagctgtgtgcttcgctggaggatctgaaaagaaaagaaataaaccgcaaagagcttttgaatgttttcagaaaactcgaatttgaaagtatcatatcaaaaatgaatcttgcttccgctgaggtgacagaattacctcccgcgccggaagagcttaaaataacccatatttcagcggcagaggatcttaagaaatggattgcttacctgcttaaccagaaaaacatttccgtccttcaactgattgaccgggaggattcatacagttcccgtctttcagggctggctttgtgcaccggggatgaggttttttatatcgagaccgggactgcactccccgagaatttgattgcaacagagctgaaagaactgtggcagaatgaaaatattcacaaaatcggacacaatataaaagaatttataacctggctgctgaaacacgatgttgaactgaacggcctttatttcgacactatgattgccgaatacctgatagattccataagaaacggctatcctatagcaagcctttctcacaaatacctgaatcgcagcgttccgtcgctggacgaacttttgggcaagggaaagggagcaaaaaagtactctgaaattccgcccgaaaggctgaaagattacagcgcttataacgtcaaagccatttttgacatatggccgatgcagaaaaaagttcttcaggaaaaccggcaggaggagctttttaatgacatagagcttcctcttataaccgtacttgccagtatggaataccacggtttcaaagttgacgccgcaaaacttcacgaatacggcgaagttcttctgtcacgcataaaagacctggaaaaggtaatttacatgctggccggtgaagaattcaacatcaattcaacgaagcagcttggtaccatattattcgaaaaactgaagcttcccgttgtaaaaagtacaaagaccggatactccaccgacgtcgaggttcttgaagagctttattacaagcatgatataataccatgcataatagaataccgccagcttacaaaactttacaccacctacgccgaaggtcttgaaaaagtgataaatcctgtaaccggtaaaattcattcaagttttaaccagacggttacggctacaggccgcatcagcagtaccgaaccaaatttacagaatatcccagtcagacacgaaatgggaagggaaatacggaaagcttttattccgtcgtcggaaaacgctgtttttgttgatgccgattattcacagatagagcttcgcgtgcttgcccatataacaggcgatgaagccctgataaatgctttcgttaagggggaagatattcatacggccacggcgtcgctggtatttgacgtagctcccgaagatgtgacgccggaactgcgcagaaaggcaaaagccgtaaatttcggcatagtgtacgggatcagtgattacgggctggcacgggatttgggaattacccggaaggaagcaaagcggtatatagacgactattttgccaaataccccaaagtaaaaacctatgtggatgaaattgtgcgggtcggccaggaacaggggtatgtggaaactctgttccacagaagaagataccttcccgagcttgcatcttataattttcaccagcgttctttcggaaaaagggttgcaatgaatacgcccatacagggcactgcagccgatattattaaaattgcgatggtgaaggtatacaaggctttgaaagaatccggccttaaatccaggcttatcctccaggtccatgacgaacttgttattgagacttttgaagacgaactggagactgtcaaggaacttgtcaaaaagtgcatggaagaggccgttgaattgagtgtgccgcttgttgtcgacgtttcaatcgggaaaaactggtatgaagcctcctgatatggatcc

SEQ ID NO: 291 - DNA, 2772 bp, Artificial Sequence
  Description of Artificial Sequence: Synthetic Clostridium stercorarium DNA Polymerase K823V
atgaaatacctgctgccgaccgctgctgctggtctgctgctcctcgctgcccagccggcgatggccatggatccaaaaataatccttatagacggaaacagtattttaaaccgcggtttttatgccctgtcggggcgatccatgctgactacgtccacaggtctgtataccaatgcggttttcgcttttgtaaatatattgaacaaatatatcgaagaggaaaaccctgattatattgccgttgctttcgatcttagggcaaaaactttccggcacggtctatatgagggatacaaagcgcagcggaaaggcatgcccgatgaacttgcaatgcagatacccctcgcgaaggaagtactgagggcgatgaatattgccataatagagcatgaaggttatgaagccgacgatataatcggcagcctttcgttaaaggccgaaaaagagaattttgacgtaataatccttacgggggacagggattctttccagctgatcagcgacagggtgaaagttatcctgccttcgacgaaagccggaaaaacagagaccaacgtatatgataaacaggccatcattgacaaatacggagttttaccccatcagcttattgacgttaaaggcttaatgggagattcgtcagataatatacccggcgttccgggagtgggtgagaaaacggcgttaagccttatttcagcctacggtacactggaaggtgtttacgagcatattgatgaaataaaacagcctaagctgaaagcatcgctgattgaatataaggatcaggcgtttttaagccgtaagctgggtactattgtaagaaatctggagctgtgtgcttcgctggaggatctgaaaagaaaagaaataaaccgcaaagagcttttgaatgttttcagaaaactcgaatttgaaagtatcatatcaaaaatgaatcttgcttccgctgaggtgacagaattacctcccgcgccggaagagcttaaaataacccatatttcagcggcagaggatcttaagaaatggattgcttacctgcttaaccagaaaaacatttccgtccttcaactgattgaccgggaggattcatacagttcccgtctttcagggctggctttgtgcaccggggatgaggttttttatatcgagaccgggactgcactccccgagaatttgattgcaacagagctgaaagaactgtggcagaatgaaaatattcacaaaatcggacacaatataaaagaatttataacctggctgctgaaacacgatgttgaactgaacggcctttatttcgacactatgattgccgaatacctgatagattccataagaaacggctatcctatagcaagcctttctcacaaatacctgaatcgcagcgttccgtcgctggacgaacttttgggcaagggaaagggagcaaaaaagtactctgaaattccgcccgaaaggctgaaagattacagcgcttataacgtcaaagccatttttgacatatggccgatgcagaaaaaagttcttcaggaaaaccggcaggaggagctttttaatgacatagagcttcctcttataaccgtacttgccagtatggaataccacggtttcaaagttgacgccgcaaaacttcacgaatacggcgaagttcttctgtcacgcataaaagacctggaaaaggtaatttacatgctggccggtgaagaattcaacatcaattcaacgaagcagcttggtaccatattattcgaaaaactgaagcttcccgttgtaaaaagtacaaagaccggatactccaccgacgtcgaggttcttgaagagctttattacaagcatgatataataccatgcataatagaataccgccagcttacaaaactttacaccacctacgccgaaggtcttgaaaaagtgataaatcctgtaaccggtaaaattcattcaagttttaaccagacggttacggctacaggccgcatcagcagtaccgaaccaaatttacagaatatcccagtcagacacgaaatgggaagggaaatacggaaagcttttattccgtcgtcggaaaacgctgtttttgttgatgccgattattcacagatagagcttcgcgtgcttgcccatataacaggcgatgaagccctgataaatgctttcgttaagggggaagatattcatacggccacggcgtcgctggtatttgacgtagctcccgaagatgtgacgccggaactgcgcagaaaggcaaaagccgtaaatttcggcatagtgtacgggatcagtgattacgggctggcacgggatttgggaattacccggaaggaagcaaagcggtatatagacgactattttgccaaataccccaaagtaaaaacctatgtggatgaaattgtgcgggtcggccaggaacaggggtatgtggaaactctgttccacagaagaagataccttcccgagcttgcatctgttaattttcaccagcgttctttcggaaaaagggttgcaatgaatacgcccatacagggcactgcagccgatattattaaaattgcgatggtgaaggtatacaaggctttgaaagaatccggccttaaatccaggcttatcctccaggtccatgacgaacttgttattgagacttttgaagacgaactggagactgtcaaggaacttgtcaaaaagtgcatggaagaggccgttgaattgagtgtgccgcttgttgtcgacgtttcaatcgggaaaaactggtatgaagcctcctgatatggatcc

SEQ ID NO: 292 - DNA, 2772 bp, Artificial Sequence
  Description of Artificial Sequence: Synthetic Clostridium stercorarium DNA Polymerase N824A
atgaaatacctgctgccgaccgctgctgctggtctgctgctcctcgctgcccagccggcgatggccatggatccaaaaataatccttatagacggaaacagtattttaaaccgcggtttttatgccctgtcggggcgatccatgctgactacgtccacaggtctgtataccaatgcggttttcgcttttgtaaatatattgaacaaatatatcgaagaggaaaaccctgattatattgccgttgctttcgatcttagggcaaaaactttccggcacggtctatatgagggatacaaagcgcagcggaaaggcatgcccgatgaacttgcaatgcagatacccctcgcgaaggaagtactgagggcgatgaatattgccataatagagcatgaaggttatgaagccgacgatataatcggcagcctttcgttaaaggccgaaaaagagaattttgacgtaataatccttacgggggacagggattctttccagctgatcagcgacagggtgaaagttatcctgccttcgacgaaagccggaaaaacagagaccaacgtatatgataaacaggccatcattgacaaatacggagttttaccccatcagcttattgacgttaaaggcttaatgggagattcgtcagataatatacccggcgttccgggagtgggtgagaaaacggcgttaagccttatttcagcctacggtacactggaaggtgtttacgagcatattgatgaaataaaacagcctaagctgaaagcatcgctgattgaatataaggatcaggcgtttttaagccgtaagctgggtactattgtaagaaatctggagctgtgtgcttcgctggaggatctgaaaagaaaagaaataaaccgcaaagagcttttgaatgttttcagaaaactcgaatttgaaagtatcatatcaaaaatgaatcttgcttccgctgaggtgacagaattacctcccgcgccggaagagcttaaaataacccatatttcagcggcagaggatcttaagaaatggattgcttacctgcttaaccagaaaaacatttccgtccttcaactgattgaccgggaggattcatacagttcccgtctttcagggctggctttgtgcaccggggatgaggttttttatatcgagaccgggactgcactccccgagaatttgattgcaacagagctgaaagaactgtggcagaatgaaaatattcacaaaatcggacacaatataaaagaatttataacctggctgctgaaacacgatgttgaactgaacggcctttatttcgacactatgattgccgaatacctgatagattccataagaaacggctatcctatagcaagcctttctcacaaatacctgaatcgcagcgttccgtcgctggacgaacttttgggcaagggaaagggagcaaaaaagtactctgaaattccgcccgaaaggctgaaagattacagcgcttataacgtcaaagccatttttgacatatggccgatgcagaaaaaagttcttcaggaaaaccggcaggaggagctttttaatgacatagagcttcctcttataaccgtacttgccagtatggaataccacggtttcaaagttgacgccgcaaaacttcacgaatacggcgaagttcttctgtcacgcataaaagacctggaaaaggtaatttacatgctggccggtgaagaattcaacatcaattcaacgaagcagcttggtaccatattattcgaaaaactgaagcttcccgttgtaaaaagtacaaagaccggatactccaccgacgtcgaggttcttgaagagctttattacaagcatgatataataccatgcataatagaataccgccagcttacaaaactttacaccacctacgccgaaggtcttgaaaaagtgataaatcctgtaaccggtaaaattcattcaagttttaaccagacggttacggctacaggccgcatcagcagtaccgaaccaaatttacagaatatcccagtcagacacgaaatgggaagggaaatacggaaagcttttattccgtcgtcggaaaacgctgtttttgttgatgccgattattcacagatagagcttcgcgtgcttgcccatataacaggcgatgaagccctgataaatgctttcgttaagggggaagatattcatacggccacggcgtcgctggtatttgacgtagctcccgaagatgtgacgccggaactgcgcagaaaggcaaaagccgtaaatttcggcatagtgtacgggatcagtgattacgggctggcacgggatttgggaattacccggaaggaagcaaagcggtatatagacgactattttgccaaataccccaaagtaaaaacctatgtggatgaaattgtgcgggtcggccaggaacaggggtatgtggaaactctgttccacagaagaagataccttcccgagcttgcatctaaagcttttcaccagcgttctttcggaaaaagggttgcaatgaatacgcccatacagggcactgcagccgatattattaaaattgcgatggtgaaggtatacaaggctttgaaagaatccggccttaaatccaggcttatcctccaggtccatgacgaacttgttattgagacttttgaagacgaactggagactgtcaaggaacttgtcaaaaagtgcatggaagaggccgttgaattgagtgtgccgcttgttgtcgacgtttcaatcgggaaaaactggtatgaagcctcctgatatggatcc

SEQ ID NO: 293 - DNA, 2772 bp, Artificial Sequence
  Description of Artificial Sequence: Synthetic Clostridium stercorarium DNA Polymerase N824R
atgaaatacctgctgccgaccgctgctgctggtctgctgctcctcgctgcccagccggcgatggccatggatccaaaaataatccttatagacggaaacagtattttaaaccgcggtttttatgccctgtcggggcgatccatgctgactacgtccacaggtctgtataccaatgcggttttcgcttttgtaaatatattgaacaaatatatcgaagaggaaaaccctgattatattgccgttgctttcgatcttagggcaaaaactttccggcacggtctatatgagggatacaaagcgcagcggaaaggcatgcccgatgaacttgcaatgcagatacccctcgcgaaggaagtactgagggcgatgaatattgccataatagagcatgaaggttatgaagccgacgatataatcggcagcctttcgttaaaggccgaaaaagagaattttgacgtaataatccttacgggggacagggattctttccagctgatcagcgacagggtgaaagttatcctgccttcgacgaaagccggaaaaacagagaccaacgtatatgataaacaggccatcattgacaaatacggagttttaccccatcagcttattgacgttaaaggcttaatgggagattcgtcagataatatacccggcgttccgggagtgggtgagaaaacggcgttaagccttatttcagcctacggtacactggaaggtgtttacgagcatattgatgaaataaaacagcctaagctgaaagcatcgctgattgaatataaggatcaggcgtttttaagccgtaagctgggtactattgtaagaaatctggagctgtgtgcttcgctggaggatctgaaaagaaaagaaataaaccgcaaagagcttttgaatgttttcagaaaactcgaatttgaaagtatcatatcaaaaatgaatcttgcttccgctgaggtgacagaattacctcccgcgccggaagagcttaaaataacccatatttcagcggcagaggatcttaagaaatggattgcttacctgcttaaccagaaaaacatttccgtccttcaactgattgaccgggaggattcatacagttcccgtctttcagggctggctttgtgcaccggggatgaggttttttatatcgagaccgggactgcactccccgagaatttgattgcaacagagctgaaagaactgtggcagaatgaaaatattcacaaaatcggacacaatataaaagaatttataacctggctgctgaaacacgatgttgaactgaacggcctttatttcgacactatgattgccgaatacctgatagattccataagaaacggctatcctatagcaagcctttctcacaaatacctgaatcgcagcgttccgtcgctggacgaacttttgggcaagggaaagggagcaaaaaagtactctgaaattccgcccgaaaggctgaaagattacagcgcttataacgtcaaagccatttttgacatatggccgatgcagaaaaaagttcttcaggaaaaccggcaggaggagctttttaatgacatagagcttcctcttataaccgtacttgccagtatggaataccacggtttcaaagttgacgccgcaaaacttcacgaatacggcgaagttcttctgtcacgcataaaagacctggaaaaggtaatttacatgctggccggtgaagaattcaacatcaattcaacgaagcagcttggtaccatattattcgaaaaactgaagcttcccgttgtaaaaagtacaaagaccggatactccaccgacgtcgaggttcttgaagagctttattacaagcatgatataataccatgcataatagaataccgccagcttacaaaactttacaccacctacgccgaaggtcttgaaaaagtgataaatcctgtaaccggtaaaattcattcaagttttaaccagacggttacggctacaggccgcatcagcagtaccgaaccaaatttacagaatatcccagtcagacacgaaatgggaagggaaatacggaaagcttttattccgtcgtcggaaaacgctgtttttgttgatgccgattattcacagatagagcttcgcgtgcttgcccatataacaggcgatgaagccctgataaatgctttcgttaagggggaagatattcatacggccacggcgtcgctggtatttgacgtagctcccgaagatgtgacgccggaactgcgcagaaaggcaaaagccgtaaatttcggcatagtgtacgggatcagtgattacgggctggcacgggatttgggaattacccggaaggaagcaaagcggtatatagacgactattttgccaaataccccaaagtaaaaacctatgtggatgaaattgtgcgggtcggccaggaacaggggtatgtggaaactctgttccacagaagaagataccttcccgagcttgcatctaaacgttttcaccagcgttctttcggaaaaagggttgcaatgaatacgcccatacagggcactgcagccgatattattaaaattgcgatggtgaaggtatacaaggctttgaaagaatccggccttaaatccaggcttatcctccaggtccatgacgaacttgttattgagacttttgaagacgaactggagactgtcaaggaacttgtcaaaaagtgcatggaagaggccgttgaattgagtgtgccgcttgttgtcgacgtttcaatcgggaaaaactggtatgaagcctcctgatatggatcc

SEQ ID NO: 294 - DNA, 2772 bp, Artificial Sequence
  Description of Artificial Sequence: Synthetic Clostridium stercorarium DNA Polymerase N824D
atgaaatacctgctgccgaccgctgctgctggtctgctgctcctcgctgcccagccggcgatggccatggatccaaaaataatccttatagacggaaacagtattttaaaccgcggtttttatgccctgtcggggcgatccatgctgactacgtccacaggtctgtataccaatgcggttttcgcttttgtaaatatattgaacaaatatatcgaagaggaaaaccctgattatattgccgttgctttcgatcttagggcaaaaactttccggcacggtctatatgagggatacaaagcgcagcggaaaggcatgcccgatgaacttgcaatgcagatacccctcgcgaaggaagtactgagggcgatgaatattgccataatagagcatgaaggttatgaagccgacgatataatcggcagcctttcgttaaaggccgaaaaagagaattttgacgtaataatccttacgggggacagggattctttccagctgatcagcgacagggtgaaagttatcctgccttcgacgaaagccggaaaaacagagaccaacgtatatgataaacaggccatcattgacaaatacggagttttaccccatcagcttattgacgttaaaggcttaatgggagattcgtcagataatatacccggcgttccgggagtgggtgagaaaacggcgttaagccttatttcagcctacggtacactggaaggtgtttacgagcatattgatgaaataaaacagcctaagctgaaagcatcgctgattgaatataaggatcaggcgtttttaagccgtaagctgggtactattgtaagaaatctggagctgtgtgcttcgctggaggatctgaaaagaaaagaaataaaccgcaaagagcttttgaatgttttcagaaaactcgaatttgaaagtatcatatcaaaaatgaatcttgcttccgctgaggtgacagaattacctcccgcgccggaagagcttaaaataacccatatttcagcggcagaggatcttaagaaatggattgcttacctgcttaaccagaaaaacatttccgtccttcaactgattgaccgggaggattcatacagttcccgtctttcagggctggctttgtgcaccggggatgaggttttttatatcgagaccgggactgcactccccgagaatttgattgcaacagagctgaaagaactgtggcagaatgaaaatattcacaaaatcggacacaatataaaagaatttataacctggctgctgaaacacgatgttgaactgaacggcctttatttcgacactatgattgccgaatacctgatagattccataagaaacggctatcctatagcaagcctttctcacaaatacctgaatcgcagcgttccgtcgctggacgaacttttgggcaagggaaagggagcaaaaaagtactctgaaattccgcccgaaaggctgaaagattacagcgcttataacgtcaaagccatttttgacatatggccgatgcagaaaaaagttcttcaggaaaaccggcaggaggagctttttaatgacatagagcttcctcttataaccgtacttgccagtatggaataccacggtttcaaagttgacgccgcaaaacttcacgaatacggcgaagttcttctgtcacgcataaaagacctggaaaaggtaatttacatgctggccggtgaagaattcaacatcaattcaacgaagcagcttggtaccatattattcgaaaaactgaagcttcccgttgtaaaaagtacaaagaccggatactccaccgacgtcgaggttcttgaagagctttattacaagcatgatataataccatgcataatagaataccgccagcttacaaaactttacaccacctacgccgaaggtcttgaaaaagtgataaatcctgtaaccggtaaaattcattcaagttttaaccagacggttacggctacaggccgcatcagcagtaccgaaccaaatttacagaatatcccagtcagacacgaaatgggaagggaaatacggaaagcttttattccgtcgtcggaaaacgctgtttttgttgatgccgattattcacagatagagcttcgcgtgcttgcccatataacaggcgatgaagccctgataaatgctttcgttaagggggaagatattcatacggccacggcgtcgctggtatttgacgtagctcccgaagatgtgacgccggaactgcgcagaaaggcaaaagccgtaaatttcggcatagtgtacgggatcagtgattacgggctggcacgggatttgggaattacccggaaggaagcaaagcggtatatagacgactattttgccaaataccccaaagtaaaaacctatgtggatgaaattgtgcgggtcggccaggaacaggggtatgtggaaactctgttccacagaagaagataccttcccgagcttgcatctaaagattttcaccagcgttctttcggaaaaagggttgcaatgaatacgcccatacagggcactgcagccgatattattaaaattgcgatggtgaaggtatacaaggctttgaaagaatccggccttaaatccaggcttatcctccaggtccatgacgaacttgttattgagacttttgaagacgaactggagactgtcaaggaacttgtcaaaaagtgcatggaagaggccgttgaattgagtgtgccgcttgttgtcgacgtttcaatcgggaaaaactggtatgaagcctcctgatatggatcc

SEQ ID NO: 295 - DNA, 2772 bp, Artificial Sequence
  Description of Artificial Sequence: Synthetic Clostridium stercorarium DNA Polymerase N824C
atgaaatacctgctgccgaccgctgctgctggtctgctgctcctcgctgcccagccggcgatggccatggatccaaaaataatccttatagacggaaacagtattttaaaccgcggtttttatgccctgtcggggcgatccatgctgactacgtccacaggtctgtataccaatgcggttttcgcttttgtaaatatattgaacaaatatatcgaagaggaaaaccctgattatattgccgttgctttcgatcttagggcaaaaactttccggcacggtctatatgagggatacaaagcgcagcggaaaggcatgcccgatgaacttgcaatgcagatacccctcgcgaaggaagtactgagggcgatgaatattgccataatagagcatgaaggttatgaagccgacgatataatcggcagcctttcgttaaaggccgaaaaagagaattttgacgtaataatccttacgggggacagggattctttccagctgatcagcgacagggtgaaagttatcctgccttcgacgaaagccggaaaaacagagaccaacgtatatgataaacaggccatcattgacaaatacggagttttaccccatcagcttattgacgttaaaggcttaatgggagattcgtcagataatatacccggcgttccgggagtgggtgagaaaacggcgttaagccttatttcagcctacggtacactggaaggtgtttacgagcatattgatgaaataaaacagcctaagctgaaagcatcgctgattgaatataaggatcaggcgtttttaagccgtaagctgggtactattgtaagaaatctggagctgtgtgcttcgctggaggatctgaaaagaaaagaaataaaccgcaaagagcttttgaatgttttcagaaaactcgaatttgaaagtatcatatcaaaaatgaatcttgcttccgctgaggtgacagaattacctcccgcgccggaagagcttaaaataacccatatttcagcggcagaggatcttaagaaatggattgcttacctgcttaaccagaaaaacatttccgtccttcaactgattgaccgggaggattcatacagttcccgtctttcagggctggctttgtgcaccggggatgaggttttttatatcgagaccgggactgcactccccgagaatttgattgcaacagagctgaaagaactgtggcagaatgaaaatattcacaaaatcggacacaatataaaagaatttataacctggctgctgaaacacgatgttgaactgaacggcctttatttcgacactatgattgccgaatacctgatagattccataagaaacggctatcctatagcaagcctttctcacaaatacctgaatcgcagcgttccgtcgctggacgaacttttgggcaagggaaagggagcaaaaaagtactctgaaattccgcccgaaaggctgaaagattacagcgcttataacgtcaaagccatttttgacatatggccgatgcagaaaaaagttcttcaggaaaaccggcaggaggagctttttaatgacatagagcttcctcttataaccgtacttgccagtatggaataccacggtttcaaagttgacgccgcaaaacttcacgaatacggcgaagttcttctgtcacgcataaaagacctggaaaaggtaatttacatgctggccggtgaagaattcaacatcaattcaacgaagcagcttggtaccatattattcgaaaaactgaagcttcccgttgtaaaaagtacaaagaccggatactccaccgacgtcgaggttcttgaagagctttattacaagcatgatataataccatgcataatagaataccgccagcttacaaaactttacaccacctacgccgaaggtcttgaaaaagtgataaatcctgtaaccggtaaaattcattcaagttttaaccagacggttacggctacaggccgcatcagcagtaccgaaccaaatttacagaatatcccagtcagacacgaaatgggaagggaaatacggaaagcttttattccgtcgtcggaaaacgctgtttttgttgatgccgattattcacagatagagcttcgcgtgcttgcccatataacaggcgatgaagccctgataaatgctttcgttaagggggaagatattcatacggccacggcgtcgctggtatttgacgtagctcccgaagatgtgacgccggaactgcgcagaaaggcaaaagccgtaaatttcggcatagtgtacgggatcagtgattacgggctggcacgggatttgggaattacccggaaggaagcaaagcggtatatagacgactattttgccaaataccccaaagtaaaaacctatgtggatgaaattgtgcgggtcggccaggaacaggggtatgtggaaactctgttccacagaagaagataccttcccgagcttgcatctaaatgttttcaccagcgttctttcggaaaaagggttgcaatgaatacgcccatacagggcactgcagccgatattattaaaattgcgatggtgaaggtatacaaggctttgaaagaatccggccttaaatccaggcttatcctccaggtccatgacgaacttgttattgagacttttgaagacgaactggagactgtcaaggaacttgtcaaaaagtgcatggaagaggccgttgaattgagtgtgccgcttgttgtcgacgtttcaatcgggaaaaactggtatgaagcctcctgatatggatcc

SEQ ID NO: 296 - DNA, 2772 bp, Artificial Sequence
  Description of Artificial Sequence: Synthetic Clostridium stercorarium DNA Polymerase N824E
atgaaatacctgctgccgaccgctgctgctggtctgctgctcctcgctgcccagccggcgatggccatggatccaaaaataatccttatagacggaaacagtattttaaaccgcggtttttatgccctgtcggggcgatccatgctgactacgtccacaggtctgtataccaatgcggttttcgcttttgtaaatatattgaacaaatatatcgaagaggaaaaccctgattatattgccgttgctttcgatcttagggcaaaaactttccggcacggtctatatgagggatacaaagcgcagcggaaaggcatgcccgatgaacttgcaatgcagatacccctcgcgaaggaagtactgagggcgatgaatattgccataatagagcatgaaggttatgaagccgacgatataatcggcagcctttcgttaaaggccgaaaaagagaattttgacgtaataatccttacgggggacagggattctttccagctgatcagcgacagggtgaaagttatcctgccttcgacgaaagccggaaaaacagagaccaacgtatatgataaacaggccatcattgacaaatacggagttttaccccatcagcttattgacgttaaaggcttaatgggagattcgtcagataatatacccggcgttccgggagtgggtgagaaaacggcgttaagccttatttcagcctacggtacactggaaggtgtttacgagcatattgatgaaataaaacagcctaagctgaaagcatcgctgattgaatataaggatcaggcgtttttaagccgtaagctgggtactattgtaagaaatctggagctgtgtgcttcgctggaggatctgaaaagaaaagaaataaaccgcaaagagcttttgaatgttttcagaaaactcgaatttgaaagtatcatatcaaaaatgaatcttgcttccgctgaggtgacagaattacctcccgcgccggaagagcttaaaataacccatatttcagcggcagaggatcttaagaaatggattgcttacctgcttaaccagaaaaacatttccgtccttcaactgattgaccgggaggattcatacagttcccgtctttcagggctggctttgtgcaccggggatgaggttttttatatcgagaccgggactgcactccccgagaatttgattgcaacagagctgaaagaactgtggcagaatgaaaatattcacaaaatcggacacaatataaaagaatttataacctggctgctgaaacacgatgttgaactgaacggcctttatttcgacactatgattgccgaatacctgatagattccataagaaacggctatcctatagcaagcctttctcacaaatacctgaatcgcagcgttccgtcgctggacgaacttttgggcaagggaaagggagcaaaaaagtactctgaaattccgcccgaaaggctgaaagattacagcgcttataacgtcaaagccatttttgacatatggccgatgcagaaaaaagttcttcaggaaaaccggcaggaggagctttttaatgacatagagcttcctcttataaccgtacttgccagtatggaataccacggtttcaaagttgacgccgcaaaacttcacgaatacggcgaagttcttctgtcacgcataaaagacctggaaaaggtaatttacatgctggccggtgaagaattcaacatcaattcaacgaagcagcttggtaccatattattcgaaaaactgaagcttcccgttgtaaaaagtacaaagaccggatactccaccgacgtcgaggttcttgaagagctttattacaagcatgatataataccatgcataatagaataccgccagcttacaaaactttacaccacctacgccgaaggtcttgaaaaagtgataaatcctgtaaccggtaaaattcattcaagttttaaccagacggttacggctacaggccgcatcagcagtaccgaaccaaatttacagaatatcccagtcagacacgaaatgggaagggaaatacggaaagcttttattccgtcgtcggaaaacgctgtttttgttgatgccgattattcacagatagagcttcgcgtgcttgcccatataacaggcgatgaagccctgataaatgctttcgttaagggggaagatattcatacggccacggcgtcgctggtatttgacgtagctcccgaagatgtgacgccggaactgcgcagaaaggcaaaagccgtaaatttcggcatagtgtacgggatcagtgattacgggctggcacgggatttgggaattacccggaaggaagcaaagcggtatatagacgactattttgccaaataccccaaagtaaaaacctatgtggatgaaattgtgcgggtcggccaggaacaggggtatgtggaaactctgttccacagaagaagataccttcccgagcttgcatctaaagaatttcaccagcgttctttcggaaaaagggttgcaatgaatacgcccatacagggcactgcagccgatattattaaaattgcgatggtgaaggtatacaaggctttgaaagaatccggccttaaatccaggcttatcctccaggtccatgacgaacttgttattgagacttttgaagacgaactggagactgtcaaggaacttgtcaaaaagtgcatggaagaggccgttgaattgagtgtgccgcttgttgtcgacgtttcaatcgggaaaaactggtatgaagcctcctgatatggatcc

SEQ ID NO: 297 - DNA, 2772 bp, Artificial Sequence
  Description of Artificial Sequence: Synthetic Clostridium stercorarium DNA Polymerase N824Q
atgaaatacctgctgccgaccgctgctgctggtctgctgctcctcgctgcccagccggcgatggccatggatccaaaaataatccttatagacggaaacagtattttaaaccgcggtttttatgccctgtcggggcgatccatgctgactacgtccacaggtctgtataccaatgcggttttcgcttttgtaaatatattgaacaaatatatcgaagaggaaaaccctgattatattgccgttgctttcgatcttagggcaaaaactttccggcacggtctatatgagggatacaaagcgcagcggaaaggcatgcccgatgaacttgcaatgcagatacccctcgcgaaggaagtactgagggcgatgaatattgccataatagagcatgaaggttatgaagccgacgatataatcggcagcctttcgttaaaggccgaaaaagagaattttgacgtaataatccttacgggggacagggattctttccagctgatcagcgacagggtgaaagttatcctgccttcgacgaaagccggaaaaacagagaccaacgtatatgataaacaggccatcattgacaaatacggagttttaccccatcagcttattgacgttaaaggcttaatgggagattcgtcagataatatacccggcgttccgggagtgggtgagaaaacggcgttaagccttatttcagcctacggtacactggaaggtgtttacgagcatattgatgaaataaaacagcctaagctgaaagcatcgctgattgaatataaggatcaggcgtttttaagccgtaagctgggtactattgtaagaaatctggagctgtgtgcttcgctggaggatctgaaaagaaaagaaataaaccgcaaagagcttttgaatgttttcagaaaactcgaatttgaaagtatcatatcaaaaatgaatcttgcttccgctgaggtgacagaattacctcccgcgccggaagagcttaaaataacccatatttcagcggcagaggatcttaagaaatggattgcttacctgcttaaccagaaaaacatttccgtccttcaactgattgaccgggaggattcatacagttcccgtctttcagggctggctttgtgcaccggggatgaggttttttatatcgagaccgggactgcactccccgagaatttgattgcaacagagctgaaagaactgtggcagaatgaaaatattcacaaaatcggacacaatataaaagaatttataacctggctgctgaaacacgatgttgaactgaacggcctttatttcgacactatgattgccgaatacctgatagattccataagaaacggctatcctatagcaagcctttctcacaaatacctgaatcgcagcgttccgtcgctggacgaacttttgggcaagggaaagggagcaaaaaagtactctgaaattccgcccgaaaggctgaaagattacagcgcttataacgtcaaagccatttttgacatatggccgatgcagaaaaaagttcttcaggaaaaccggcaggaggagctttttaatgacatagagcttcctcttataaccgtacttgccagtatggaataccacggtttcaaagttgacgccgcaaaacttcacgaatacggcgaagttcttctgtcacgcataaaagacctggaaaaggtaatttacatgctggccggtgaagaattcaacatcaattcaacgaagcagcttggtaccatattattcgaaaaactgaagcttcccgttgtaaaaagtacaaagaccggatactccaccgacgtcgaggttcttgaagagctttattacaagcatgatataataccatgcataatagaataccgccagcttacaaaactttacaccacctacgccgaaggtcttgaaaaagtgataaatcctgtaaccggtaaaattcattcaagttttaaccagacggttacggctacaggccgcatcagcagtaccgaaccaaatttacagaatatcccagtcagacacgaaatgggaagggaaatacggaaagcttttattccgtcgtcggaaaacgctgtttttgttgatgccgattattcacagatagagcttcgcgtgcttgcccatataacaggcgatgaagccctgataaatgctttcgttaagggggaagatattcatacggccacggcgtcgctggtatttgacgtagctcccgaagatgtgacgccggaactgcgcagaaaggcaaaagccgtaaatttcggcatagtgtacgggatcagtgattacgggctggcacgggatttgggaattacccggaaggaagcaaagcggtatatagacgactattttgccaaataccccaaagtaaaaacctatgtggatgaaattgtgcgggtcggccaggaacaggggtatgtggaaactctgttccacagaagaagataccttcccgagcttgcatctaaacaatttcaccagcgttctttcggaaaaagggttgcaatgaatacgcccatacagggcactgcagccgatattattaaaattgcgatggtgaaggtatacaaggctttgaaagaatccggccttaaatccaggcttatcctccaggtccatgacgaacttgttattgagacttttgaagacgaactggagactgtcaaggaacttgtcaaaaagtgcatggaagaggccgttgaattgagtgtgccgcttgttgtcgacgtttcaatcgggaaaaactggtatgaagcctcctgatatggatcc

SEQ ID NO: 298 - DNA, 2772 bp, Artificial Sequence
  Description of Artificial Sequence: Synthetic Clostridium stercorarium DNA Polymerase N824G
atgaaatacctgctgccgaccgctgctgctggtctgctgctcctcgctgcccagccggcgatggccatggatccaaaaataatccttatagacggaaacagtattttaaaccgcggtttttatgccctgtcggggcgatccatgctgactacgtccacaggtctgtataccaatgcggttttcgcttttgtaaatatattgaacaaatatatcgaagaggaaaaccctgattatattgccgttgctttcgatcttagggcaaaaactttccggcacggtctatatgagggatacaaagcgcagcggaaaggcatgcccgatgaacttgcaatgcagatacccctcgcgaaggaagtactgagggcgatgaatattgccataatagagcatgaaggttatgaagccgacgatataatcggcagcctttcgttaaaggccgaaaaagagaattttgacgtaataatccttacgggggacagggattctttccagctgatcagcgacagggtgaaagttatcctgccttcgacgaaagccggaaaaacagagaccaacgtatatgataaacaggccatcattgacaaatacggagttttaccccatcagcttattgacgttaaaggcttaatgggagattcgtcagataatatacccggcgttccgggagtgggtgagaaaacggcgttaagccttatttcagcctacggtacactggaaggtgtttacgagcatattgatgaaataaaacagcctaagctgaaagcatcgctgattgaatataaggatcaggcgtttttaagccgtaagctgggtactattgtaagaaatctggagctgtgtgcttcgctggaggatctgaaaagaaaagaaataaaccgcaaagagcttttgaatgttttcagaaaactcgaatttgaaagtatcatatcaaaaatgaatcttgcttccgctgaggtgacagaattacctcccgcgccggaagagcttaaaataacccatatttcagcggcagaggatcttaagaaatggattgcttacctgcttaaccagaaaaacatttccgtccttcaactgattgaccgggaggattcatacagttcccgtctttcagggctggctttgtgcaccggggatgaggttttttatatcgagaccgggactgcactccccgagaatttgattgcaacagagctgaaagaactgtggcagaatgaaaatattcacaaaatcggacacaatataaaagaatttataacctggctgctgaaacacgatgttgaactgaacggcctttatttcgacactatgattgccgaatacctgatagattccataagaaacggctatcctatagcaagcctttctcacaaatacctgaatcgcagcgttccgtcgctggacgaacttttgggcaagggaaagggagcaaaaaagtactctgaaattccgcccgaaaggctgaaagattacagcgcttataacgtcaaagccatttttgacatatggccgatgcagaaaaaagttcttcaggaaaaccggcaggaggagctttttaatgacatagagcttcctcttataaccgtacttgccagtatggaataccacggtttcaaagttgacgccgcaaaacttcacgaatacggcgaagttcttctgtcacgcataaaagacctggaaaaggtaatttacatgctggccggtgaagaattcaacatcaattcaacgaagcagcttggtaccatattattcgaaaaactgaagcttcccgttgtaaaaagtacaaagaccggatactccaccgacgtcgaggttcttgaagagctttattacaagcatgatataataccatgcataatagaataccgccagcttacaaaactttacaccacctacgccgaaggtcttgaaaaagtgataaatcctgtaaccggtaaaattcattcaagttttaaccagacggttacggctacaggccgcatcagcagtaccgaaccaaatttacagaatatcccagtcagacacgaaatgggaagggaaatacggaaagcttttattccgtcgtcggaaaacgctgtttttgttgatgccgattattcacagatagagcttcgcgtgcttgcccatataacaggcgatgaagccctgataaatgctttcgttaagggggaagatattcatacggccacggcgtcgctggtatttgacgtagctcccgaagatgtgacgccggaactgcgcagaaaggcaaaagccgtaaatttcggcatagtgtacgggatcagtgattacgggctggcacgggatttgggaattacccggaaggaagcaaagcggtatatagacgactattttgccaaataccccaaagtaaaaacctatgtggatgaaattgtgcgggtcggccaggaacaggggtatgtggaaactctgttccacagaagaagataccttcccgagcttgcatctaaaggttttcaccagcgttctttcggaaaaagggttgcaatgaatacgcccatacagggcactgcagccgatattattaaaattgcgatggtgaaggtatacaaggctttgaaagaatccggccttaaatccaggcttatcctccaggtccatgacgaacttgttattgagacttttgaagacgaactggagactgtcaaggaacttgtcaaaaagtgcatggaagaggccgttgaattgagtgtgccgcttgttgtcgacgtttcaatcgggaaaaactggtatgaagcctcctgatatggatcc

SEQ ID NO: 299 - DNA, 2772 bp, Artificial Sequence
  Description of Artificial Sequence: Synthetic Clostridium stercorarium DNA Polymerase N824H
atgaaatacctgctgccgaccgctgctgctggtctgctgctcctcgctgcccagccggcgatggccatggatccaaaaataatccttatagacggaaacagtattttaaaccgcggtttttatgccctgtcggggcgatccatgctgactacgtccacaggtctgtataccaatgcggttttcgcttttgtaaatatattgaacaaatatatcgaagaggaaaaccctgattatattgccgttgctttcgatcttagggcaaaaactttccggcacggtctatatgagggatacaaagcgcagcggaaaggcatgcccgatgaacttgcaatgcagatacccctcgcgaaggaagtactgagggcgatgaatattgccataatagagcatgaaggttatgaagccgacgatataatcggcagcctttcgttaaaggccgaaaaagagaattttgacgtaataatccttacgggggacagggattctttccagctgatcagcgacagggtgaaagttatcctgccttcgacgaaagccggaaaaacagagaccaacgtatatgataaacaggccatcattgacaaatacggagttttaccccatcagcttattgacgttaaaggcttaatgggagattcgtcagataatatacccggcgttccgggagtgggtgagaaaacggcgttaagccttatttcagcctacggtacactggaaggtgtttacgagcatattgatgaaataaaacagcctaagctgaaagcatcgctgattgaatataaggatcaggcgtttttaagccgtaagctgggtactattgtaagaaatctggagctgtgtgcttcgctggaggatctgaaaagaaaagaaataaaccgcaaagagcttttgaatgttttcagaaaactcgaatttgaaagtatcatatcaaaaatgaatcttgcttccgctgaggtgacagaattacctcccgcgccggaagagcttaaaataacccatatttcagcggcagaggatcttaagaaatggattgcttacctgcttaaccagaaaaacatttccgtccttcaactgattgaccgggaggattcatacagttcccgtctttcagggctggctttgtgcaccggggatgaggttttttatatcgagaccgggactgcactccccgagaatttgattgcaacagagctgaaagaactgtggcagaatgaaaatattcacaaaatcggacacaatataaaagaatttataacctggctgctgaaacacgatgttgaactgaacggcctttatttcgacactatgattgccgaatacctgatagattccataagaaacggctatcctatagcaagcctttctcacaaatacctgaatcgcagcgttccgtcgctggacgaacttttgggcaagggaaagggagcaaaaaagtactctgaaattccgcccgaaaggctgaaagattacagcgcttataacgtcaaagccatttttgacatatggccgatgcagaaaaaagttcttcaggaaaaccggcaggaggagctttttaatgacatagagcttcctcttataaccgtacttgccagtatggaataccacggtttcaaagttgacgccgcaaaacttcacgaatacggcgaagttcttctgtcacgcataaaagacctggaaaaggtaatttacatgctggccggtgaagaattcaacatcaattcaacgaagcagcttggtaccatattattcgaaaaactgaagcttcccgttgtaaaaagtacaaagaccggatactccaccgacgtcgaggttcttgaagagctttattacaagcatgatataataccatgcataatagaataccgccagcttacaaaactttacaccacctacgccgaaggtcttgaaaaagtgataaatcctgtaaccggtaaaattcattcaagttttaaccagacggttacggctacaggccgcatcagcagtaccgaaccaaatttacagaatatcccagtcagacacgaaatgggaagggaaatacggaaagcttttattccgtcgtcggaaaacgctgtttttgttgatgccgattattcacagatagagcttcgcgtgcttgcccatataacaggcgatgaagccctgataaatgctttcgttaagggggaagatattcatacggccacggcgtcgctggtatttgacgtagctcccgaagatgtgacgccggaactgcgcagaaaggcaaaagccgtaaatttcggcatagtgtacgggatcagtgattacgggctggcacgggatttgggaattacccggaaggaagcaaagcggtatatagacgactattttgccaaataccccaaagtaaaaacctatgtggatgaaattgtgcgggtcggccaggaacaggggtatgtggaaactctgttccacagaagaagataccttcccgagcttgcatctaaacattttcaccagcgttctttcggaaaaagggttgcaatgaatacgcccatacagggcactgcagccgatattattaaaattgcgatggtgaaggtatacaaggctttgaaagaatccggccttaaatccaggcttatcctccaggtccatgacgaacttgttattgagacttttgaagacgaactggagactgtcaaggaacttgtcaaaaagtgcatggaagaggccgttgaattgagtgtgccgcttgttgtcgacgtttcaatcgggaaaaactggtatgaagcctcctgatatggatcc

SEQ ID NO: 300 - DNA, 2772 bp, Artificial Sequence
  Description of Artificial Sequence: Synthetic Clostridium stercorarium DNA Polymerase N824I
atgaaatacctgctgccgaccgctgctgctggtctgctgctcctcgctgcccagccggcgatggccatggatccaaaaataatccttatagacggaaacagtattttaaaccgcggtttttatgccctgtcggggcgatccatgctgactacgtccacaggtctgtataccaatgcggttttcgcttttgtaaatatattgaacaaatatatcgaagaggaaaaccctgattatattgccgttgctttcgatcttagggcaaaaactttccggcacggtctatatgagggatacaaagcgcagcggaaaggcatgcccgatgaacttgcaatgcagatacccctcgcgaaggaagtactgagggcgatgaatattgccataatagagcatgaaggttatgaagccgacgatataatcggcagcctttcgttaaaggccgaaaaagagaattttgacgtaataatccttacgggggacagggattctttccagctgatcagcgacagggtgaaagttatcctgccttcgacgaaagccggaaaaacagagaccaacgtatatgataaacaggccatcattgacaaatacggagttttaccccatcagcttattgacgttaaaggcttaatgggagattcgtcagataatatacccggcgttccgggagtgggtgagaaaacggcgttaagccttatttcagcctacggtacactggaaggtgtttacgagcatattgatgaaataaaacagcctaagctgaaagcatcgctgattgaatataaggatcaggcgtttttaagccgtaagctgggtactattgtaagaaatctggagctgtgtgcttcgctggaggatctgaaaagaaaagaaataaaccgcaaagagcttttgaatgttttcagaaaactcgaatttgaaagtatcatatcaaaaatgaatcttgcttccgctgaggtgacagaattacctcccgcgccggaagagcttaaaataacccatatttcagcggcagaggatcttaagaaatggattgcttacctgcttaaccagaaaaacatttccgtccttcaactgattgaccgggaggattcatacagttcccgtctttcagggctggctttgtgcaccggggatgaggttttttatatcgagaccgggactgcactccccgagaatttgattgcaacagagctgaaagaactgtggcagaatgaaaatattcacaaaatcggacacaatataaaagaatttataacctggctgctgaaacacgatgttgaactgaacggcctttatttcgacactatgattgccgaatacctgatagattccataagaaacggctatcctatagcaagcctttctcacaaatacctgaatcgcagcgttccgtcgctggacgaacttttgggcaagggaaagggagcaaaaaagtactctgaaattccgcccgaaaggctgaaagattacagcgcttataacgtcaaagccatttttgacatatggccgatgcagaaaaaagttcttcaggaaaaccggcaggaggagctttttaatgacatagagcttcctcttataaccgtacttgccagtatggaataccacggtttcaaagttgacgccgcaaaacttcacgaatacggcgaagttcttctgtcacgcataaaagacctggaaaaggtaatttacatgctggccggtgaagaattcaacatcaattcaacgaagcagcttggtaccatattattcgaaaaactgaagcttcccgttgtaaaaagtacaaagaccggatactccaccgacgtcgaggttcttgaagagctttattacaagcatgatataataccatgcataatagaataccgccagcttacaaaactttacaccacctacgccgaaggtcttgaaaaagtgataaatcctgtaaccggtaaaattcattcaagttttaaccagacggttacggctacaggccgcatcagcagtaccgaaccaaatttacagaatatcccagtcagacacgaaatgggaagggaaatacggaaagcttttattccgtcgtcggaaaacgctgtttttgttgatgccgattattcacagatagagcttcgcgtgcttgcccatataacaggcgatgaagccctgataaatgctttcgttaagggggaagatattcatacggccacggcgtcgctggtatttgacgtagctcccgaagatgtgacgccggaactgcgcagaaaggcaaaagccgtaaatttcggcatagtgtacgggatcagtgattacgggctggcacgggatttgggaattacccggaaggaagcaaagcggtatatagacgactattttgccaaataccccaaagtaaaaacctatgtggatgaaattgtgcgggtcggccaggaacaggggtatgtggaaactctgttccacagaagaagataccttcccgagcttgcatctaaaatttttcaccagcgttctttcggaaaaagggttgcaatgaatacgcccatacagggcactgcagccgatattattaaaattgcgatggtgaaggtatacaaggctttgaaagaatccggccttaaatccaggcttatcctccaggtccatgacgaacttgttattgagacttttgaagacgaactggagactgtcaaggaacttgtcaaaaagtgcatggaagaggccgttgaattgagtgtgccgcttgttgtcgacgtttcaatcgggaaaaactggtatgaagcctcctgatatggatcc

SEQ ID NO: 301 - DNA, 2772 bp, Artificial Sequence
  Description of Artificial Sequence: Synthetic Clostridium stercorarium DNA Polymerase N824L
atgaaatacctgctgccgaccgctgctgctggtctgctgctcctcgctgcccagccggcgatggccatggatccaaaaataatccttatagacggaaacagtattttaaaccgcggtttttatgccctgtcggggcgatccatgctgactacgtccacaggtctgtataccaatgcggttttcgcttttgtaaatatattgaacaaatatatcgaagaggaaaaccctgattatattgccgttgctttcgatcttagggcaaaaactttccggcacggtctatatgagggatacaaagcgcagcggaaaggcatgcccgatgaacttgcaatgcagatacccctcgcgaaggaagtactgagggcgatgaatattgccataatagagcatgaaggttatgaagccgacgatataatcggcagcctttcgttaaaggccgaaaaagagaattttgacgtaataatccttacgggggacagggattctttccagctgatcagcgacagggtgaaagttatcctgccttcgacgaaagccggaaaaacagagaccaacgtatatgataaacaggccatcattgacaaatacggagttttaccccatcagcttattgacgttaaaggcttaatgggagattcgtcagataatatacccggcgttccgggagtgggtgagaaaacggcgttaagccttatttcagcctacggtacactggaaggtgtttacgagcatattgatgaaataaaacagcctaagctgaaagcatcgctgattgaatataaggatcaggcgtttttaagccgtaagctgggtactattgtaagaaatctggagctgtgtgcttcgctggaggatctgaaaagaaaagaaataaaccgcaaagagcttttgaatgttttcagaaaactcgaatttgaaagtatcatatcaaaaatgaatcttgcttccgctgaggtgacagaattacctcccgcgccggaagagcttaaaataacccatatttcagcggcagaggatcttaagaaatggattgcttacctgcttaaccagaaaaacatttccgtccttcaactgattgaccgggaggattcatacagttcccgtctttcagggctggctttgtgcaccggggatgaggttttttatatcgagaccgggactgcactccccgagaatttgattgcaacagagctgaaagaactgtggcagaatgaaaatattcacaaaatcggacacaatataaaagaatttataacctggctgctgaaacacgatgttgaactgaacggcctttatttcgacactatgattgccgaatacctgatagattccataagaaacggctatcctatagcaagcctttctcacaaatacctgaatcgcagcgttccgtcgctggacgaacttttgggcaagggaaagggagcaaaaaagtactctgaaattccgcccgaaaggctgaaagattacagcgcttataacgtcaaagccatttttgacatatggccgatgcagaaaaaagttcttcaggaaaaccggcaggaggagctttttaatgacatagagcttcctcttataaccgtacttgccagtatggaataccacggtttcaaagttgacgccgcaaaacttcacgaatacggcgaagttcttctgtcacgcataaaagacctggaaaaggtaatttacatgctggccggtgaagaattcaacatcaattcaacgaagcagcttggtaccatattattcgaaaaactgaagcttcccgttgtaaaaagtacaaagaccggatactccaccgacgtcgaggttcttgaagagctttattacaagcatgatataataccatgcataatagaataccgccagcttacaaaactttacaccacctacgccgaaggtcttgaaaaagtgataaatcctgtaaccggtaaaattcattcaagttttaaccagacggttacggctacaggccgcatcagcagtaccgaaccaaatttacagaatatcccagtcagacacgaaatgggaagggaaatacggaaagcttttattccgtcgtcggaaaacgctgtttttgttgatgccgattattcacagatagagcttcgcgtgcttgcccatataacaggcgatgaagccctgataaatgctttcgttaagggggaagatattcatacggccacggcgtcgctggtatttgacgtagctcccgaagatgtgacgccggaactgcgcagaaaggcaaaagccgtaaatttcggcatagtgtacgggatcagtgattacgggctggcacgggatttgggaattacccggaaggaagcaaagcggtatatagacgactattttgccaaataccccaaagtaaaaacctatgtggatgaaattgtgcgggtcggccaggaacaggggtatgtggaaactctgttccacagaagaagataccttcccgagcttgcatctaaactttttcaccagcgttctttcggaaaaagggttgcaatgaatacgcccatacagggcactgcagccgatattattaaaattgcgatggtgaaggtatacaaggctttgaaagaatccggccttaaatccaggcttatcctccaggtccatgacgaacttgttattgagacttttgaagacgaactggagactgtcaaggaacttgtcaaaaagtgcatggaagaggccgttgaattgagtgtgccgcttgttgtcgacgtttcaatcgggaaaaactggtatgaagcctcctgatatggatcc

SEQ ID NO: 302 - DNA, 2772 bp, Artificial Sequence
  Description of Artificial Sequence: Synthetic Clostridium stercorarium DNA Polymerase N824K
atgaaatacctgctgccgaccgctgctgctggtctgctgctcctcgctgcccagccggcgatggccatggatccaaaaataatccttatagacggaaacagtattttaaaccgcggtttttatgccctgtcggggcgatccatgctgactacgtccacaggtctgtataccaatgcggttttcgcttttgtaaatatattgaacaaatatatcgaagaggaaaaccctgattatattgccgttgctttcgatcttagggcaaaaactttccggcacggtctatatgagggatacaaagcgcagcggaaaggcatgcccgatgaacttgcaatgcagatacccctcgcgaaggaagtactgagggcgatgaatattgccataatagagcatgaaggttatgaagccgacgatataatcggcagcctttcgttaaaggccgaaaaagagaattttgacgtaataatccttacgggggacagggattctttccagctgatcagcgacagggtgaaagttatcctgccttcgacgaaagccggaaaaacagagaccaacgtatatgataaacaggccatcattgacaaatacggagttttaccccatcagcttattgacgttaaaggcttaatgggagattcgtcagataatatacccggcgttccgggagtgggtgagaaaacggcgttaagccttatttcagcctacggtacactggaaggtgtttacgagcatattgatgaaataaaacagcctaagctgaaagcatcgctgattgaatataaggatcaggcgtttttaagccgtaagctgggtactattgtaagaaatctggagctgtgtgcttcgctggaggatctgaaaagaaaagaaataaaccgcaaagagcttttgaatgttttcagaaaactcgaatttgaaagtatcatatcaaaaatgaatcttgcttccgctgaggtgacagaattacctcccgcgccggaagagcttaaaataacccatatttcagcggcagaggatcttaagaaatggattgcttacctgcttaaccagaaaaacatttccgtccttcaactgattgaccgggaggattcatacagttcccgtctttcagggctggctttgtgcaccggggatgaggttttttatatcgagaccgggactgcactccccgagaatttgattgcaacagagctgaaagaactgtggcagaatgaaaatattcacaaaatcggacacaatataaaagaatttataacctggctgctgaaacacgatgttgaactgaacggcctttatttcgacactatgattgccgaatacctgatagattccataagaaacggctatcctatagcaagcctttctcacaaatacctgaatcgcagcgttccgtcgctggacgaacttttgggcaagggaaagggagcaaaaaagtactctgaaattccgcccgaaaggctgaaagattacagcgcttataacgtcaaagccatttttgacatatggccgatgcagaaaaaagttcttcaggaaaaccggcaggaggagctttttaatgacatagagcttcctcttataaccgtacttgccagtatggaataccacggtttcaaagttgacgccgcaaaacttcacgaatacggcgaagttcttctgtcacgcataaaagacctggaaaaggtaatttacatgctggccggtgaagaattcaacatcaattcaacgaagcagcttggtaccatattattcgaaaaactgaagcttcccgttgtaaaaagtacaaagaccggatactccaccgacgtcgaggttcttgaagagctttattacaagcatgatataataccatgcataatagaataccgccagcttacaaaactttacaccacctacgccgaaggtcttgaaaaagtgataaatcctgtaaccggtaaaattcattcaagttttaaccagacggttacggctacaggccgcatcagcagtaccgaaccaaatttacagaatatcccagtcagacacgaaatgggaagggaaatacggaaagcttttattccgtcgtcggaaaacgctgtttttgttgatgccgattattcacagatagagcttcgcgtgcttgcccatataacaggcgatgaagccctgataaatgctttcgttaagggggaagatattcatacggccacggcgtcgctggtatttgacgtagctcccgaagatgtgacgccggaactgcgcagaaaggcaaaagccgtaaatttcggcatagtgtacgggatcagtgattacgggctggcacgggatttgggaattacccggaaggaagcaaagcggtatatagacgactattttgccaaataccccaaagtaaaaacctatgtggatgaaattgtgcgggtcggccaggaacaggggtatgtggaaactctgttccacagaagaagataccttcccgagcttgcatctaaaaaatttcaccagcgttctttcggaaaaagggttgcaatgaatacgcccatacagggcactgcagccgatattattaaaattgcgatggtgaaggtatacaaggctttgaaagaatccggccttaaatccaggcttatcctccaggtccatgacgaacttgttattgagacttttgaagacgaactggagactgtcaaggaacttgtcaaaaagtgcatggaagaggccgttgaattgagtgtgccgcttgttgtcgacgtttcaatcgggaaaaactggtatgaagcctcctgatatggatcc

SEQ ID NO: 303 - DNA, 2772 bp, Artificial Sequence
  Description of Artificial Sequence: Synthetic Clostridium stercorarium DNA Polymerase N824M
atgaaatacctgctgccgaccgctgctgctggtctgctgctcctcgctgcccagccggcgatggccatggatccaaaaataatccttatagacggaaacagtattttaaaccgcggtttttatgccctgtcggggcgatccatgctgactacgtccacaggtctgtataccaatgcggttttcgcttttgtaaatatattgaacaaatatatcgaagaggaaaaccctgattatattgccgttgctttcgatcttagggcaaaaactttccggcacggtctatatgagggatacaaagcgcagcggaaaggcatgcccgatgaacttgcaatgcagatacccctcgcgaaggaagtactgagggcgatgaatattgccataatagagcatgaaggttatgaagccgacgatataatcggcagcctttcgttaaaggccgaaaaagagaattttgacgtaataatccttacgggggacagggattctttccagctgatcagcgacagggtgaaagttatcctgccttcgacgaaagccggaaaaacagagaccaacgtatatgataaacaggccatcattgacaaatacggagttttaccccatcagcttattgacgttaaaggcttaatgggagattcgtcagataatatacccggcgttccgggagtgggtgagaaaacggcgttaagccttatttcagcctacggtacactggaaggtgtttacgagcatattgatgaaataaaacagcctaagctgaaagcatcgctgattgaatataaggatcaggcgtttttaagccgtaagctgggtactattgtaagaaatctggagctgtgtgcttcgctggaggatctgaaaagaaaagaaataaaccgcaaagagcttttgaatgttttcagaaaactcgaatttgaaagtatcatatcaaaaatgaatcttgcttccgctgaggtgacagaattacctcccgcgccggaagagcttaaaataacccatatttcagcggcagaggatcttaagaaatggattgcttacctgcttaaccagaaaaacatttccgtccttcaactgattgaccgggaggattcatacagttcccgtctttcagggctggctttgtgcaccggggatgaggttttttatatcgagaccgggactgcactccccgagaatttgattgcaacagagctgaaagaactgtggcagaatgaaaatattcacaaaatcggacacaatataaaagaatttataacctggctgctgaaacacgatgttgaactgaacggcctttatttcgacactatgattgccgaatacctgatagattccataagaaacggctatcctatagcaagcctttctcacaaatacctgaatcgcagcgttccgtcgctggacgaacttttgggcaagggaaagggagcaaaaaagtactctgaaattccgcccgaaaggctgaaagattacagcgcttataacgtcaaagccatttttgacatatggccgatgcagaaaaaagttcttcaggaaaaccggcaggaggagctttttaatgacatagagcttcctcttataaccgtacttgccagtatggaataccacggtttcaaagttgacgccgcaaaacttcacgaatacggcgaagttcttctgtcacgcataaaagacctggaaaaggtaatttacatgctggccggtgaagaattcaacatcaattcaacgaagcagcttggtaccatattattcgaaaaactgaagcttcccgttgtaaaaagtacaaagaccggatactccaccgacgtcgaggttcttgaagagctttattacaagcatgatataataccatgcataatagaataccgccagcttacaaaactttacaccacctacgccgaaggtcttgaaaaagtgataaatcctgtaaccggtaaaattcattcaagttttaaccagacggttacggctacaggccgcatcagcagtaccgaaccaaatttacagaatatcccagtcagacacgaaatgggaagggaaatacggaaagcttttattccgtcgtcggaaaacgctgtttttgttgatgccgattattcacagatagagcttcgcgtgcttgcccatataacaggcgatgaagccctgataaatgctttcgttaagggggaagatattcatacggccacggcgtcgctggtatttgacgtagctcccgaagatgtgacgccggaactgcgcagaaaggcaaaagccgtaaatttcggcatagtgtacgggatcagtgattacgggctggcacgggatttgggaattacccggaaggaagcaaagcggtatatagacgactattttgccaaataccccaaagtaaaaacctatgtggatgaaattgtgcgggtcggccaggaacaggggtatgtggaaactctgttccacagaagaagataccttcccgagcttgcatctaaaatgtttcaccagcgttctttcggaaaaagggttgcaatgaatacgcccatacagggcactgcagccgatattattaaaattgcgatggtgaaggtatacaaggctttgaaagaatccggccttaaatccaggcttatcctccaggtccatgacgaacttgttattgagacttttgaagacgaactggagactgtcaaggaacttgtcaaaaagtgcatggaagaggccgttgaattgagtgtgccgcttgttgtcgacgtttcaatcgggaaaaactggtatgaagcctcctgatatggatcc

SEQ ID NO: 304 - DNA, 2772 bp, Artificial Sequence
  Description of Artificial Sequence: Synthetic Clostridium stercorarium DNA Polymerase N824F
atgaaatacctgctgccgaccgctgctgctggtctgctgctcctcgctgcccagccggcgatggccatggatccaaaaataatccttatagacggaaacagtattttaaaccgcggtttttatgccctgtcggggcgatccatgctgactacgtccacaggtctgtataccaatgcggttttcgcttttgtaaatatattgaacaaatatatcgaagaggaaaaccctgattatattgccgttgctttcgatcttagggcaaaaactttccggcacggtctatatgagggatacaaagcgcagcggaaaggcatgcccgatgaacttgcaatgcagatacccctcgcgaaggaagtactgagggcgatgaatattgccataatagagcatgaaggttatgaagccgacgatataatcggcagcctttcgttaaaggccgaaaaagagaattttgacgtaataatccttacgggggacagggattctttccagctgatcagcgacagggtgaaagttatcctgccttcgacgaaagccggaaaaacagagaccaacgtatatgataaacaggccatcattgacaaatacggagttttaccccatcagcttattgacgttaaaggcttaatgggagattcgtcagataatatacccggcgttccgggagtgggtgagaaaacggcgttaagccttatttcagcctacggtacactggaaggtgtttacgagcatattgatgaaataaaacagcctaagctgaaagcatcgctgattgaatataaggatcaggcgtttttaagccgtaagctgggtactattgtaagaaatctggagctgtgtgcttcgctggaggatctgaaaagaaaagaaataaaccgcaaagagcttttgaatgttttcagaaaactcgaatttgaaagtatcatatcaaaaatgaatcttgcttccgctgaggtgacagaattacctcccgcgccggaagagcttaaaataacccatatttcagcggcagaggatcttaagaaatggattgcttacctgcttaaccagaaaaacatttccgtccttcaactgattgaccgggaggattcatacagttcccgtctttcagggctggctttgtgcaccggggatgaggttttttatatcgagaccgggactgcactccccgagaatttgattgcaacagagctgaaagaactgtggcagaatgaaaatattcacaaaatcggacacaatataaaagaatttataacctggctgctgaaacacgatgttgaactgaacggcctttatttcgacactatgattgccgaatacctgatagattccataagaaacggctatcctatagcaagcctttctcacaaatacctgaatcgcagcgttccgtcgctggacgaacttttgggcaagggaaagggagcaaaaaagtactctgaaattccgcccgaaaggctgaaagattacagcgcttataacgtcaaagccatttttgacatatggccgatgcagaaaaaagttcttcaggaaaaccggcaggaggagctttttaatgacatagagcttcctcttataaccgtacttgccagtatggaataccacggtttcaaagttgacgccgcaaaacttcacgaatacggcgaagttcttctgtcacgcataaaagacctggaaaaggtaatttacatgctggccggtgaagaattcaacatcaattcaacgaagcagcttggtaccatattattcgaaaaactgaagcttcccgttgtaaaaagtacaaagaccggatactccaccgacgtcgaggttcttgaagagctttattacaagcatgatataataccatgcataatagaataccgccagcttacaaaactttacaccacctacgccgaaggtcttgaaaaagtgataaatcctgtaaccggtaaaattcattcaagttttaaccagacggttacggctacaggccgcatcagcagtaccgaaccaaatttacagaatatcccagtcagacacgaaatgggaagggaaatacggaaagcttttattccgtcgtcggaaaacgctgtttttgttgatgccgattattcacagatagagcttcgcgtgcttgcccatataacaggcgatgaagccctgataaatgctttcgttaagggggaagatattcatacggccacggcgtcgctggtatttgacgtagctcccgaagatgtgacgccggaactgcgcagaaaggcaaaagccgtaaatttcggcatagtgtacgggatcagtgattacgggctggcacgggatttgggaattacccggaaggaagcaaagcggtatatagacgactattttgccaaataccccaaagtaaaaacctatgtggatgaaattgtgcgggtcggccaggaacaggggtatgtggaaactctgttccacagaagaagataccttcccgagcttgcatctaaattttttcaccagcgttctttcggaaaaagggttgcaatgaatacgcccatacagggcactgcagccgatattattaaaattgcgatggtgaaggtatacaaggctttgaaagaatccggccttaaatccaggcttatcctccaggtccatgacgaacttgttattgagacttttgaagacgaactggagactgtcaaggaacttgtcaaaaagtgcatggaagaggccgttgaattgagtgtgccgcttgttgtcgacgtttcaatcgggaaaaactggtatgaagcctcctgatatggatcc

SEQ ID NO: 305 - DNA, 2772 bp, Artificial Sequence
  Description of Artificial Sequence: Synthetic Clostridium stercorarium DNA Polymerase N824P
atgaaatacctgctgccgaccgctgctgctggtctgctgctcctcgctgcccagccggcgatggccatggatccaaaaataatccttatagacggaaacagtattttaaaccgcggtttttatgccctgtcggggcgatccatgctgactacgtccacaggtctgtataccaatgcggttttcgcttttgtaaatatattgaacaaatatatcgaagaggaaaaccctgattatattgccgttgctttcgatcttagggcaaaaactttccggcacggtctatatgagggatacaaagcgcagcggaaaggcatgcccgatgaacttgcaatgcagatacccctcgcgaaggaagtactgagggcgatgaatattgccataatagagcatgaaggttatgaagccgacgatataatcggcagcctttcgttaaaggccgaaaaagagaattttgacgtaataatccttacgggggacagggattctttccagctgatcagcgacagggtgaaagttatcctgccttcgacgaaagccggaaaaacagagaccaacgtatatgataaacaggccatcattgacaaatacggagttttaccccatcagcttattgacgttaaaggcttaatgggagattcgtcagataatatacccggcgttccgggagtgggtgagaaaacggcgttaagccttatttcagcctacggtacactggaaggtgtttacgagcatattgatgaaataaaacagcctaagctgaaagcatcgctgattgaatataaggatcaggcgtttttaagccgtaagctgggtactattgtaagaaatctggagctgtgtgcttcgctggaggatctgaaaagaaaagaaataaaccgcaaagagcttttgaatgttttcagaaaactcgaatttgaaagtatcatatcaaaaatgaatcttgcttccgctgaggtgacagaattacctcccgcgccggaagagcttaaaataacccatatttcagcggcagaggatcttaagaaatggattgcttacctgcttaaccagaaaaacatttccgtccttcaactgattgaccgggaggattcatacagttcccgtctttcagggctggctttgtgcaccggggatgaggttttttatatcgagaccgggactgcactccccgagaatttgattgcaacagagctgaaagaactgtggcagaatgaaaatattcacaaaatcggacacaatataaaagaatttataacctggctgctgaaacacgatgttgaactgaacggcctttatttcgacactatgattgccgaatacctgatagattccataagaaacggctatcctatagcaagcctttctcacaaatacctgaatcgcagcgttccgtcgctggacgaacttttgggcaagggaaagggagcaaaaaagtactctgaaattccgcccgaaaggctgaaagattacagcgcttataacgtcaaagccatttttgacatatggccgatgcagaaaaaagttcttcaggaaaaccggcaggaggagctttttaatgacatagagcttcctcttataaccgtacttgccagtatggaataccacggtttcaaagttgacgccgcaaaacttcacgaatacggcgaagttcttctgtcacgcataaaagacctggaaaaggtaatttacatgctggccggtgaagaattcaacatcaattcaacgaagcagcttggtaccatattattcgaaaaactgaagcttcccgttgtaaaaagtacaaagaccggatactccaccgacgtcgaggttcttgaagagctttattacaagcatgatataataccatgcataatagaataccgccagcttacaaaactttacaccacctacgccgaaggtcttgaaaaagtgataaatcctgtaaccggtaaaattcattcaagttttaaccagacggttacggctacaggccgcatcagcagtaccgaaccaaatttacagaatatcccagtcagacacgaaatgggaagggaaatacggaaagcttttattccgtcgtcggaaaacgctgtttttgttgatgccgattattcacagatagagcttcgcgtgcttgcccatataacaggcgatgaagccctgataaatgctttcgttaagggggaagatattcatacggccacggcgtcgctggtatttgacgtagctcccgaagatgtgacgccggaactgcgcagaaaggcaaaagccgtaaatttcggcatagtgtacgggatcagtgattacgggctggcacgggatttgggaattacccggaaggaagcaaagcggtatatagacgactattttgccaaataccccaaagtaaaaacctatgtggatgaaattgtgcgggtcggccaggaacaggggtatgtggaaactctgttccacagaagaagataccttcccgagcttgcatctaaaccttttcaccagcgttctttcggaaaaagggttgcaatgaatacgcccatacagggcactgcagccgatattattaaaattgcgatggtgaaggtatacaaggctttgaaagaatccggccttaaatccaggcttatcctccaggtccatgacgaacttgttattgagacttttgaagacgaactggagactgtcaaggaacttgtcaaaaagtgcatggaagaggccgttgaattgagtgtgccgcttgttgtcgacgtttcaatcgggaaaaactggtatgaagcctcctgatatggatcc

SEQ ID NO: 306 - DNA, 2772 bp, Artificial Sequence
  Description of Artificial Sequence: Synthetic Clostridium stercorarium DNA Polymerase N824S
atgaaatacctgctgccgaccgctgctgctggtctgctgctcctcgctgcccagccggcgatggccatggatccaaaaataatccttatagacggaaacagtattttaaaccgcggtttttatgccctgtcggggcgatccatgctgactacgtccacaggtctgtataccaatgcggttttcgcttttgtaaatatattgaacaaatatatcgaagaggaaaaccctgattatattgccgttgctttcgatcttagggcaaaaactttccggcacggtctatatgagggatacaaagcgcagcggaaaggcatgcccgatgaacttgcaatgcagatacccctcgcgaaggaagtactgagggcgatgaatattgccataatagagcatgaaggttatgaagccgacgatataatcggcagcctttcgttaaaggccgaaaaagagaattttgacgtaataatccttacgggggacagggattctttccagctgatcagcgacagggtgaaagttatcctgccttcgacgaaagccggaaaaacagagaccaacgtatatgataaacaggccatcattgacaaatacggagttttaccccatcagcttattgacgttaaaggcttaatgggagattcgtcagataatatacccggcgttccgggagtgggtgagaaaacggcgttaagccttatttcagcctacggtacactggaaggtgtttacgagcatattgatgaaataaaacagcctaagctgaaagcatcgctgattgaatataaggatcaggcgtttttaagccgtaagctgggtactattgtaagaaatctggagctgtgtgcttcgctggaggatctgaaaagaaaagaaataaaccgcaaagagcttttgaatgttttcagaaaactcgaatttgaaagtatcatatcaaaaatgaatcttgcttccgctgaggtgacagaattacctcccgcgccggaagagcttaaaataacccatatttcagcggcagaggatcttaagaaatggattgcttacctgcttaaccagaaaaacatttccgtccttcaactgattgaccgggaggattcatacagttcccgtctttcagggctggctttgtgcaccggggatgaggttttttatatcgagaccgggactgcactccccgagaatttgattgcaacagagctgaaagaactgtggcagaatgaaaatattcacaaaatcggacacaatataaaagaatttataacctggctgctgaaacacgatgttgaactgaacggcctttatttcgacactatgattgccgaatacctgatagattccataagaaacggctatcctatagcaagcctttctcacaaatacctgaatcgcagcgttccgtcgctggacgaacttttgggcaagggaaagggagcaaaaaagtactctgaaattccgcccgaaaggctgaaagattacagcgcttataacgtcaaagccatttttgacatatggccgatgcagaaaaaagttcttcaggaaaaccggcaggaggagctttttaatgacatagagcttcctcttataaccgtacttgccagtatggaataccacggtttcaaagttgacgccgcaaaacttcacgaatacggcgaagttcttctgtcacgcataaaagacctggaaaaggtaatttacatgctggccggtgaagaattcaacatcaattcaacgaagcagcttggtaccatattattcgaaaaactgaagcttcccgttgtaaaaagtacaaagaccggatactccaccgacgtcgaggttcttgaagagctttattacaagcatgatataataccatgcataatagaataccgccagcttacaaaactttacaccacctacgccgaaggtcttgaaaaagtgataaatcctgtaaccggtaaaattcattcaagttttaaccagacggttacggctacaggccgcatcagcagtaccgaaccaaatttacagaatatcccagtcagacacgaaatgggaagggaaatacggaaagcttttattccgtcgtcggaaaacgctgtttttgttgatgccgattattcacagatagagcttcgcgtgcttgcccatataacaggcgatgaagccctgataaatgctttcgttaagggggaagatattcatacggccacggcgtcgctggtatttgacgtagctcccgaagatgtgacgccggaactgcgcagaaaggcaaaagccgtaaatttcggcatagtgtacgggatcagtgattacgggctggcacgggatttgggaattacccggaaggaagcaaagcggtatatagacgactattttgccaaataccccaaagtaaaaacctatgtggatgaaattgtgcgggtcggccaggaacaggggtatgtggaaactctgttccacagaagaagataccttcccgagcttgcatctaaatcttttcaccagcgttctttcggaaaaagggttgcaatgaatacgcccatacagggcactgcagccgatattattaaaattgcgatggtgaaggtatacaaggctttgaaagaatccggccttaaatccaggcttatcctccaggtccatgacgaacttgttattgagacttttgaagacgaactggagactgtcaaggaacttgtcaaaaagtgcatggaagaggccgttgaattgagtgtgccgcttgttgtcgacgtttcaatcgggaaaaactggtatgaagcctcctgatatggatcc

SEQ ID NO: 307 - DNA, 2772 bp, Artificial Sequence
  Description of Artificial Sequence: Synthetic Clostridium stercorarium DNA Polymerase N824T
atgaaatacctgctgccgaccgctgctgctggtctgctgctcctcgctgcccagccggcgatggccatggatccaaaaataatccttatagacggaaacagtattttaaaccgcggtttttatgccctgtcggggcgatccatgctgactacgtccacaggtctgtataccaatgcggttttcgcttttgtaaatatattgaacaaatatatcgaagaggaaaaccctgattatattgccgttgctttcgatcttagggcaaaaactttccggcacggtctatatgagggatacaaagcgcagcggaaaggcatgcccgatgaacttgcaatgcagatacccctcgcgaaggaagtactgagggcgatgaatattgccataatagagcatgaaggttatgaagccgacgatataatcggcagcctttcgttaaaggccgaaaaagagaattttgacgtaataatccttacgggggacagggattctttccagctgatcagcgacagggtgaaagttatcctgccttcgacgaaagccggaaaaacagagaccaacgtatatgataaacaggccatcattgacaaatacggagttttaccccatcagcttattgacgttaaaggcttaatgggagattcgtcagataatatacccggcgttccgggagtgggtgagaaaacggcgttaagccttatttcagcctacggtacactggaaggtgtttacgagcatattgatgaaataaaacagcctaagctgaaagcatcgctgattgaatataaggatcaggcgtttttaagccgtaagctgggtactattgtaagaaatctggagctgtgtgcttcgctggaggatctgaaaagaaaagaaataaaccgcaaagagcttttgaatgttttcagaaaactcgaatttgaaagtatcatatcaaaaatgaatcttgcttccgctgaggtgacagaattacctcccgcgccggaagagcttaaaataacccatatttcagcggcagaggatcttaagaaatggattgcttacctgcttaaccagaaaaacatttccgtccttcaactgattgaccgggaggattcatacagttcccgtctttcagggctggctttgtgcaccggggatgaggttttttatatcgagaccgggactgcactccccgagaatttgattgcaacagagctgaaagaactgtggcagaatgaaaatattcacaaaatcggacacaatataaaagaatttataacctggctgctgaaacacgatgttgaactgaacggcctttatttcgacactatgattgccgaatacctgatagattccataagaaacggctatcctatagcaagcctttctcacaaatacctgaatcgcagcgttccgtcgctggacgaacttttgggcaagggaaagggagcaaaaaagtactctgaaattccgcccgaaaggctgaaagattacagcgcttataacgtcaaagccatttttgacatatggccgatgcagaaaaaagttcttcaggaaaaccggcaggaggagctttttaatgacatagagcttcctcttataaccgtacttgccagtatggaataccacggtttcaaagttgacgccgcaaaacttcacgaatacggcgaagttcttctgtcacgcataaaagacctggaaaaggtaatttacatgctggccggtgaagaattcaacatcaattcaacgaagcagcttggtaccatattattcgaaaaactgaagcttcccgttgtaaaaagtacaaagaccggatactccaccgacgtcgaggttcttgaagagctttattacaagcatgatataataccatgcataatagaataccgccagcttacaaaactttacaccacctacgccgaaggtcttgaaaaagtgataaatcctgtaaccggtaaaattcattcaagttttaaccagacggttacggctacaggccgcatcagcagtaccgaaccaaatttacagaatatcccagtcagacacgaaatgggaagggaaatacggaaagcttttattccgtcgtcggaaaacgctgtttttgttgatgccgattattcacagatagagcttcgcgtgcttgcccatataacaggcgatgaagccctgataaatgctttcgttaagggggaagatattcatacggccacggcgtcgctggtatttgacgtagctcccgaagatgtgacgccggaactgcgcagaaaggcaaaagccgtaaatttcggcatagtgtacgggatcagtgattacgggctggcacgggatttgggaattacccggaaggaagcaaagcggtatatagacgactattttgccaaataccccaaagtaaaaacctatgtggatgaaattgtgcgggtcggccaggaacaggggtatgtggaaactctgttccacagaagaagataccttcccgagcttgcatctaaaacttttcaccagcgttctttcggaaaaagggttgcaatgaatacgcccatacagggcactgcagccgatattattaaaattgcgatggtgaaggtatacaaggctttgaaagaatccggccttaaatccaggcttatcctccaggtccatgacgaacttgttattgagacttttgaagacgaactggagactgtcaaggaacttgtcaaaaagtgcatggaagaggccgttgaattgagtgtgccgcttgttgtcgacgtttcaatcgggaaaaactggtatgaagcctcctgatatggatcc

SEQ ID NO: 308 - DNA, 2772 bp, Artificial Sequence
  Description of Artificial Sequence: Synthetic Clostridium stercorarium DNA Polymerase N824W
atgaaatacctgctgccgaccgctgctgctggtctgctgctcctcgctgcccagccggcgatggccatggatccaaaaataatccttatagacggaaacagtattttaaaccgcggtttttatgccctgtcggggcgatccatgctgactacgtccacaggtctgtataccaatgcggttttcgcttttgtaaatatattgaacaaatatatcgaagaggaaaaccctgattatattgccgttgctttcgatcttagggcaaaaactttccggcacggtctatatgagggatacaaagcgcagcggaaaggcatgcccgatgaacttgcaatgcagatacccctcgcgaaggaagtactgagggcgatgaatattgccataatagagcatgaaggttatgaagccgacgatataatcggcagcctttcgttaaaggccgaaaaagagaattttgacgtaataatccttacgggggacagggattctttccagctgatcagcgacagggtgaaagttatcctgccttcgacgaaagccggaaaaacagagaccaacgtatatgataaacaggccatcattgacaaatacggagttttaccccatcagcttattgacgttaaaggcttaatgggagattcgtcagataatatacccggcgttccgggagtgggtgagaaaacggcgttaagccttatttcagcctacggtacactggaaggtgtttacgagcatattgatgaaataaaacagcctaagctgaaagcatcgctgattgaatataaggatcaggcgtttttaagccgtaagctgggtactattgtaagaaatctggagctgtgtgcttcgctggaggatctgaaaagaaaagaaataaaccgcaaagagcttttgaatgttttcagaaaactcgaatttgaaagtatcatatcaaaaatgaatcttgcttccgctgaggtgacagaattacctcccgcgccggaagagcttaaaataacccatatttcagcggcagaggatcttaagaaatggattgcttacctgcttaaccagaaaaacatttccgtccttcaactgattgaccgggaggattcatacagttcccgtctttcagggctggctttgtgcaccggggatgaggttttttatatcgagaccgggactgcactccccgagaatttgattgcaacagagctgaaagaactgtggcagaatgaaaatattcacaaaatcggacacaatataaaagaatttataacctggctgctgaaacacgatgttgaactgaacggcctttatttcgacactatgattgccgaatacctgatagattccataagaaacggctatcctatagcaagcctttctcacaaatacctgaatcgcagcgttccgtcgctggacgaacttttgggcaagggaaagggagcaaaaaagtactctgaaattccgcccgaaaggctgaaagattacagcgcttataacgtcaaagccatttttgacatatggccgatgcagaaaaaagttcttcaggaaaaccggcaggaggagctttttaatgacatagagcttcctcttataaccgtacttgccagtatggaataccacggtttcaaagttgacgccgcaaaacttcacgaatacggcgaagttcttctgtcacgcataaaagacctggaaaaggtaatttacatgctggccggtgaagaattcaacatcaattcaacgaagcagcttggtaccatattattcgaaaaactgaagcttcccgttgtaaaaagtacaaagaccggatactccaccgacgtcgaggttcttgaagagctttattacaagcatgatataataccatgcataatagaataccgccagcttacaaaactttacaccacctacgccgaaggtcttgaaaaagtgataaatcctgtaaccggtaaaattcattcaagttttaaccagacggttacggctacaggccgcatcagcagtaccgaaccaaatttacagaatatcccagtcagacacgaaatgggaagggaaatacggaaagcttttattccgtcgtcggaaaacgctgtttttgttgatgccgattattcacagatagagcttcgcgtgcttgcccatataacaggcgatgaagccctgataaatgctttcgttaagggggaagatattcatacggccacggcgtcgctggtatttgacgtagctcccgaagatgtgacgccggaactgcgcagaaaggcaaaagccgtaaatttcggcatagtgtacgggatcagtgattacgggctggcacgggatttgggaattacccggaaggaagcaaagcggtatatagacgactattttgccaaataccccaaagtaaaaacctatgtggatgaaattgtgcgggtcggccaggaacaggggtatgtggaaactctgttccacagaagaagataccttcccgagcttgcatctaaatggtttcaccagcgttctttcggaaaaagggttgcaatgaatacgcccatacagggcactgcagccgatattattaaaattgcgatggtgaaggtatacaaggctttgaaagaatccggccttaaatccaggcttatcctccaggtccatgacgaacttgttattgagacttttgaagacgaactggagactgtcaaggaacttgtcaaaaagtgcatggaagaggccgttgaattgagtgtgccgcttgttgtcgacgtttcaatcgggaaaaactggtatgaagcctcctgatatggatcc

SEQ ID NO: 309 - DNA, 2772 bp, Artificial Sequence
  Description of Artificial Sequence: Synthetic Clostridium stercorarium DNA Polymerase N824Y
atgaaatacctgctgccgaccgctgctgctggtctgctgctcctcgctgcccagccggcgatggccatggatccaaaaataatccttatagacggaaacagtattttaaaccgcggtttttatgccctgtcggggcgatccatgctgactacgtccacaggtctgtataccaatgcggttttcgcttttgtaaatatattgaacaaatatatcgaagaggaaaaccctgattatattgccgttgctttcgatcttagggcaaaaactttccggcacggtctatatgagggatacaaagcgcagcggaaaggcatgcccgatgaacttgcaatgcagatacccctcgcgaaggaagtactgagggcgatgaatattgccataatagagcatgaaggttatgaagccgacgatataatcggcagcctttcgttaaaggccgaaaaagagaattttgacgtaataatccttacgggggacagggattctttccagctgatcagcgacagggtgaaagttatcctgccttcgacgaaagccggaaaaacagagaccaacgtatatgataaacaggccatcattgacaaatacggagttttaccccatcagcttattgacgttaaaggcttaatgggagattcgtcagataatatacccggcgttccgggagtgggtgagaaaacggcgttaagccttatttcagcctacggtacactggaaggtgtttacgagcatattgatgaaataaaacagcctaagctgaaagcatcgctgattgaatataaggatcaggcgtttttaagccgtaagctgggtactattgtaagaaatctggagctgtgtgcttcgctggaggatctgaaaagaaaagaaataaaccgcaaagagcttttgaatgttttcagaaaactcgaatttgaaagtatcatatcaaaaatgaatcttgcttccgctgaggtgacagaattacctcccgcgccggaagagcttaaaataacccatatttcagcggcagaggatcttaagaaatggattgcttacctgcttaaccagaaaaacatttccgtccttcaactgattgaccgggaggattcatacagttcccgtctttcagggctggctttgtgcaccggggatgaggttttttatatcgagaccgggactgcactccccgagaatttgattgcaacagagctgaaagaactgtggcagaatgaaaatattcacaaaatcggacacaatataaaagaatttataacctggctgctgaaacacgatgttgaactgaacggcctttatttcgacactatgattgccgaatacctgatagattccataagaaacggctatcctatagcaagcctttctcacaaatacctgaatcgcagcgttccgtcgctggacgaacttttgggcaagggaaagggagcaaaaaagtactctgaaattccgcccgaaaggctgaaagattacagcgcttataacgtcaaagccatttttgacatatggccgatgcagaaaaaagttcttcaggaaaaccggcaggaggagctttttaatgacatagagcttcctcttataaccgtacttgccagtatggaataccacggtttcaaagttgacgccgcaaaacttcacgaatacggcgaagttcttctgtcacgcataaaagacctggaaaaggtaatttacatgctggccggtgaagaattcaacatcaattcaacgaagcagcttggtaccatattattcgaaaaactgaagcttcccgttgtaaaaagtacaaagaccggatactccaccgacgtcgaggttcttgaagagctttattacaagcatgatataataccatgcataatagaataccgccagcttacaaaactttacaccacctacgccgaaggtcttgaaaaagtgataaatcctgtaaccggtaaaattcattcaagttttaaccagacggttacggctacaggccgcatcagcagtaccgaaccaaatttacagaatatcccagtcagacacgaaatgggaagggaaatacggaaagcttttattccgtcgtcggaaaacgctgtttttgttgatgccgattattcacagatagagcttcgcgtgcttgcccatataacaggcgatgaagccctgataaatgctttcgttaagggggaagatattcatacggccacggcgtcgctggtatttgacgtagctcccgaagatgtgacgccggaactgcgcagaaaggcaaaagccgtaaatttcggcatagtgtacgggatcagtgattacgggctggcacgggatttgggaattacccggaaggaagcaaagcggtatatagacgactattttgccaaataccccaaagtaaaaacctatgtggatgaaattgtgcgggtcggccaggaacaggggtatgtggaaactctgttccacagaagaagataccttcccgagcttgcatctaaatattttcaccagcgttctttcggaaaaagggttgcaatgaatacgcccatacagggcactgcagccgatattattaaaattgcgatggtgaaggtatacaaggctttgaaagaatccggccttaaatccaggcttatcctccaggtccatgacgaacttgttattgagacttttgaagacgaactggagactgtcaaggaacttgtcaaaaagtgcatggaagaggccgttgaattgagtgtgccgcttgttgtcgacgtttcaatcgggaaaaactggtatgaagcctcctgatatggatcc

SEQ ID NO: 310 - DNA, 2772 bp, Artificial Sequence
  Description of Artificial Sequence: Synthetic Clostridium stercorarium DNA Polymerase N824V
atgaaatacctgctgccgaccgctgctgctggtctgctgctcctcgctgcccagccggcgatggccatggatccaaaaataatccttatagacggaaacagtattttaaaccgcggtttttatgccctgtcggggcgatccatgctgactacgtccacaggtctgtataccaatgcggttttcgcttttgtaaatatattgaacaaatatatcgaagaggaaaaccctgattatattgccgttgctttcgatcttagggcaaaaactttccggcacggtctatatgagggatacaaagcgcagcggaaaggcatgcccgatgaacttgcaatgcagatacccctcgcgaaggaagtactgagggcgatgaatattgccataatagagcatgaaggttatgaagccgacgatataatcggcagcctttcgttaaaggccgaaaaagagaattttgacgtaataatccttacgggggacagggattctttccagctgatcagcgacagggtgaaagttatcctgccttcgacgaaagccggaaaaacagagaccaacgtatatgataaacaggccatcattgacaaatacggagttttaccccatcagcttattgacgttaaaggcttaatgggagattcgtcagataatatacccggcgttccgggagtgggtgagaaaacggcgttaagccttatttcagcctacggtacactggaaggtgtttacgagcatattgatgaaataaaacagcctaagctgaaagcatcgctgattgaatataaggatcaggcgtttttaagccgtaagctgggtactattgtaagaaatctggagctgtgtgcttcgctggaggatctgaaaagaaaagaaataaaccgcaaagagcttttgaatgttttcagaaaactcgaatttgaaagtatcatatcaaaaatgaatcttgcttccgctgaggtgacagaattacctcccgcgccggaagagcttaaaataacccatatttcagcggcagaggatcttaagaaatggattgcttacctgcttaaccagaaaaacatttccgtccttcaactgattgaccgggaggattcatacagttcccgtctttcagggctggctttgtgcaccggggatgaggttttttatatcgagaccgggactgcactccccgagaatttgattgcaacagagctgaaagaactgtggcagaatgaaaatattcacaaaatcggacacaatataaaagaatttataacctggctgctgaaacacgatgttgaactgaacggcctttatttcgacactatgattgccgaatacctgatagattccataagaaacggctatcctatagcaagcctttctcacaaatacctgaatcgcagcgttccgtcgctggacgaacttttgggcaagggaaagggagcaaaaaagtactctgaaattccgcccgaaaggctgaaagattacagcgcttataacgtcaaagccatttttgacatatggccgatgcagaaaaaagttcttcaggaaaaccggcaggaggagctttttaatgacatagagcttcctcttataaccgtacttgccagtatggaataccacggtttcaaagttgacgccgcaaaacttcacgaatacggcgaagttcttctgtcacgcataaaagacctggaaaaggtaatttacatgctggccggtgaagaattcaacatcaattcaacgaagcagcttggtaccatattattcgaaaaactgaagcttcccgttgtaaaaagtacaaagaccggatactccaccgacgtcgaggttcttgaagagctttattacaagcatgatataataccatgcataatagaataccgccagcttacaaaactttacaccacctacgccgaaggtcttgaaaaagtgataaatcctgtaaccggtaaaattcattcaagttttaaccagacggttacggctacaggccgcatcagcagtaccgaaccaaatttacagaatatcccagtcagacacgaaatgggaagggaaatacggaaagcttttattccgtcgtcggaaaacgctgtttttgttgatgccgattattcacagatagagcttcgcgtgcttgcccatataacaggcgatgaagccctgataaatgctttcgttaagggggaagatattcatacggccacggcgtcgctggtatttgacgtagctcccgaagatgtgacgccggaactgcgcagaaaggcaaaagccgtaaatttcggcatagtgtacgggatcagtgattacgggctggcacgggatttgggaattacccggaaggaagcaaagcggtatatagacgactattttgccaaataccccaaagtaaaaacctatgtggatgaaattgtgcgggtcggccaggaacaggggtatgtggaaactctgttccacagaagaagataccttcccgagcttgcatctaaagtttttcaccagcgttctttcggaaaaagggttgcaatgaatacgcccatacagggcactgcagccgatattattaaaattgcgatggtgaaggtatacaaggctttgaaagaatccggccttaaatccaggcttatcctccaggtccatgacgaacttgttattgagacttttgaagacgaactggagactgtcaaggaacttgtcaaaaagtgcatggaagaggccgttgaattgagtgtgccgcttgttgtcgacgtttcaatcgggaaaaactggtatgaagcctcctgatatggatcc

SEQ ID NO: 311 - DNA, 2772 bp, Artificial Sequence
  Description of Artificial Sequence: Synthetic Clostridium stercorarium DNA Polymerase F825A
atgaaatacctgctgccgaccgctgctgctggtctgctgctcctcgctgcccagccggcgatggccatggatccaaaaataatccttatagacggaaacagtattttaaaccgcggtttttatgccctgtcggggcgatccatgctgactacgtccacaggtctgtataccaatgcggttttcgcttttgtaaatatattgaacaaatatatcgaagaggaaaaccctgattatattgccgttgctttcgatcttagggcaaaaactttccggcacggtctatatgagggatacaaagcgcagcggaaaggcatgcccgatgaacttgcaatgcagatacccctcgcgaaggaagtactgagggcgatgaatattgccataatagagcatgaaggttatgaagccgacgatataatcggcagcctttcgttaaaggccgaaaaagagaattttgacgtaataatccttacgggggacagggattctttccagctgatcagcgacagggtgaaagttatcctgccttcgacgaaagccggaaaaacagagaccaacgtatatgataaacaggccatcattgacaaatacggagttttaccccatcagcttattgacgttaaaggcttaatgggagattcgtcagataatatacccggcgttccgggagtgggtgagaaaacggcgttaagccttatttcagcctacggtacactggaaggtgtttacgagcatattgatgaaataaaacagcctaagctgaaagcatcgctgattgaatataaggatcaggcgtttttaagccgtaagctgggtactattgtaagaaatctggagctgtgtgcttcgctggaggatctgaaaagaaaagaaataaaccgcaaagagcttttgaatgttttcagaaaactcgaatttgaaagtatcatatcaaaaatgaatcttgcttccgctgaggtgacagaattacctcccgcgccggaagagcttaaaataacccatatttcagcggcagaggatcttaagaaatggattgcttacctgcttaaccagaaaaacatttccgtccttcaactgattgaccgggaggattcatacagttcccgtctttcagggctggctttgtgcaccggggatgaggttttttatatcgagaccgggactgcactccccgagaatttgattgcaacagagctgaaagaactgtggcagaatgaaaatattcacaaaatcggacacaatataaaagaatttataacctggctgctgaaacacgatgttgaactgaacggcctttatttcgacactatgattgccgaatacctgatagattccataagaaacggctatcctatagcaagcctttctcacaaatacctgaatcgcagcgttccgtcgctggacgaacttttgggcaagggaaagggagcaaaaaagtactctgaaattccgcccgaaaggctgaaagattacagcgcttataacgtcaaagccatttttgacatatggccgatgcagaaaaaagttcttcaggaaaaccggcaggaggagctttttaatgacatagagcttcctcttataaccgtacttgccagtatggaataccacggtttcaaagttgacgccgcaaaacttcacgaatacggcgaagttcttctgtcacgcataaaagacctggaaaaggtaatttacatgctggccggtgaagaattcaacatcaattcaacgaagcagcttggtaccatattattcgaaaaactgaagcttcccgttgtaaaaagtacaaagaccggatactccaccgacgtcgaggttcttgaagagctttattacaagcatgatataataccatgcataatagaataccgccagcttacaaaactttacaccacctacgccgaaggtcttgaaaaagtgataaatcctgtaaccggtaaaattcattcaagttttaaccagacggttacggctacaggccgcatcagcagtaccgaaccaaatttacagaatatcccagtcagacacgaaatgggaagggaaatacggaaagcttttattccgtcgtcggaaaacgctgtttttgttgatgccgattattcacagatagagcttcgcgtgcttgcccatataacaggcgatgaagccctgataaatgctttcgttaagggggaagatattcatacggccacggcgtcgctggtatttgacgtagctcccgaagatgtgacgccggaactgcgcagaaaggcaaaagccgtaaatttcggcatagtgtacgggatcagtgattacgggctggcacgggatttgggaattacccggaaggaagcaaagcggtatatagacgactattttgccaaataccccaaagtaaaaacctatgtggatgaaattgtgcgggtcggccaggaacaggggtatgtggaaactctgttccacagaagaagataccttcccgagcttgcatctaaaaatgctcaccagcgttctttcggaaaaagggttgcaatgaatacgcccatacagggcactgcagccgatattattaaaattgcgatggtgaaggtatacaaggctttgaaagaatccggccttaaatccaggcttatcctccaggtccatgacgaacttgttattgagacttttgaagacgaactggagactgtcaaggaacttgtcaaaaagtgcatggaagaggccgttgaattgagtgtgccgcttgttgtcgacgtttcaatcgggaaaaactggtatgaagcctcctgatatggatcc

SEQ ID NO: 312 - DNA, 2772 bp, Artificial Sequence
  Description of Artificial Sequence: Synthetic Clostridium stercorarium DNA Polymerase F825R
atgaaatacctgctgccgaccgctgctgctggtctgctgctcctcgctgcccagccggcgatggccatggatccaaaaataatccttatagacggaaacagtattttaaaccgcggtttttatgccctgtcggggcgatccatgctgactacgtccacaggtctgtataccaatgcggttttcgcttttgtaaatatattgaacaaatatatcgaagaggaaaaccctgattatattgccgttgctttcgatcttagggcaaaaactttccggcacggtctatatgagggatacaaagcgcagcggaaaggcatgcccgatgaacttgcaatgcagatacccctcgcgaaggaagtactgagggcgatgaatattgccataatagagcatgaaggttatgaagccgacgatataatcggcagcctttcgttaaaggccgaaaaagagaattttgacgtaataatccttacgggggacagggattctttccagctgatcagcgacagggtgaaagttatcctgccttcgacgaaagccggaaaaacagagaccaacgtatatgataaacaggccatcattgacaaatacggagttttaccccatcagcttattgacgttaaaggcttaatgggagattcgtcagataatatacccggcgttccgggagtgggtgagaaaacggcgttaagccttatttcagcctacggtacactggaaggtgtttacgagcatattgatgaaataaaacagcctaagctgaaagcatcgctgattgaatataaggatcaggcgtttttaagccgtaagctgggtactattgtaagaaatctggagctgtgtgcttcgctggaggatctgaaaagaaaagaaataaaccgcaaagagcttttgaatgttttcagaaaactcgaatttgaaagtatcatatcaaaaatgaatcttgcttccgctgaggtgacagaattacctcccgcgccggaagagcttaaaataacccatatttcagcggcagaggatcttaagaaatggattgcttacctgcttaaccagaaaaacatttccgtccttcaactgattgaccgggaggattcatacagttcccgtctttcagggctggctttgtgcaccggggatgaggttttttatatcgagaccgggactgcactccccgagaatttgattgcaacagagctgaaagaactgtggcagaatgaaaatattcacaaaatcggacacaatataaaagaatttataacctggctgctgaaacacgatgttgaactgaacggcctttatttcgacactatgattgccgaatacctgatagattccataagaaacggctatcctatagcaagcctttctcacaaatacctgaatcgcagcgttccgtcgctggacgaacttttgggcaagggaaagggagcaaaaaagtactctgaaattccgcccgaaaggctgaaagattacagcgcttataacgtcaaagccatttttgacatatggccgatgcagaaaaaagttcttcaggaaaaccggcaggaggagctttttaatgacatagagcttcctcttataaccgtacttgccagtatggaataccacggtttcaaagttgacgccgcaaaacttcacgaatacggcgaagttcttctgtcacgcataaaagacctggaaaaggtaatttacatgctggccggtgaagaattcaacatcaattcaacgaagcagcttggtaccatattattcgaaaaactgaagcttcccgttgtaaaaagtacaaagaccggatactccaccgacgtcgaggttcttgaagagctttattacaagcatgatataataccatgcataatagaataccgccagcttacaaaactttacaccacctacgccgaaggtcttgaaaaagtgataaatcctgtaaccggtaaaattcattcaagttttaaccagacggttacggctacaggccgcatcagcagtaccgaaccaaatttacagaatatcccagtcagacacgaaatgggaagggaaatacggaaagcttttattccgtcgtcggaaaacgctgtttttgttgatgccgattattcacagatagagcttcgcgtgcttgcccatataacaggcgatgaagccctgataaatgctttcgttaagggggaagatattcatacggccacggcgtcgctggtatttgacgtagctcccgaagatgtgacgccggaactgcgcagaaaggcaaaagccgtaaatttcggcatagtgtacgggatcagtgattacgggctggcacgggatttgggaattacccggaaggaagcaaagcggtatatagacgactattttgccaaataccccaaagtaaaaacctatgtggatgaaattgtgcgggtcggccaggaacaggggtatgtggaaactctgttccacagaagaagataccttcccgagcttgcatctaaaaatcgtcaccagcgttctttcggaaaaagggttgcaatgaatacgcccatacagggcactgcagccgatattattaaaattgcgatggtgaaggtatacaaggctttgaaagaatccggccttaaatccaggcttatcctccaggtccatgacgaacttgttattgagacttttgaagacgaactggagactgtcaaggaacttgtcaaaaagtgcatggaagaggccgttgaattgagtgtgccgcttgttgtcgacgtttcaatcgggaaaaactggtatgaagcctcctgatatggatcc

SEQ ID NO: 313 - DNA, 2772 bp, Artificial Sequence
  Description of Artificial Sequence: Synthetic Clostridium stercorarium DNA Polymerase F825N
atgaaatacctgctgccgaccgctgctgctggtctgctgctcctcgctgcccagccggcgatggccatggatccaaaaataatccttatagacggaaacagtattttaaaccgcggtttttatgccctgtcggggcgatccatgctgactacgtccacaggtctgtataccaatgcggttttcgcttttgtaaatatattgaacaaatatatcgaagaggaaaaccctgattatattgccgttgctttcgatcttagggcaaaaactttccggcacggtctatatgagggatacaaagcgcagcggaaaggcatgcccgatgaacttgcaatgcagatacccctcgcgaaggaagtactgagggcgatgaatattgccataatagagcatgaaggttatgaagccgacgatataatcggcagcctttcgttaaaggccgaaaaagagaattttgacgtaataatccttacgggggacagggattctttccagctgatcagcgacagggtgaaagttatcctgccttcgacgaaagccggaaaaacagagaccaacgtatatgataaacaggccatcattgacaaatacggagttttaccccatcagcttattgacgttaaaggcttaatgggagattcgtcagataatatacccggcgttccgggagtgggtgagaaaacggcgttaagccttatttcagcctacggtacactggaaggtgtttacgagcatattgatgaaataaaacagcctaagctgaaagcatcgctgattgaatataaggatcaggcgtttttaagccgtaagctgggtactattgtaagaaatctggagctgtgtgcttcgctggaggatctgaaaagaaaagaaataaaccgcaaagagcttttgaatgttttcagaaaactcgaatttgaaagtatcatatcaaaaatgaatcttgcttccgctgaggtgacagaattacctcccgcgccggaagagcttaaaataacccatatttcagcggcagaggatcttaagaaatggattgcttacctgcttaaccagaaaaacatttccgtccttcaactgattgaccgggaggattcatacagttcccgtctttcagggctggctttgtgcaccggggatgaggttttttatatcgagaccgggactgcactccccgagaatttgattgcaacagagctgaaagaactgtggcagaatgaaaatattcacaaaatcggacacaatataaaagaatttataacctggctgctgaaacacgatgttgaactgaacggcctttatttcgacactatgattgccgaatacctgatagattccataagaaacggctatcctatagcaagcctttctcacaaatacctgaatcgcagcgttccgtcgctggacgaacttttgggcaagggaaagggagcaaaaaagtactctgaaattccgcccgaaaggctgaaagattacagcgcttataacgtcaaagccatttttgacatatggccgatgcagaaaaaagttcttcaggaaaaccggcaggaggagctttttaatgacatagagcttcctcttataaccgtacttgccagtatggaataccacggtttcaaagttgacgccgcaaaacttcacgaatacggcgaagttcttctgtcacgcataaaagacctggaaaaggtaatttacatgctggccggtgaagaattcaacatcaattcaacgaagcagcttggtaccatattattcgaaaaactgaagcttcccgttgtaaaaagtacaaagaccggatactccaccgacgtcgaggttcttgaagagctttattacaagcatgatataataccatgcataatagaataccgccagcttacaaaactttacaccacctacgccgaaggtcttgaaaaagtgataaatcctgtaaccggtaaaattcattcaagttttaaccagacggttacggctacaggccgcatcagcagtaccgaaccaaatttacagaatatcccagtcagacacgaaatgggaagggaaatacggaaagcttttattccgtcgtcggaaaacgctgtttttgttgatgccgattattcacagatagagcttcgcgtgcttgcccatataacaggcgatgaagccctgataaatgctttcgttaagggggaagatattcatacggccacggcgtcgctggtatttgacgtagctcccgaagatgtgacgccggaactgcgcagaaaggcaaaagccgtaaatttcggcatagtgtacgggatcagtgattacgggctggcacgggatttgggaattacccggaaggaagcaaagcggtatatagacgactattttgccaaataccccaaagtaaaaacctatgtggatgaaattgtgcgggtcggccaggaacaggggtatgtggaaactctgttccacagaagaagataccttcccgagcttgcatctaaaaataatcaccagcgttctttcggaaaaagggttgcaatgaatacgcccatacagggcactgcagccgatattattaaaattgcgatggtgaaggtatacaaggctttgaaagaatccggccttaaatccaggcttatcctccaggtccatgacgaacttgttattgagacttttgaagacgaactggagactgtcaaggaacttgtcaaaaagtgcatggaagaggccgttgaattgagtgtgccgcttgttgtcgacgtttcaatcgggaaaaactggtatgaagcctcctgatatggatcc

SEQ ID NO: 314 - DNA, 2772 bp, Artificial Sequence
  Description of Artificial Sequence: Synthetic Clostridium stercorarium DNA Polymerase F825D
atgaaatacctgctgccgaccgctgctgctggtctgctgctcctcgctgcccagccggcgatggccatggatccaaaaataatccttatagacggaaacagtattttaaaccgcggtttttatgccctgtcggggcgatccatgctgactacgtccacaggtctgtataccaatgcggttttcgcttttgtaaatatattgaacaaatatatcgaagaggaaaaccctgattatattgccgttgctttcgatcttagggcaaaaactttccggcacggtctatatgagggatacaaagcgcagcggaaaggcatgcccgatgaacttgcaatgcagatacccctcgcgaaggaagtactgagggcgatgaatattgccataatagagcatgaaggttatgaagccgacgatataatcggcagcctttcgttaaaggccgaaaaagagaattttgacgtaataatccttacgggggacagggattctttccagctgatcagcgacagggtgaaagttatcctgccttcgacgaaagccggaaaaacagagaccaacgtatatgataaacaggccatcattgacaaatacggagttttaccccatcagcttattgacgttaaaggcttaatgggagattcgtcagataatatacccggcgttccgggagtgggtgagaaaacggcgttaagccttatttcagcctacggtacactggaaggtgtttacgagcatattgatgaaataaaacagcctaagctgaaagcatcgctgattgaatataaggatcaggcgtttttaagccgtaagctgggtactattgtaagaaatctggagctgtgtgcttcgctggaggatctgaaaagaaaagaaataaaccgcaaagagcttttgaatgttttcagaaaactcgaatttgaaagtatcatatcaaaaatgaatcttgcttccgctgaggtgacagaattacctcccgcgccggaagagcttaaaataacccatatttcagcggcagaggatcttaagaaatggattgcttacctgcttaaccagaaaaacatttccgtccttcaactgattgaccgggaggattcatacagttcccgtctttcagggctggctttgtgcaccggggatgaggttttttatatcgagaccgggactgcactccccgagaatttgattgcaacagagctgaaagaactgtggcagaatgaaaatattcacaaaatcggacacaatataaaagaatttataacctggctgctgaaacacgatgttgaactgaacggcctttatttcgacactatgattgccgaatacctgatagattccataagaaacggctatcctatagcaagcctttctcacaaatacctgaatcgcagcgttccgtcgctggacgaacttttgggcaagggaaagggagcaaaaaagtactctgaaattccgcccgaaaggctgaaagattacagcgcttataacgtcaaagccatttttgacatatggccgatgcagaaaaaagttcttcaggaaaaccggcaggaggagctttttaatgacatagagcttcctcttataaccgtacttgccagtatggaataccacggtttcaaagttgacgccgcaaaacttcacgaatacggcgaagttcttctgtcacgcataaaagacctggaaaaggtaatttacatgctggccggtgaagaattcaacatcaattcaacgaagcagcttggtaccatattattcgaaaaactgaagcttcccgttgtaaaaagtacaaagaccggatactccaccgacgtcgaggttcttgaagagctttattacaagcatgatataataccatgcataatagaataccgccagcttacaaaactttacaccacctacgccgaaggtcttgaaaaagtgataaatcctgtaaccggtaaaattcattcaagttttaaccagacggttacggctacaggccgcatcagcagtaccgaaccaaatttacagaatatcccagtcagacacgaaatgggaagggaaatacggaaagcttttattccgtcgtcggaaaacgctgtttttgttgatgccgattattcacagatagagcttcgcgtgcttgcccatataacaggcgatgaagccctgataaatgctttcgttaagggggaagatattcatacggccacggcgtcgctggtatttgacgtagctcccgaagatgtgacgccggaactgcgcagaaaggcaaaagccgtaaatttcggcatagtgtacgggatcagtgattacgggctggcacgggatttgggaattacccggaaggaagcaaagcggtatatagacgactattttgccaaataccccaaagtaaaaacctatgtggatgaaattgtgcgggtcggccaggaacaggggtatgtggaaactctgttccacagaagaagataccttcccgagcttgcatctaaaaatgatcaccagcgttctttcggaaaaagggttgcaatgaatacgcccatacagggcactgcagccgatattattaaaattgcgatggtgaaggtatacaaggctttgaaagaatccggccttaaatccaggcttatcctccaggtccatgacgaacttgttattgagacttttgaagacgaactggagactgtcaaggaacttgtcaaaaagtgcatggaagaggccgttgaattgagtgtgccgcttgttgtcgacgtttcaatcgggaaaaactggtatgaagcctcctgatatggatcc

SEQ ID NO: 315 - DNA, 2772 bp, Artificial Sequence
  Description of Artificial Sequence: Synthetic Clostridium stercorarium DNA Polymerase F825C
atgaaatacctgctgccgaccgctgctgctggtctgctgctcctcgctgcccagccggcgatggccatggatccaaaaataatccttatagacggaaacagtattttaaaccgcggtttttatgccctgtcggggcgatccatgctgactacgtccacaggtctgtataccaatgcggttttcgcttttgtaaatatattgaacaaatatatcgaagaggaaaaccctgattatattgccgttgctttcgatcttagggcaaaaactttccggcacggtctatatgagggatacaaagcgcagcggaaaggcatgcccgatgaacttgcaatgcagatacccctcgcgaaggaagtactgagggcgatgaatattgccataatagagcatgaaggttatgaagccgacgatataatcggcagcctttcgttaaaggccgaaaaagagaattttgacgtaataatccttacgggggacagggattctttccagctgatcagcgacagggtgaaagttatcctgccttcgacgaaagccggaaaaacagagaccaacgtatatgataaacaggccatcattgacaaatacggagttttaccccatcagcttattgacgttaaaggcttaatgggagattcgtcagataatatacccggcgttccgggagtgggtgagaaaacggcgttaagccttatttcagcctacggtacactggaaggtgtttacgagcatattgatgaaataaaacagcctaagctgaaagcatcgctgattgaatataaggatcaggcgtttttaagccgtaagctgggtactattgtaagaaatctggagctgtgtgcttcgctggaggatctgaaaagaaaagaaataaaccgcaaagagcttttgaatgttttcagaaaactcgaatttgaaagtatcatatcaaaaatgaatcttgcttccgctgaggtgacagaattacctcccgcgccggaagagcttaaaataacccatatttcagcggcagaggatcttaagaaatggattgcttacctgcttaaccagaaaaacatttccgtccttcaactgattgaccgggaggattcatacagttcccgtctttcagggctggctttgtgcaccggggatgaggttttttatatcgagaccgggactgcactccccgagaatttgattgcaacagagctgaaagaactgtggcagaatgaaaatattcacaaaatcggacacaatataaaagaatttataacctggctgctgaaacacgatgttgaactgaacggcctttatttcgacactatgattgccgaatacctgatagattccataagaaacggctatcctatagcaagcctttctcacaaatacctgaatcgcagcgttccgtcgctggacgaacttttgggcaagggaaagggagcaaaaaagtactctgaaattccgcccgaaaggctgaaagattacagcgcttataacgtcaaagccatttttgacatatggccgatgcagaaaaaagttcttcaggaaaaccggcaggaggagctttttaatgacatagagcttcctcttataaccgtacttgccagtatggaataccacggtttcaaagttgacgccgcaaaacttcacgaatacggcgaagttcttctgtcacgcataaaagacctggaaaaggtaatttacatgctggccggtgaagaattcaacatcaattcaacgaagcagcttggtaccatattattcgaaaaactgaagcttcccgttgtaaaaagtacaaagaccggatactccaccgacgtcgaggttcttgaagagctttattacaagcatgatataataccatgcataatagaataccgccagcttacaaaactttacaccacctacgccgaaggtcttgaaaaagtgataaatcctgtaaccggtaaaattcattcaagttttaaccagacggttacggctacaggccgcatcagcagtaccgaaccaaatttacagaatatcccagtcagacacgaaatgggaagggaaatacggaaagcttttattccgtcgtcggaaaacgctgtttttgttgatgccgattattcacagatagagcttcgcgtgcttgcccatataacaggcgatgaagccctgataaatgctttcgttaagggggaagatattcatacggccacggcgtcgctggtatttgacgtagctcccgaagatgtgacgccggaactgcgcagaaaggcaaaagccgtaaatttcggcatagtgtacgggatcagtgattacgggctggcacgggatttgggaattacccggaaggaagcaaagcggtatatagacgactattttgccaaataccccaaagtaaaaacctatgtggatgaaattgtgcgggtcggccaggaacaggggtatgtggaaactctgttccacagaagaagataccttcccgagcttgcatctaaaaattgtcaccagcgttctttcggaaaaagggttgcaatgaatacgcccatacagggcactgcagccgatattattaaaattgcgatggtgaaggtatacaaggctttgaaagaatccggccttaaatccaggcttatcctccaggtccatgacgaacttgttattgagacttttgaagacgaactggagactgtcaaggaacttgtcaaaaagtgcatggaagaggccgttgaattgagtgtgccgcttgttgtcgacgtttcaatcgggaaaaactggtatgaagcctcctgatatggatcc

SEQ ID NO: 316 - DNA, 2772 bp, Artificial Sequence
  Description of Artificial Sequence: Synthetic Clostridium stercorarium DNA Polymerase F825E
atgaaatacctgctgccgaccgctgctgctggtctgctgctcctcgctgcccagccggcgatggccatggatccaaaaataatccttatagacggaaacagtattttaaaccgcggtttttatgccctgtcggggcgatccatgctgactacgtccacaggtctgtataccaatgcggttttcgcttttgtaaatatattgaacaaatatatcgaagaggaaaaccctgattatattgccgttgctttcgatcttagggcaaaaactttccggcacggtctatatgagggatacaaagcgcagcggaaaggcatgcccgatgaacttgcaatgcagatacccctcgcgaaggaagtactgagggcgatgaatattgccataatagagcatgaaggttatgaagccgacgatataatcggcagcctttcgttaaaggccgaaaaagagaattttgacgtaataatccttacgggggacagggattctttccagctgatcagcgacagggtgaaagttatcctgccttcgacgaaagccggaaaaacagagaccaacgtatatgataaacaggccatcattgacaaatacggagttttaccccatcagcttattgacgttaaaggcttaatgggagattcgtcagataatatacccggcgttccgggagtgggtgagaaaacggcgttaagccttatttcagcctacggtacactggaaggtgtttacgagcatattgatgaaataaaacagcctaagctgaaagcatcgctgattgaatataaggatcaggcgtttttaagccgtaagctgggtactattgtaagaaatctggagctgtgtgcttcgctggaggatctgaaaagaaaagaaataaaccgcaaagagcttttgaatgttttcagaaaactcgaatttgaaagtatcatatcaaaaatgaatcttgcttccgctgaggtgacagaattacctcccgcgccggaagagcttaaaataacccatatttcagcggcagaggatcttaagaaatggattgcttacctgcttaaccagaaaaacatttccgtccttcaactgattgaccgggaggattcatacagttcccgtctttcagggctggctttgtgcaccggggatgaggttttttatatcgagaccgggactgcactccccgagaatttgattgcaacagagctgaaagaactgtggcagaatgaaaatattcacaaaatcggacacaatataaaagaatttataacctggctgctgaaacacgatgttgaactgaacggcctttatttcgacactatgattgccgaatacctgatagattccataagaaacggctatcctatagcaagcctttctcacaaatacctgaatcgcagcgttccgtcgctggacgaacttttgggcaagggaaagggagcaaaaaagtactctgaaattccgcccgaaaggctgaaagattacagcgcttataacgtcaaagccatttttgacatatggccgatgcagaaaaaagttcttcaggaaaaccggcaggaggagctttttaatgacatagagcttcctcttataaccgtacttgccagtatggaataccacggtttcaaagttgacgccgcaaaacttcacgaatacggcgaagttcttctgtcacgcataaaagacctggaaaaggtaatttacatgctggccggtgaagaattcaacatcaattcaacgaagcagcttggtaccatattattcgaaaaactgaagcttcccgttgtaaaaagtacaaagaccggatactccaccgacgtcgaggttcttgaagagctttattacaagcatgatataataccatgcataatagaataccgccagcttacaaaactttacaccacctacgccgaaggtcttgaaaaagtgataaatcctgtaaccggtaaaattcattcaagttttaaccagacggttacggctacaggccgcatcagcagtaccgaaccaaatttacagaatatcccagtcagacacgaaatgggaagggaaatacggaaagcttttattccgtcgtcggaaaacgctgtttttgttgatgccgattattcacagatagagcttcgcgtgcttgcccatataacaggcgatgaagccctgataaatgctttcgttaagggggaagatattcatacggccacggcgtcgctggtatttgacgtagctcccgaagatgtgacgccggaactgcgcagaaaggcaaaagccgtaaatttcggcatagtgtacgggatcagtgattacgggctggcacgggatttgggaattacccggaaggaagcaaagcggtatatagacgactattttgccaaataccccaaagtaaaaacctatgtggatgaaattgtgcgggtcggccaggaacaggggtatgtggaaactctgttccacagaagaagataccttcccgagcttgcatctaaaaatgaacaccagcgttctttcggaaaaagggttgcaatgaatacgcccatacagggcactgcagccgatattattaaaattgcgatggtgaaggtatacaaggctttgaaagaatccggccttaaatccaggcttatcctccaggtccatgacgaacttgttattgagacttttgaagacgaactggagactgtcaaggaacttgtcaaaaagtgcatggaagaggccgttgaattgagtgtgccgcttgttgtcgacgtttcaatcgggaaaaactggtatgaagcctcctgatatggatcc

SEQ ID NO: 317 - DNA, 2772 bp, Artificial Sequence
  Description of Artificial Sequence: Synthetic Clostridium stercorarium DNA Polymerase F825Q
atgaaatacctgctgccgaccgctgctgctggtctgctgctcctcgctgcccagccggcgatggccatggatccaaaaataatccttatagacggaaacagtattttaaaccgcggtttttatgccctgtcggggcgatccatgctgactacgtccacaggtctgtataccaatgcggttttcgcttttgtaaatatattgaacaaatatatcgaagaggaaaaccctgattatattgccgttgctttcgatcttagggcaaaaactttccggcacggtctatatgagggatacaaagcgcagcggaaaggcatgcccgatgaacttgcaatgcagatacccctcgcgaaggaagtactgagggcgatgaatattgccataatagagcatgaaggttatgaagccgacgatataatcggcagcctttcgttaaaggccgaaaaagagaattttgacgtaataatccttacgggggacagggattctttccagctgatcagcgacagggtgaaagttatcctgccttcgacgaaagccggaaaaacagagaccaacgtatatgataaacaggccatcattgacaaatacggagttttaccccatcagcttattgacgttaaaggcttaatgggagattcgtcagataatatacccggcgttccgggagtgggtgagaaaacggcgttaagccttatttcagcctacggtacactggaaggtgtttacgagcatattgatgaaataaaacagcctaagctgaaagcatcgctgattgaatataaggatcaggcgtttttaagccgtaagctgggtactattgtaagaaatctggagctgtgtgcttcgctggaggatctgaaaagaaaagaaataaaccgcaaagagcttttgaatgttttcagaaaactcgaatttgaaagtatcatatcaaaaatgaatcttgcttccgctgaggtgacagaattacctcccgcgccggaagagcttaaaataacccatatttcagcggcagaggatcttaagaaatggattgcttacctgcttaaccagaaaaacatttccgtccttcaactgattgaccgggaggattcatacagttcccgtctttcagggctggctttgtgcaccggggatgaggttttttatatcgagaccgggactgcactccccgagaatttgattgcaacagagctgaaagaactgtggcagaatgaaaatattcacaaaatcggacacaatataaaagaatttataacctggctgctgaaacacgatgttgaactgaacggcctttatttcgacactatgattgccgaatacctgatagattccataagaaacggctatcctatagcaagcctttctcacaaatacctgaatcgcagcgttccgtcgctggacgaacttttgggcaagggaaagggagcaaaaaagtactctgaaattccgcccgaaaggctgaaagattacagcgcttataacgtcaaagccatttttgacatatggccgatgcagaaaaaagttcttcaggaaaaccggcaggaggagctttttaatgacatagagcttcctcttataaccgtacttgccagtatggaataccacggtttcaaagttgacgccgcaaaacttcacgaatacggcgaagttcttctgtcacgcataaaagacctggaaaaggtaatttacatgctggccggtgaagaattcaacatcaattcaacgaagcagcttggtaccatattattcgaaaaactgaagcttcccgttgtaaaaagtacaaagaccggatactccaccgacgtcgaggttcttgaagagctttattacaagcatgatataataccatgcataatagaataccgccagcttacaaaactttacaccacctacgccgaaggtcttgaaaaagtgataaatcctgtaaccggtaaaattcattcaagttttaaccagacggttacggctacaggccgcatcagcagtaccgaaccaaatttacagaatatcccagtcagacacgaaatgggaagggaaatacggaaagcttttattccgtcgtcggaaaacgctgtttttgttgatgccgattattcacagatagagcttcgcgtgcttgcccatataacaggcgatgaagccctgataaatgctttcgttaagggggaagatattcatacggccacggcgtcgctggtatttgacgtagctcccgaagatgtgacgccggaactgcgcagaaaggcaaaagccgtaaatttcggcatagtgtacgggatcagtgattacgggctggcacgggatttgggaattacccggaaggaagcaaagcggtatatagacgactattttgccaaataccccaaagtaaaaacctatgtggatgaaattgtgcgggtcggccaggaacaggggtatgtggaaactctgttccacagaagaagataccttcccgagcttgcatctaaaaatcaacaccagcgttctttcggaaaaagggttgcaatgaatacgcccatacagggcactgcagccgatattattaaaattgcgatggtgaaggtatacaaggctttgaaagaatccggccttaaatccaggcttatcctccaggtccatgacgaacttgttattgagacttttgaagacgaactggagactgtcaaggaacttgtcaaaaagtgcatggaagaggccgttgaattgagtgtgccgcttgttgtcgacgtttcaatcgggaaaaactggtatgaagcctcctgatatggatcc

SEQ ID NO: 318 - DNA, 2772 bp, Artificial Sequence
  Description of Artificial Sequence: Synthetic Clostridium stercorarium DNA Polymerase F825G
atgaaatacctgctgccgaccgctgctgctggtctgctgctcctcgctgcccagccggcgatggccatggatccaaaaataatccttatagacggaaacagtattttaaaccgcggtttttatgccctgtcggggcgatccatgctgactacgtccacaggtctgtataccaatgcggttttcgcttttgtaaatatattgaacaaatatatcgaagaggaaaaccctgattatattgccgttgctttcgatcttagggcaaaaactttccggcacggtctatatgagggatacaaagcgcagcggaaaggcatgcccgatgaacttgcaatgcagatacccctcgcgaaggaagtactgagggcgatgaatattgccataatagagcatgaaggttatgaagccgacgatataatcggcagcctttcgttaaaggccgaaaaagagaattttgacgtaataatccttacgggggacagggattctttccagctgatcagcgacagggtgaaagttatcctgccttcgacgaaagccggaaaaacagagaccaacgtatatgataaacaggccatcattgacaaatacggagttttaccccatcagcttattgacgttaaaggcttaatgggagattcgtcagataatatacccggcgttccgggagtgggtgagaaaacggcgttaagccttatttcagcctacggtacactggaaggtgtttacgagcatattgatgaaataaaacagcctaagctgaaagcatcgctgattgaatataaggatcaggcgtttttaagccgtaagctgggtactattgtaagaaatctggagctgtgtgcttcgctggaggatctgaaaagaaaagaaataaaccgcaaagagcttttgaatgttttcagaaaactcgaatttgaaagtatcatatcaaaaatgaatcttgcttccgctgaggtgacagaattacctcccgcgccggaagagcttaaaataacccatatttcagcggcagaggatcttaagaaatggattgcttacctgcttaaccagaaaaacatttccgtccttcaactgattgaccgggaggattcatacagttcccgtctttcagggctggctttgtgcaccggggatgaggttttttatatcgagaccgggactgcactccccgagaatttgattgcaacagagctgaaagaactgtggcagaatgaaaatattcacaaaatcggacacaatataaaagaatttataacctggctgctgaaacacgatgttgaactgaacggcctttatttcgacactatgattgccgaatacctgatagattccataagaaacggctatcctatagcaagcctttctcacaaatacctgaatcgcagcgttccgtcgctggacgaacttttgggcaagggaaagggagcaaaaaagtactctgaaattccgcccgaaaggctgaaagattacagcgcttataacgtcaaagccatttttgacatatggccgatgcagaaaaaagttcttcaggaaaaccggcaggaggagctttttaatgacatagagcttcctcttataaccgtacttgccagtatggaataccacggtttcaaagttgacgccgcaaaacttcacgaatacggcgaagttcttctgtcacgcataaaagacctggaaaaggtaatttacatgctggccggtgaagaattcaacatcaattcaacgaagcagcttggtaccatattattcgaaaaactgaagcttcccgttgtaaaaagtacaaagaccggatactccaccgacgtcgaggttcttgaagagctttattacaagcatgatataataccatgcataatagaataccgccagcttacaaaactttacaccacctacgccgaaggtcttgaaaaagtgataaatcctgtaaccggtaaaattcattcaagttttaaccagacggttacggctacaggccgcatcagcagtaccgaaccaaatttacagaatatcccagtcagacacgaaatgggaagggaaatacggaaagcttttattccgtcgtcggaaaacgctgtttttgttgatgccgattattcacagatagagcttcgcgtgcttgcccatataacaggcgatgaagccctgataaatgctttcgttaagggggaagatattcatacggccacggcgtcgctggtatttgacgtagctcccgaagatgtgacgccggaactgcgcagaaaggcaaaagccgtaaatttcggcatagtgtacgggatcagtgattacgggctggcacgggatttgggaattacccggaaggaagcaaagcggtatatagacgactattttgccaaataccccaaagtaaaaacctatgtggatgaaattgtgcgggtcggccaggaacaggggtatgtggaaactctgttccacagaagaagataccttcccgagcttgcatctaaaaatggtcaccagcgttctttcggaaaaagggttgcaatgaatacgcccatacagggcactgcagccgatattattaaaattgcgatggtgaaggtatacaaggctttgaaagaatccggccttaaatccaggcttatcctccaggtccatgacgaacttgttattgagacttttgaagacgaactggagactgtcaaggaacttgtcaaaaagtgcatggaagaggccgttgaattgagtgtgccgcttgttgtcgacgtttcaatcgggaaaaactggtatgaagcctcctgatatggatcc

SEQ ID NO: 319 - DNA, 2772 bp, Artificial Sequence
  Description of Artificial Sequence: Synthetic Clostridium stercorarium DNA Polymerase F825H
atgaaatacctgctgccgaccgctgctgctggtctgctgctcctcgctgcccagccggcgatggccatggatccaaaaataatccttatagacggaaacagtattttaaaccgcggtttttatgccctgtcggggcgatccatgctgactacgtccacaggtctgtataccaatgcggttttcgcttttgtaaatatattgaacaaatatatcgaagaggaaaaccctgattatattgccgttgctttcgatcttagggcaaaaactttccggcacggtctatatgagggatacaaagcgcagcggaaaggcatgcccgatgaacttgcaatgcagatacccctcgcgaaggaagtactgagggcgatgaatattgccataatagagcatgaaggttatgaagccgacgatataatcggcagcctttcgttaaaggccgaaaaagagaattttgacgtaataatccttacgggggacagggattctttccagctgatcagcgacagggtgaaagttatcctgccttcgacgaaagccggaaaaacagagaccaacgtatatgataaacaggccatcattgacaaatacggagttttaccccatcagcttattgacgttaaaggcttaatgggagattcgtcagataatatacccggcgttccgggagtgggtgagaaaacggcgttaagccttatttcagcctacggtacactggaaggtgtttacgagcatattgatgaaataaaacagcctaagctgaaagcatcgctgattgaatataaggatcaggcgtttttaagccgtaagctgggtactattgtaagaaatctggagctgtgtgcttcgctggaggatctgaaaagaaaagaaataaaccgcaaagagcttttgaatgttttcagaaaactcgaatttgaaagtatcatatcaaaaatgaatcttgcttccgctgaggtgacagaattacctcccgcgccggaagagcttaaaataacccatatttcagcggcagaggatcttaagaaatggattgcttacctgcttaaccagaaaaacatttccgtccttcaactgattgaccgggaggattcatacagttcccgtctttcagggctggctttgtgcaccggggatgaggttttttatatcgagaccgggactgcactccccgagaatttgattgcaacagagctgaaagaactgtggcagaatgaaaatattcacaaaatcggacacaatataaaagaatttataacctggctgctgaaacacgatgttgaactgaacggcctttatttcgacactatgattgccgaatacctgatagattccataagaaacggctatcctatagcaagcctttctcacaaatacctgaatcgcagcgttccgtcgctggacgaacttttgggcaagggaaagggagcaaaaaagtactctgaaattccgcccgaaaggctgaaagattacagcgcttataacgtcaaagccatttttgacatatggccgatgcagaaaaaagttcttcaggaaaaccggcaggaggagctttttaatgacatagagcttcctcttataaccgtacttgccagtatggaataccacggtttcaaagttgacgccgcaaaacttcacgaatacggcgaagttcttctgtcacgcataaaagacctggaaaaggtaatttacatgctggccggtgaagaattcaacatcaattcaacgaagcagcttggtaccatattattcgaaaaactgaagcttcccgttgtaaaaagtacaaagaccggatactccaccgacgtcgaggttcttgaagagctttattacaagcatgatataataccatgcataatagaataccgccagcttacaaaactttacaccacctacgccgaaggtcttgaaaaagtgataaatcctgtaaccggtaaaattcattcaagttttaaccagacggttacggctacaggccgcatcagcagtaccgaaccaaatttacagaatatcccagtcagacacgaaatgggaagggaaatacggaaagcttttattccgtcgtcggaaaacgctgtttttgttgatgccgattattcacagatagagcttcgcgtgcttgcccatataacaggcgatgaagccctgataaatgctttcgttaagggggaagatattcatacggccacggcgtcgctggtatttgacgtagctcccgaagatgtgacgccggaactgcgcagaaaggcaaaagccgtaaatttcggcatagtgtacgggatcagtgattacgggctggcacgggatttgggaattacccggaaggaagcaaagcggtatatagacgactattttgccaaataccccaaagtaaaaacctatgtggatgaaattgtgcgggtcggccaggaacaggggtatgtggaaactctgttccacagaagaagataccttcccgagcttgcatctaaaaatcatcaccagcgttctttcggaaaaagggttgcaatgaatacgcccatacagggcactgcagccgatattattaaaattgcgatggtgaaggtatacaaggctttgaaagaatccggccttaaatccaggcttatcctccaggtccatgacgaacttgttattgagacttttgaagacgaactggagactgtcaaggaacttgtcaaaaagtgcatggaagaggccgttgaattgagtgtgccgcttgttgtcgacgtttcaatcgggaaaaactggtatgaagcctcctgatatggatcc

SEQ ID NO: 320 - DNA, 2772 bp, Artificial Sequence
  Description of Artificial Sequence: Synthetic Clostridium stercorarium DNA Polymerase F825I
atgaaatacctgctgccgaccgctgctgctggtctgctgctcctcgctgcccagccggcgatggccatggatccaaaaataatccttatagacggaaacagtattttaaaccgcggtttttatgccctgtcggggcgatccatgctgactacgtccacaggtctgtataccaatgcggttttcgcttttgtaaatatattgaacaaatatatcgaagaggaaaaccctgattatattgccgttgctttcgatcttagggcaaaaactttccggcacggtctatatgagggatacaaagcgcagcggaaaggcatgcccgatgaacttgcaatgcagatacccctcgcgaaggaagtactgagggcgatgaatattgccataatagagcatgaaggttatgaagccgacgatataatcggcagcctttcgttaaaggccgaaaaagagaattttgacgtaataatccttacgggggacagggattctttccagctgatcagcgacagggtgaaagttatcctgccttcgacgaaagccggaaaaacagagaccaacgtatatgataaacaggccatcattgacaaatacggagttttaccccatcagcttattgacgttaaaggcttaatgggagattcgtcagataatatacccggcgttccgggagtgggtgagaaaacggcgttaagccttatttcagcctacggtacactggaaggtgtttacgagcatattgatgaaataaaacagcctaagctgaaagcatcgctgattgaatataaggatcaggcgtttttaagccgtaagctgggtactattgtaagaaatctggagctgtgtgcttcgctggaggatctgaaaagaaaagaaataaaccgcaaagagcttttgaatgttttcagaaaactcgaatttgaaagtatcatatcaaaaatgaatcttgcttccgctgaggtgacagaattacctcccgcgccggaagagcttaaaataacccatatttcagcggcagaggatcttaagaaatggattgcttacctgcttaaccagaaaaacatttccgtccttcaactgattgaccgggaggattcatacagttcccgtctttcagggctggctttgtgcaccggggatgaggttttttatatcgagaccgggactgcactccccgagaatttgattgcaacagagctgaaagaactgtggcagaatgaaaatattcacaaaatcggacacaatataaaagaatttataacctggctgctgaaacacgatgttgaactgaacggcctttatttcgacactatgattgccgaatacctgatagattccataagaaacggctatcctatagcaagcctttctcacaaatacctgaatcgcagcgttccgtcgctggacgaacttttgggcaagggaaagggagcaaaaaagtactctgaaattccgcccgaaaggctgaaagattacagcgcttataacgtcaaagccatttttgacatatggccgatgcagaaaaaagttcttcaggaaaaccggcaggaggagctttttaatgacatagagcttcctcttataaccgtacttgccagtatggaataccacggtttcaaagttgacgccgcaaaacttcacgaatacggcgaagttcttctgtcacgcataaaagacctggaaaaggtaatttacatgctggccggtgaagaattcaacatcaattcaacgaagcagcttggtaccatattattcgaaaaactgaagcttcccgttgtaaaaagtacaaagaccggatactccaccgacgtcgaggttcttgaagagctttattacaagcatgatataataccatgcataatagaataccgccagcttacaaaactttacaccacctacgccgaaggtcttgaaaaagtgataaatcctgtaaccggtaaaattcattcaagttttaaccagacggttacggctacaggccgcatcagcagtaccgaaccaaatttacagaatatcccagtcagacacgaaatgggaagggaaatacggaaagcttttattccgtcgtcggaaaacgctgtttttgttgatgccgattattcacagatagagcttcgcgtgcttgcccatataacaggcgatgaagccctgataaatgctttcgttaagggggaagatattcatacggccacggcgtcgctggtatttgacgtagctcccgaagatgtgacgccggaactgcgcagaaaggcaaaagccgtaaatttcggcatagtgtacgggatcagtgattacgggctggcacgggatttgggaattacccggaaggaagcaaagcggtatatagacgactattttgccaaataccccaaagtaaaaacctatgtggatgaaattgtgcgggtcggccaggaacaggggtatgtggaaactctgttccacagaagaagataccttcccgagcttgcatctaaaaatattcaccagcgttctttcggaaaaagggttgcaatgaatacgcccatacagggcactgcagccgatattattaaaattgcgatggtgaaggtatacaaggctttgaaagaatccggccttaaatccaggcttatcctccaggtccatgacgaacttgttattgagacttttgaagacgaactggagactgtcaaggaacttgtcaaaaagtgcatggaagaggccgttgaattgagtgtgccgcttgttgtcgacgtttcaatcgggaaaaactggtatgaagcctcctgatatggatcc

SEQ ID NO: 321 - DNA, 2772 bp, Artificial Sequence
  Description of Artificial Sequence: Synthetic Clostridium stercorarium DNA Polymerase F825L
atgaaatacctgctgccgaccgctgctgctggtctgctgctcctcgctgcccagccggcgatggccatggatccaaaaataatccttatagacggaaacagtattttaaaccgcggtttttatgccctgtcggggcgatccatgctgactacgtccacaggtctgtataccaatgcggttttcgcttttgtaaatatattgaacaaatatatcgaagaggaaaaccctgattatattgccgttgctttcgatcttagggcaaaaactttccggcacggtctatatgagggatacaaagcgcagcggaaaggcatgcccgatgaacttgcaatgcagatacccctcgcgaaggaagtactgagggcgatgaatattgccataatagagcatgaaggttatgaagccgacgatataatcggcagcctttcgttaaaggccgaaaaagagaattttgacgtaataatccttacgggggacagggattctttccagctgatcagcgacagggtgaaagttatcctgccttcgacgaaagccggaaaaacagagaccaacgtatatgataaacaggccatcattgacaaatacggagttttaccccatcagcttattgacgttaaaggcttaatgggagattcgtcagataatatacccggcgttccgggagtgggtgagaaaacggcgttaagccttatttcagcctacggtacactggaaggtgtttacgagcatattgatgaaataaaacagcctaagctgaaagcatcgctgattgaatataaggatcaggcgtttttaagccgtaagctgggtactattgtaagaaatctggagctgtgtgcttcgctggaggatctgaaaagaaaagaaataaaccgcaaagagcttttgaatgttttcagaaaactcgaatttgaaagtatcatatcaaaaatgaatcttgcttccgctgaggtgacagaattacctcccgcgccggaagagcttaaaataacccatatttcagcggcagaggatcttaagaaatggattgcttacctgcttaaccagaaaaacatttccgtccttcaactgattgaccgggaggattcatacagttcccgtctttcagggctggctttgtgcaccggggatgaggttttttatatcgagaccgggactgcactccccgagaatttgattgcaacagagctgaaagaactgtggcagaatgaaaatattcacaaaatcggacacaatataaaagaatttataacctggctgctgaaacacgatgttgaactgaacggcctttatttcgacactatgattgccgaatacctgatagattccataagaaacggctatcctatagcaagcctttctcacaaatacctgaatcgcagcgttccgtcgctggacgaacttttgggcaagggaaagggagcaaaaaagtactctgaaattccgcccgaaaggctgaaagattacagcgcttataacgtcaaagccatttttgacatatggccgatgcagaaaaaagttcttcaggaaaaccggcaggaggagctttttaatgacatagagcttcctcttataaccgtacttgccagtatggaataccacggtttcaaagttgacgccgcaaaacttcacgaatacggcgaagttcttctgtcacgcataaaagacctggaaaaggtaatttacatgctggccggtgaagaattcaacatcaattcaacgaagcagcttggtaccatattattcgaaaaactgaagcttcccgttgtaaaaagtacaaagaccggatactccaccgacgtcgaggttcttgaagagctttattacaagcatgatataataccatgcataatagaataccgccagcttacaaaactttacaccacctacgccgaaggtcttgaaaaagtgataaatcctgtaaccggtaaaattcattcaagttttaaccagacggttacggctacaggccgcatcagcagtaccgaaccaaatttacagaatatcccagtcagacacgaaatgggaagggaaatacggaaagcttttattccgtcgtcggaaaacgctgtttttgttgatgccgattattcacagatagagcttcgcgtgcttgcccatataacaggcgatgaagccctgataaatgctttcgttaagggggaagatattcatacggccacggcgtcgctggtatttgacgtagctcccgaagatgtgacgccggaactgcgcagaaaggcaaaagccgtaaatttcggcatagtgtacgggatcagtgattacgggctggcacgggatttgggaattacccggaaggaagcaaagcggtatatagacgactattttgccaaataccccaaagtaaaaacctatgtggatgaaattgtgcgggtcggccaggaacaggggtatgtggaaactctgttccacagaagaagataccttcccgagcttgcatctaaaaatcttcaccagcgttctttcggaaaaagggttgcaatgaatacgcccatacagggcactgcagccgatattattaaaattgcgatggtgaaggtatacaaggctttgaaagaatccggccttaaatccaggcttatcctccaggtccatgacgaacttgttattgagacttttgaagacgaactggagactgtcaaggaacttgtcaaaaagtgcatggaagaggccgttgaattgagtgtgccgcttgttgtcgacgtttcaatcgggaaaaactggtatgaagcctcctgatatggatcc

SEQ ID NO: 322 - DNA, 2772 bp, Artificial Sequence
  Description of Artificial Sequence: Synthetic Clostridium stercorarium DNA Polymerase F825K
atgaaatacctgctgccgaccgctgctgctggtctgctgctcctcgctgcccagccggcgatggccatggatccaaaaataatccttatagacggaaacagtattttaaaccgcggtttttatgccctgtcggggcgatccatgctgactacgtccacaggtctgtataccaatgcggttttcgcttttgtaaatatattgaacaaatatatcgaagaggaaaaccctgattatattgccgttgctttcgatcttagggcaaaaactttccggcacggtctatatgagggatacaaagcgcagcggaaaggcatgcccgatgaacttgcaatgcagatacccctcgcgaaggaagtactgagggcgatgaatattgccataatagagcatgaaggttatgaagccgacgatataatcggcagcctttcgttaaaggccgaaaaagagaattttgacgtaataatccttacgggggacagggattctttccagctgatcagcgacagggtgaaagttatcctgccttcgacgaaagccggaaaaacagagaccaacgtatatgataaacaggccatcattgacaaatacggagttttaccccatcagcttattgacgttaaaggcttaatgggagattcgtcagataatatacccggcgttccgggagtgggtgagaaaacggcgttaagccttatttcagcctacggtacactggaaggtgtttacgagcatattgatgaaataaaacagcctaagctgaaagcatcgctgattgaatataaggatcaggcgtttttaagccgtaagctgggtactattgtaagaaatctggagctgtgtgcttcgctggaggatctgaaaagaaaagaaataaaccgcaaagagcttttgaatgttttcagaaaactcgaatttgaaagtatcatatcaaaaatgaatcttgcttccgctgaggtgacagaattacctcccgcgccggaagagcttaaaataacccatatttcagcggcagaggatcttaagaaatggattgcttacctgcttaaccagaaaaacatttccgtccttcaactgattgaccgggaggattcatacagttcccgtctttcagggctggctttgtgcaccggggatgaggttttttatatcgagaccgggactgcactccccgagaatttgattgcaacagagctgaaagaactgtggcagaatgaaaatattcacaaaatcggacacaatataaaagaatttataacctggctgctgaaacacgatgttgaactgaacggcctttatttcgacactatgattgccgaatacctgatagattccataagaaacggctatcctatagcaagcctttctcacaaatacctgaatcgcagcgttccgtcgctggacgaacttttgggcaagggaaagggagcaaaaaagtactctgaaattccgcccgaaaggctgaaagattacagcgcttataacgtcaaagccatttttgacatatggccgatgcagaaaaaagttcttcaggaaaaccggcaggaggagctttttaatgacatagagcttcctcttataaccgtacttgccagtatggaataccacggtttcaaagttgacgccgcaaaacttcacgaatacggcgaagttcttctgtcacgcataaaagacctggaaaaggtaatttacatgctggccggtgaagaattcaacatcaattcaacgaagcagcttggtaccatattattcgaaaaactgaagcttcccgttgtaaaaagtacaaagaccggatactccaccgacgtcgaggttcttgaagagctttattacaagcatgatataataccatgcataatagaataccgccagcttacaaaactttacaccacctacgccgaaggtcttgaaaaagtgataaatcctgtaaccggtaaaattcattcaagttttaaccagacggttacggctacaggccgcatcagcagtaccgaaccaaatttacagaatatcccagtcagacacgaaatgggaagggaaatacggaaagcttttattccgtcgtcggaaaacgctgtttttgttgatgccgattattcacagatagagcttcgcgtgcttgcccatataacaggcgatgaagccctgataaatgctttcgttaagggggaagatattcatacggccacggcgtcgctggtatttgacgtagctcccgaagatgtgacgccggaactgcgcagaaaggcaaaagccgtaaatttcggcatagtgtacgggatcagtgattacgggctggcacgggatttgggaattacccggaaggaagcaaagcggtatatagacgactattttgccaaataccccaaagtaaaaacctatgtggatgaaattgtgcgggtcggccaggaacaggggtatgtggaaactctgttccacagaagaagataccttcccgagcttgcatctaaaaataaacaccagcgttctttcggaaaaagggttgcaatgaatacgcccatacagggcactgcagccgatattattaaaattgcgatggtgaaggtatacaaggctttgaaagaatccggccttaaatccaggcttatcctccaggtccatgacgaacttgttattgagacttttgaagacgaactggagactgtcaaggaacttgtcaaaaagtgcatggaagaggccgttgaattgagtgtgccgcttgttgtcgacgtttcaatcgggaaaaactggtatgaagcctcctgatatggatcc

SEQ ID NO: 323 - DNA, 2772 bp, Artificial Sequence
  Description of Artificial Sequence: Synthetic Clostridium stercorarium DNA Polymerase F825M
atgaaatacctgctgccgaccgctgctgctggtctgctgctcctcgctgcccagccggcgatggccatggatccaaaaataatccttatagacggaaacagtattttaaaccgcggtttttatgccctgtcggggcgatccatgctgactacgtccacaggtctgtataccaatgcggttttcgcttttgtaaatatattgaacaaatatatcgaagaggaaaaccctgattatattgccgttgctttcgatcttagggcaaaaactttccggcacggtctatatgagggatacaaagcgcagcggaaaggcatgcccgatgaacttgcaatgcagatacccctcgcgaaggaagtactgagggcgatgaatattgccataatagagcatgaaggttatgaagccgacgatataatcggcagcctttcgttaaaggccgaaaaagagaattttgacgtaataatccttacgggggacagggattctttccagctgatcagcgacagggtgaaagttatcctgccttcgacgaaagccggaaaaacagagaccaacgtatatgataaacaggccatcattgacaaatacggagttttaccccatcagcttattgacgttaaaggcttaatgggagattcgtcagataatatacccggcgttccgggagtgggtgagaaaacggcgttaagccttatttcagcctacggtacactggaaggtgtttacgagcatattgatgaaataaaacagcctaagctgaaagcatcgctgattgaatataaggatcaggcgtttttaagccgtaagctgggtactattgtaagaaatctggagctgtgtgcttcgctggaggatctgaaaagaaaagaaataaaccgcaaagagcttttgaatgttttcagaaaactcgaatttgaaagtatcatatcaaaaatgaatcttgcttccgctgaggtgacagaattacctcccgcgccggaagagcttaaaataacccatatttcagcggcagaggatcttaagaaatggattgcttacctgcttaaccagaaaaacatttccgtccttcaactgattgaccgggaggattcatacagttcccgtctttcagggctggctttgtgcaccggggatgaggttttttatatcgagaccgggactgcactccccgagaatttgattgcaacagagctgaaagaactgtggcagaatgaaaatattcacaaaatcggacacaatataaaagaatttataacctggctgctgaaacacgatgttgaactgaacggcctttatttcgacactatgattgccgaatacctgatagattccataagaaacggctatcctatagcaagcctttctcacaaatacctgaatcgcagcgttccgtcgctggacgaacttttgggcaagggaaagggagcaaaaaagtactctgaaattccgcccgaaaggctgaaagattacagcgcttataacgtcaaagccatttttgacatatggccgatgcagaaaaaagttcttcaggaaaaccggcaggaggagctttttaatgacatagagcttcctcttataaccgtacttgccagtatggaataccacggtttcaaagttgacgccgcaaaacttcacgaatacggcgaagttcttctgtcacgcataaaagacctggaaaaggtaatttacatgctggccggtgaagaattcaacatcaattcaacgaagcagcttggtaccatattattcgaaaaactgaagcttcccgttgtaaaaagtacaaagaccggatactccaccgacgtcgaggttcttgaagagctttattacaagcatgatataataccatgcataatagaataccgccagcttacaaaactttacaccacctacgccgaaggtcttgaaaaagtgataaatcctgtaaccggtaaaattcattcaagttttaaccagacggttacggctacaggccgcatcagcagtaccgaaccaaatttacagaatatcccagtcagacacgaaatgggaagggaaatacggaaagcttttattccgtcgtcggaaaacgctgtttttgttgatgccgattattcacagatagagcttcgcgtgcttgcccatataacaggcgatgaagccctgataaatgctttcgttaagggggaagatattcatacggccacggcgtcgctggtatttgacgtagctcccgaagatgtgacgccggaactgcgcagaaaggcaaaagccgtaaatttcggcatagtgtacgggatcagtgattacgggctggcacgggatttgggaattacccggaaggaagcaaagcggtatatagacgactattttgccaaataccccaaagtaaaaacctatgtggatgaaattgtgcgggtcggccaggaacaggggtatgtggaaactctgttccacagaagaagataccttcccgagcttgcatctaaaaatatgcaccagcgttctttcggaaaaagggttgcaatgaatacgcccatacagggcactgcagccgatattattaaaattgcgatggtgaaggtatacaaggctttgaaagaatccggccttaaatccaggcttatcctccaggtccatgacgaacttgttattgagacttttgaagacgaactggagactgtcaaggaacttgtcaaaaagtgcatggaagaggccgttgaattgagtgtgccgcttgttgtcgacgtttcaatcgggaaaaactggtatgaagcctcctgatatggatcc

SEQ ID NO: 324 - DNA, 2772 bp, Artificial Sequence
  Description of Artificial Sequence: Synthetic Clostridium stercorarium DNA Polymerase F825P
atgaaatacctgctgccgaccgctgctgctggtctgctgctcctcgctgcccagccggcgatggccatggatccaaaaataatccttatagacggaaacagtattttaaaccgcggtttttatgccctgtcggggcgatccatgctgactacgtccacaggtctgtataccaatgcggttttcgcttttgtaaatatattgaacaaatatatcgaagaggaaaaccctgattatattgccgttgctttcgatcttagggcaaaaactttccggcacggtctatatgagggatacaaagcgcagcggaaaggcatgcccgatgaacttgcaatgcagatacccctcgcgaaggaagtactgagggcgatgaatattgccataatagagcatgaaggttatgaagccgacgatataatcggcagcctttcgttaaaggccgaaaaagagaattttgacgtaataatccttacgggggacagggattctttccagctgatcagcgacagggtgaaagttatcctgccttcgacgaaagccggaaaaacagagaccaacgtatatgataaacaggccatcattgacaaatacggagttttaccccatcagcttattgacgttaaaggcttaatgggagattcgtcagataatatacccggcgttccgggagtgggtgagaaaacggcgttaagccttatttcagcctacggtacactggaaggtgtttacgagcatattgatgaaataaaacagcctaagctgaaagcatcgctgattgaatataaggatcaggcgtttttaagccgtaagctgggtactattgtaagaaatctggagctgtgtgcttcgctggaggatctgaaaagaaaagaaataaaccgcaaagagcttttgaatgttttcagaaaactcgaatttgaaagtatcatatcaaaaatgaatcttgcttccgctgaggtgacagaattacctcccgcgccggaagagcttaaaataacccatatttcagcggcagaggatcttaagaaatggattgcttacctgcttaaccagaaaaacatttccgtccttcaactgattgaccgggaggattcatacagttcccgtctttcagggctggctttgtgcaccggggatgaggttttttatatcgagaccgggactgcactccccgagaatttgattgcaacagagctgaaagaactgtggcagaatgaaaatattcacaaaatcggacacaatataaaagaatttataacctggctgctgaaacacgatgttgaactgaacggcctttatttcgacactatgattgccgaatacctgatagattccataagaaacggctatcctatagcaagcctttctcacaaatacctgaatcgcagcgttccgtcgctggacgaacttttgggcaagggaaagggagcaaaaaagtactctgaaattccgcccgaaaggctgaaagattacagcgcttataacgtcaaagccatttttgacatatggccgatgcagaaaaaagttcttcaggaaaaccggcaggaggagctttttaatgacatagagcttcctcttataaccgtacttgccagtatggaataccacggtttcaaagttgacgccgcaaaacttcacgaatacggcgaagttcttctgtcacgcataaaagacctggaaaaggtaatttacatgctggccggtgaagaattcaacatcaattcaacgaagcagcttggtaccatattattcgaaaaactgaagcttcccgttgtaaaaagtacaaagaccggatactccaccgacgtcgaggttcttgaagagctttattacaagcatgatataataccatgcataatagaataccgccagcttacaaaactttacaccacctacgccgaaggtcttgaaaaagtgataaatcctgtaaccggtaaaattcattcaagttttaaccagacggttacggctacaggccgcatcagcagtaccgaaccaaatttacagaatatcccagtcagacacgaaatgggaagggaaatacggaaagcttttattccgtcgtcggaaaacgctgtttttgttgatgccgattattcacagatagagcttcgcgtgcttgcccatataacaggcgatgaagccctgataaatgctttcgttaagggggaagatattcatacggccacggcgtcgctggtatttgacgtagctcccgaagatgtgacgccggaactgcgcagaaaggcaaaagccgtaaatttcggcatagtgtacgggatcagtgattacgggctggcacgggatttgggaattacccggaaggaagcaaagcggtatatagacgactattttgccaaataccccaaagtaaaaacctatgtggatgaaattgtgcgggtcggccaggaacaggggtatgtggaaactctgttccacagaagaagataccttcccgagcttgcatctaaaaatcctcaccagcgttctttcggaaaaagggttgcaatgaatacgcccatacagggcactgcagccgatattattaaaattgcgatggtgaaggtatacaaggctttgaaagaatccggccttaaatccaggcttatcctccaggtccatgacgaacttgttattgagacttttgaagacgaactggagactgtcaaggaacttgtcaaaaagtgcatggaagaggccgttgaattgagtgtgccgcttgttgtcgacgtttcaatcgggaaaaactggtatgaagcctcctgatatggatcc

SEQ ID NO: 325 - DNA, 2772 bp, Artificial Sequence
  Description of Artificial Sequence: Synthetic Clostridium stercorarium DNA Polymerase F825S
atgaaatacctgctgccgaccgctgctgctggtctgctgctcctcgctgcccagccggcgatggccatggatccaaaaataatccttatagacggaaacagtattttaaaccgcggtttttatgccctgtcggggcgatccatgctgactacgtccacaggtctgtataccaatgcggttttcgcttttgtaaatatattgaacaaatatatcgaagaggaaaaccctgattatattgccgttgctttcgatcttagggcaaaaactttccggcacggtctatatgagggatacaaagcgcagcggaaaggcatgcccgatgaacttgcaatgcagatacccctcgcgaaggaagtactgagggcgatgaatattgccataatagagcatgaaggttatgaagccgacgatataatcggcagcctttcgttaaaggccgaaaaagagaattttgacgtaataatccttacgggggacagggattctttccagctgatcagcgacagggtgaaagttatcctgccttcgacgaaagccggaaaaacagagaccaacgtatatgataaacaggccatcattgacaaatacggagttttaccccatcagcttattgacgttaaaggcttaatgggagattcgtcagataatatacccggcgttccgggagtgggtgagaaaacggcgttaagccttatttcagcctacggtacactggaaggtgtttacgagcatattgatgaaataaaacagcctaagctgaaagcatcgctgattgaatataaggatcaggcgtttttaagccgtaagctgggtactattgtaagaaatctggagctgtgtgcttcgctggaggatctgaaaagaaaagaaataaaccgcaaagagcttttgaatgttttcagaaaactcgaatttgaaagtatcatatcaaaaatgaatcttgcttccgctgaggtgacagaattacctcccgcgccggaagagcttaaaataacccatatttcagcggcagaggatcttaagaaatggattgcttacctgcttaaccagaaaaacatttccgtccttcaactgattgaccgggaggattcatacagttcccgtctttcagggctggctttgtgcaccggggatgaggttttttatatcgagaccgggactgcactccccgagaatttgattgcaacagagctgaaagaactgtggcagaatgaaaatattcacaaaatcggacacaatataaaagaatttataacctggctgctgaaacacgatgttgaactgaacggcctttatttcgacactatgattgccgaatacctgatagattccataagaaacggctatcctatagcaagcctttctcacaaatacctgaatcgcagcgttccgtcgctggacgaacttttgggcaagggaaagggagcaaaaaagtactctgaaattccgcccgaaaggctgaaagattacagcgcttataacgtcaaagccatttttgacatatggccgatgcagaaaaaagttcttcaggaaaaccggcaggaggagctttttaatgacatagagcttcctcttataaccgtacttgccagtatggaataccacggtttcaaagttgacgccgcaaaacttcacgaatacggcgaagttcttctgtcacgcataaaagacctggaaaaggtaatttacatgctggccggtgaagaattcaacatcaattcaacgaagcagcttggtaccatattattcgaaaaactgaagcttcccgttgtaaaaagtacaaagaccggatactccaccgacgtcgaggttcttgaagagctttattacaagcatgatataataccatgcataatagaataccgccagcttacaaaactttacaccacctacgccgaaggtcttgaaaaagtgataaatcctgtaaccggtaaaattcattcaagttttaaccagacggttacggctacaggccgcatcagcagtaccgaaccaaatttacagaatatcccagtcagacacgaaatgggaagggaaatacggaaagcttttattccgtcgtcggaaaacgctgtttttgttgatgccgattattcacagatagagcttcgcgtgcttgcccatataacaggcgatgaagccctgataaatgctttcgttaagggggaagatattcatacggccacggcgtcgctggtatttgacgtagctcccgaagatgtgacgccggaactgcgcagaaaggcaaaagccgtaaatttcggcatagtgtacgggatcagtgattacgggctggcacgggatttgggaattacccggaaggaagcaaagcggtatatagacgactattttgccaaataccccaaagtaaaaacctatgtggatgaaattgtgcgggtcggccaggaacaggggtatgtggaaactctgttccacagaagaagataccttcccgagcttgcatctaaaaattctcaccagcgttctttcggaaaaagggttgcaatgaatacgcccatacagggcactgcagccgatattattaaaattgcgatggtgaaggtatacaaggctttgaaagaatccggccttaaatccaggcttatcctccaggtccatgacgaacttgttattgagacttttgaagacgaactggagactgtcaaggaacttgtcaaaaagtgcatggaagaggccgttgaattgagtgtgccgcttgttgtcgacgtttcaatcgggaaaaactggtatgaagcctcctgatatggatcc

SEQ ID NO: 326 - DNA, 2772 bp, Artificial Sequence
  Description of Artificial Sequence: Synthetic Clostridium stercorarium DNA Polymerase F825T
atgaaatacctgctgccgaccgctgctgctggtctgctgctcctcgctgcccagccggcgatggccatggatccaaaaataatccttatagacggaaacagtattttaaaccgcggtttttatgccctgtcggggcgatccatgctgactacgtccacaggtctgtataccaatgcggttttcgcttttgtaaatatattgaacaaatatatcgaagaggaaaaccctgattatattgccgttgctttcgatcttagggcaaaaactttccggcacggtctatatgagggatacaaagcgcagcggaaaggcatgcccgatgaacttgcaatgcagatacccctcgcgaaggaagtactgagggcgatgaatattgccataatagagcatgaaggttatgaagccgacgatataatcggcagcctttcgttaaaggccgaaaaagagaattttgacgtaataatccttacgggggacagggattctttccagctgatcagcgacagggtgaaagttatcctgccttcgacgaaagccggaaaaacagagaccaacgtatatgataaacaggccatcattgacaaatacggagttttaccccatcagcttattgacgttaaaggcttaatgggagattcgtcagataatatacccggcgttccgggagtgggtgagaaaacggcgttaagccttatttcagcctacggtacactggaaggtgtttacgagcatattgatgaaataaaacagcctaagctgaaagcatcgctgattgaatataaggatcaggcgtttttaagccgtaagctgggtactattgtaagaaatctggagctgtgtgcttcgctggaggatctgaaaagaaaagaaataaaccgcaaagagcttttgaatgttttcagaaaactcgaatttgaaagtatcatatcaaaaatgaatcttgcttccgctgaggtgacagaattacctcccgcgccggaagagcttaaaataacccatatttcagcggcagaggatcttaagaaatggattgcttacctgcttaaccagaaaaacatttccgtccttcaactgattgaccgggaggattcatacagttcccgtctttcagggctggctttgtgcaccggggatgaggttttttatatcgagaccgggactgcactccccgagaatttgattgcaacagagctgaaagaactgtggcagaatgaaaatattcacaaaatcggacacaatataaaagaatttataacctggctgctgaaacacgatgttgaactgaacggcctttatttcgacactatgattgccgaatacctgatagattccataagaaacggctatcctatagcaagcctttctcacaaatacctgaatcgcagcgttccgtcgctggacgaacttttgggcaagggaaagggagcaaaaaagtactctgaaattccgcccgaaaggctgaaagattacagcgcttataacgtcaaagccatttttgacatatggccgatgcagaaaaaagttcttcaggaaaaccggcaggaggagctttttaatgacatagagcttcctcttataaccgtacttgccagtatggaataccacggtttcaaagttgacgccgcaaaacttcacgaatacggcgaagttcttctgtcacgcataaaagacctggaaaaggtaatttacatgctggccggtgaagaattcaacatcaattcaacgaagcagcttggtaccatattattcgaaaaactgaagcttcccgttgtaaaaagtacaaagaccggatactccaccgacgtcgaggttcttgaagagctttattacaagcatgatataataccatgcataatagaataccgccagcttacaaaactttacaccacctacgccgaaggtcttgaaaaagtgataaatcctgtaaccggtaaaattcattcaagttttaaccagacggttacggctacaggccgcatcagcagtaccgaaccaaatttacagaatatcccagtcagacacgaaatgggaagggaaatacggaaagcttttattccgtcgtcggaaaacgctgtttttgttgatgccgattattcacagatagagcttcgcgtgcttgcccatataacaggcgatgaagccctgataaatgctttcgttaagggggaagatattcatacggccacggcgtcgctggtatttgacgtagctcccgaagatgtgacgccggaactgcgcagaaaggcaaaagccgtaaatttcggcatagtgtacgggatcagtgattacgggctggcacgggatttgggaattacccggaaggaagcaaagcggtatatagacgactattttgccaaataccccaaagtaaaaacctatgtggatgaaattgtgcgggtcggccaggaacaggggtatgtggaaactctgttccacagaagaagataccttcccgagcttgcatctaaaaatactcaccagcgttctttcggaaaaagggttgcaatgaatacgcccatacagggcactgcagccgatattattaaaattgcgatggtgaaggtatacaaggctttgaaagaatccggccttaaatccaggcttatcctccaggtccatgacgaacttgttattgagacttttgaagacgaactggagactgtcaaggaacttgtcaaaaagtgcatggaagaggccgttgaattgagtgtgccgcttgttgtcgacgtttcaatcgggaaaaactggtatgaagcctcctgatatggatcc

SEQ ID NO: 327 - DNA, 2772 bp, Artificial Sequence
  Description of Artificial Sequence: Synthetic Clostridium stercorarium DNA Polymerase F825W
atgaaatacctgctgccgaccgctgctgctggtctgctgctcctcgctgcccagccggcgatggccatggatccaaaaataatccttatagacggaaacagtattttaaaccgcggtttttatgccctgtcggggcgatccatgctgactacgtccacaggtctgtataccaatgcggttttcgcttttgtaaatatattgaacaaatatatcgaagaggaaaaccctgattatattgccgttgctttcgatcttagggcaaaaactttccggcacggtctatatgagggatacaaagcgcagcggaaaggcatgcccgatgaacttgcaatgcagatacccctcgcgaaggaagtactgagggcgatgaatattgccataatagagcatgaaggttatgaagccgacgatataatcggcagcctttcgttaaaggccgaaaaagagaattttgacgtaataatccttacgggggacagggattctttccagctgatcagcgacagggtgaaagttatcctgccttcgacgaaagccggaaaaacagagaccaacgtatatgataaacaggccatcattgacaaatacggagttttaccccatcagcttattgacgttaaaggcttaatgggagattcgtcagataatatacccggcgttccgggagtgggtgagaaaacggcgttaagccttatttcagcctacggtacactggaaggtgtttacgagcatattgatgaaataaaacagcctaagctgaaagcatcgctgattgaatataaggatcaggcgtttttaagccgtaagctgggtactattgtaagaaatctggagctgtgtgcttcgctggaggatctgaaaagaaaagaaataaaccgcaaagagcttttgaatgttttcagaaaactcgaatttgaaagtatcatatcaaaaatgaatcttgcttccgctgaggtgacagaattacctcccgcgccggaagagcttaaaataacccatatttcagcggcagaggatcttaagaaatggattgcttacctgcttaaccagaaaaacatttccgtccttcaactgattgaccgggaggattcatacagttcccgtctttcagggctggctttgtgcaccggggatgaggttttttatatcgagaccgggactgcactccccgagaatttgattgcaacagagctgaaagaactgtggcagaatgaaaatattcacaaaatcggacacaatataaaagaatttataacctggctgctgaaacacgatgttgaactgaacggcctttatttcgacactatgattgccgaatacctgatagattccataagaaacggctatcctatagcaagcctttctcacaaatacctgaatcgcagcgttccgtcgctggacgaacttttgggcaagggaaagggagcaaaaaagtactctgaaattccgcccgaaaggctgaaagattacagcgcttataacgtcaaagccatttttgacatatggccgatgcagaaaaaagttcttcaggaaaaccggcaggaggagctttttaatgacatagagcttcctcttataaccgtacttgccagtatggaataccacggtttcaaagttgacgccgcaaaacttcacgaatacggcgaagttcttctgtcacgcataaaagacctggaaaaggtaatttacatgctggccggtgaagaattcaacatcaattcaacgaagcagcttggtaccatattattcgaaaaactgaagcttcccgttgtaaaaagtacaaagaccggatactccaccgacgtcgaggttcttgaagagctttattacaagcatgatataataccatgcataatagaataccgccagcttacaaaactttacaccacctacgccgaaggtcttgaaaaagtgataaatcctgtaaccggtaaaattcattcaagttttaaccagacggttacggctacaggccgcatcagcagtaccgaaccaaatttacagaatatcccagtcagacacgaaatgggaagggaaatacggaaagcttttattccgtcgtcggaaaacgctgtttttgttgatgccgattattcacagatagagcttcgcgtgcttgcccatataacaggcgatgaagccctgataaatgctttcgttaagggggaagatattcatacggccacggcgtcgctggtatttgacgtagctcccgaagatgtgacgccggaactgcgcagaaaggcaaaagccgtaaatttcggcatagtgtacgggatcagtgattacgggctggcacgggatttgggaattacccggaaggaagcaaagcggtatatagacgactattttgccaaataccccaaagtaaaaacctatgtggatgaaattgtgcgggtcggccaggaacaggggtatgtggaaactctgttccacagaagaagataccttcccgagcttgcatctaaaaattggcaccagcgttctttcggaaaaagggttgcaatgaatacgcccatacagggcactgcagccgatattattaaaattgcgatggtgaaggtatacaaggctttgaaagaatccggccttaaatccaggcttatcctccaggtccatgacgaacttgttattgagacttttgaagacgaactggagactgtcaaggaacttgtcaaaaagtgcatggaagaggccgttgaattgagtgtgccgcttgttgtcgacgtttcaatcgggaaaaactggtatgaagcctcctgatatggatcc

SEQ ID NO: 328 - DNA, 2772 bp, Artificial Sequence
  Description of Artificial Sequence: Synthetic Clostridium stercorarium DNA Polymerase F825Y
atgaaatacctgctgccgaccgctgctgctggtctgctgctcctcgctgcccagccggcgatggccatggatccaaaaataatccttatagacggaaacagtattttaaaccgcggtttttatgccctgtcggggcgatccatgctgactacgtccacaggtctgtataccaatgcggttttcgcttttgtaaatatattgaacaaatatatcgaagaggaaaaccctgattatattgccgttgctttcgatcttagggcaaaaactttccggcacggtctatatgagggatacaaagcgcagcggaaaggcatgcccgatgaacttgcaatgcagatacccctcgcgaaggaagtactgagggcgatgaatattgccataatagagcatgaaggttatgaagccgacgatataatcggcagcctttcgttaaaggccgaaaaagagaattttgacgtaataatccttacgggggacagggattctttccagctgatcagcgacagggtgaaagttatcctgccttcgacgaaagccggaaaaacagagaccaacgtatatgataaacaggccatcattgacaaatacggagttttaccccatcagcttattgacgttaaaggcttaatgggagattcgtcagataatatacccggcgttccgggagtgggtgagaaaacggcgttaagccttatttcagcctacggtacactggaaggtgtttacgagcatattgatgaaataaaacagcctaagctgaaagcatcgctgattgaatataaggatcaggcgtttttaagccgtaagctgggtactattgtaagaaatctggagctgtgtgcttcgctggaggatctgaaaagaaaagaaataaaccgcaaagagcttttgaatgttttcagaaaactcgaatttgaaagtatcatatcaaaaatgaatcttgcttccgctgaggtgacagaattacctcccgcgccggaagagcttaaaataacccatatttcagcggcagaggatcttaagaaatggattgcttacctgcttaaccagaaaaacatttccgtccttcaactgattgaccgggaggattcatacagttcccgtctttcagggctggctttgtgcaccggggatgaggttttttatatcgagaccgggactgcactccccgagaatttgattgcaacagagctgaaagaactgtggcagaatgaaaatattcacaaaatcggacacaatataaaagaatttataacctggctgctgaaacacgatgttgaactgaacggcctttatttcgacactatgattgccgaatacctgatagattccataagaaacggctatcctatagcaagcctttctcacaaatacctgaatcgcagcgttccgtcgctggacgaacttttgggcaagggaaagggagcaaaaaagtactctgaaattccgcccgaaaggctgaaagattacagcgcttataacgtcaaagccatttttgacatatggccgatgcagaaaaaagttcttcaggaaaaccggcaggaggagctttttaatgacatagagcttcctcttataaccgtacttgccagtatggaataccacggtttcaaagttgacgccgcaaaacttcacgaatacggcgaagttcttctgtcacgcataaaagacctggaaaaggtaatttacatgctggccggtgaagaattcaacatcaattcaacgaagcagcttggtaccatattattcgaaaaactgaagcttcccgttgtaaaaagtacaaagaccggatactccaccgacgtcgaggttcttgaagagctttattacaagcatgatataataccatgcataatagaataccgccagcttacaaaactttacaccacctacgccgaaggtcttgaaaaagtgataaatcctgtaaccggtaaaattcattcaagttttaaccagacggttacggctacaggccgcatcagcagtaccgaaccaaatttacagaatatcccagtcagacacgaaatgggaagggaaatacggaaagcttttattccgtcgtcggaaaacgctgtttttgttgatgccgattattcacagatagagcttcgcgtgcttgcccatataacaggcgatgaagccctgataaatgctttcgttaagggggaagatattcatacggccacggcgtcgctggtatttgacgtagctcccgaagatgtgacgccggaactgcgcagaaaggcaaaagccgtaaatttcggcatagtgtacgggatcagtgattacgggctggcacgggatttgggaattacccggaaggaagcaaagcggtatatagacgactattttgccaaataccccaaagtaaaaacctatgtggatgaaattgtgcgggtcggccaggaacaggggtatgtggaaactctgttccacagaagaagataccttcccgagcttgcatctaaaaattatcaccagcgttctttcggaaaaagggttgcaatgaatacgcccatacagggcactgcagccgatattattaaaattgcgatggtgaaggtatacaaggctttgaaagaatccggccttaaatccaggcttatcctccaggtccatgacgaacttgttattgagacttttgaagacgaactggagactgtcaaggaacttgtcaaaaagtgcatggaagaggccgttgaattgagtgtgccgcttgttgtcgacgtttcaatcgggaaaaactggtatgaagcctcctgatatggatcc

SEQ ID NO: 329 - DNA, 2772 bp, Artificial Sequence
  Description of Artificial Sequence: Synthetic Clostridium stercorarium DNA Polymerase F825V
atgaaatacctgctgccgaccgctgctgctggtctgctgctcctcgctgcccagccggcgatggccatggatccaaaaataatccttatagacggaaacagtattttaaaccgcggtttttatgccctgtcggggcgatccatgctgactacgtccacaggtctgtataccaatgcggttttcgcttttgtaaatatattgaacaaatatatcgaagaggaaaaccctgattatattgccgttgctttcgatcttagggcaaaaactttccggcacggtctatatgagggatacaaagcgcagcggaaaggcatgcccgatgaacttgcaatgcagatacccctcgcgaaggaagtactgagggcgatgaatattgccataatagagcatgaaggttatgaagccgacgatataatcggcagcctttcgttaaaggccgaaaaagagaattttgacgtaataatccttacgggggacagggattctttccagctgatcagcgacagggtgaaagttatcctgccttcgacgaaagccggaaaaacagagaccaacgtatatgataaacaggccatcattgacaaatacggagttttaccccatcagcttattgacgttaaaggcttaatgggagattcgtcagataatatacccggcgttccgggagtgggtgagaaaacggcgttaagccttatttcagcctacggtacactggaaggtgtttacgagcatattgatgaaataaaacagcctaagctgaaagcatcgctgattgaatataaggatcaggcgtttttaagccgtaagctgggtactattgtaagaaatctggagctgtgtgcttcgctggaggatctgaaaagaaaagaaataaaccgcaaagagcttttgaatgttttcagaaaactcgaatttgaaagtatcatatcaaaaatgaatcttgcttccgctgaggtgacagaattacctcccgcgccggaagagcttaaaataacccatatttcagcggcagaggatcttaagaaatggattgcttacctgcttaaccagaaaaacatttccgtccttcaactgattgaccgggaggattcatacagttcccgtctttcagggctggctttgtgcaccggggatgaggttttttatatcgagaccgggactgcactccccgagaatttgattgcaacagagctgaaagaactgtggcagaatgaaaatattcacaaaatcggacacaatataaaagaatttataacctggctgctgaaacacgatgttgaactgaacggcctttatttcgacactatgattgccgaatacctgatagattccataagaaacggctatcctatagcaagcctttctcacaaatacctgaatcgcagcgttccgtcgctggacgaacttttgggcaagggaaagggagcaaaaaagtactctgaaattccgcccgaaaggctgaaagattacagcgcttataacgtcaaagccatttttgacatatggccgatgcagaaaaaagttcttcaggaaaaccggcaggaggagctttttaatgacatagagcttcctcttataaccgtacttgccagtatggaataccacggtttcaaagttgacgccgcaaaacttcacgaatacggcgaagttcttctgtcacgcataaaagacctggaaaaggtaatttacatgctggccggtgaagaattcaacatcaattcaacgaagcagcttggtaccatattattcgaaaaactgaagcttcccgttgtaaaaagtacaaagaccggatactccaccgacgtcgaggttcttgaagagctttattacaagcatgatataataccatgcataatagaataccgccagcttacaaaactttacaccacctacgccgaaggtcttgaaaaagtgataaatcctgtaaccggtaaaattcattcaagttttaaccagacggttacggctacaggccgcatcagcagtaccgaaccaaatttacagaatatcccagtcagacacgaaatgggaagggaaatacggaaagcttttattccgtcgtcggaaaacgctgtttttgttgatgccgattattcacagatagagcttcgcgtgcttgcccatataacaggcgatgaagccctgataaatgctttcgttaagggggaagatattcatacggccacggcgtcgctggtatttgacgtagctcccgaagatgtgacgccggaactgcgcagaaaggcaaaagccgtaaatttcggcatagtgtacgggatcagtgattacgggctggcacgggatttgggaattacccggaaggaagcaaagcggtatatagacgactattttgccaaataccccaaagtaaaaacctatgtggatgaaattgtgcgggtcggccaggaacaggggtatgtggaaactctgttccacagaagaagataccttcccgagcttgcatctaaaaatgttcaccagcgttctttcggaaaaagggttgcaatgaatacgcccatacagggcactgcagccgatattattaaaattgcgatggtgaaggtatacaaggctttgaaagaatccggccttaaatccaggcttatcctccaggtccatgacgaacttgttattgagacttttgaagacgaactggagactgtcaaggaacttgtcaaaaagtgcatggaagaggccgttgaattgagtgtgccgcttgttgtcgacgtttcaatcgggaaaaactggtatgaagcctcctgatatggatcc

SEQ ID NO: 330 - DNA, 2772 bp, Artificial Sequence
  Description of Artificial Sequence: Synthetic Clostridium stercorarium DNA Polymerase H826A
atgaaatacctgctgccgaccgctgctgctggtctgctgctcctcgctgcccagccggcgatggccatggatccaaaaataatccttatagacggaaacagtattttaaaccgcggtttttatgccctgtcggggcgatccatgctgactacgtccacaggtctgtataccaatgcggttttcgcttttgtaaatatattgaacaaatatatcgaagaggaaaaccctgattatattgccgttgctttcgatcttagggcaaaaactttccggcacggtctatatgagggatacaaagcgcagcggaaaggcatgcccgatgaacttgcaatgcagatacccctcgcgaaggaagtactgagggcgatgaatattgccataatagagcatgaaggttatgaagccgacgatataatcggcagcctttcgttaaaggccgaaaaagagaattttgacgtaataatccttacgggggacagggattctttccagctgatcagcgacagggtgaaagttatcctgccttcgacgaaagccggaaaaacagagaccaacgtatatgataaacaggccatcattgacaaatacggagttttaccccatcagcttattgacgttaaaggcttaatgggagattcgtcagataatatacccggcgttccgggagtgggtgagaaaacggcgttaagccttatttcagcctacggtacactggaaggtgtttacgagcatattgatgaaataaaacagcctaagctgaaagcatcgctgattgaatataaggatcaggcgtttttaagccgtaagctgggtactattgtaagaaatctggagctgtgtgcttcgctggaggatctgaaaagaaaagaaataaaccgcaaagagcttttgaatgttttcagaaaactcgaatttgaaagtatcatatcaaaaatgaatcttgcttccgctgaggtgacagaattacctcccgcgccggaagagcttaaaataacccatatttcagcggcagaggatcttaagaaatggattgcttacctgcttaaccagaaaaacatttccgtccttcaactgattgaccgggaggattcatacagttcccgtctttcagggctggctttgtgcaccggggatgaggttttttatatcgagaccgggactgcactccccgagaatttgattgcaacagagctgaaagaactgtggcagaatgaaaatattcacaaaatcggacacaatataaaagaatttataacctggctgctgaaacacgatgttgaactgaacggcctttatttcgacactatgattgccgaatacctgatagattccataagaaacggctatcctatagcaagcctttctcacaaatacctgaatcgcagcgttccgtcgctggacgaacttttgggcaagggaaagggagcaaaaaagtactctgaaattccgcccgaaaggctgaaagattacagcgcttataacgtcaaagccatttttgacatatggccgatgcagaaaaaagttcttcaggaaaaccggcaggaggagctttttaatgacatagagcttcctcttataaccgtacttgccagtatggaataccacggtttcaaagttgacgccgcaaaacttcacgaatacggcgaagttcttctgtcacgcataaaagacctggaaaaggtaatttacatgctggccggtgaagaattcaacatcaattcaacgaagcagcttggtaccatattattcgaaaaactgaagcttcccgttgtaaaaagtacaaagaccggatactccaccgacgtcgaggttcttgaagagctttattacaagcatgatataataccatgcataatagaataccgccagcttacaaaactttacaccacctacgccgaaggtcttgaaaaagtgataaatcctgtaaccggtaaaattcattcaagttttaaccagacggttacggctacaggccgcatcagcagtaccgaaccaaatttacagaatatcccagtcagacacgaaatgggaagggaaatacggaaagcttttattccgtcgtcggaaaacgctgtttttgttgatgccgattattcacagatagagcttcgcgtgcttgcccatataacaggcgatgaagccctgataaatgctttcgttaagggggaagatattcatacggccacggcgtcgctggtatttgacgtagctcccgaagatgtgacgccggaactgcgcagaaaggcaaaagccgtaaatttcggcatagtgtacgggatcagtgattacgggctggcacgggatttgggaattacccggaaggaagcaaagcggtatatagacgactattttgccaaataccccaaagtaaaaacctatgtggatgaaattgtgcgggtcggccaggaacaggggtatgtggaaactctgttccacagaagaagataccttcccgagcttgcatctaaaaattttgctcagcgttctttcggaaaaagggttgcaatgaatacgcccatacagggcactgcagccgatattattaaaattgcgatggtgaaggtatacaaggctttgaaagaatccggccttaaatccaggcttatcctccaggtccatgacgaacttgttattgagacttttgaagacgaactggagactgtcaaggaacttgtcaaaaagtgcatggaagaggccgttgaattgagtgtgccgcttgttgtcgacgtttcaatcgggaaaaactggtatgaagcctcctgatatggatcc

SEQ ID NO: 331 - DNA, 2772 bp, Artificial Sequence
  Description of Artificial Sequence: Synthetic Clostridium stercorarium DNA Polymerase H826R
atgaaatacctgctgccgaccgctgctgctggtctgctgctcctcgctgcccagccggcgatggccatggatccaaaaataatccttatagacggaaacagtattttaaaccgcggtttttatgccctgtcggggcgatccatgctgactacgtccacaggtctgtataccaatgcggttttcgcttttgtaaatatattgaacaaatatatcgaagaggaaaaccctgattatattgccgttgctttcgatcttagggcaaaaactttccggcacggtctatatgagggatacaaagcgcagcggaaaggcatgcccgatgaacttgcaatgcagatacccctcgcgaaggaagtactgagggcgatgaatattgccataatagagcatgaaggttatgaagccgacgatataatcggcagcctttcgttaaaggccgaaaaagagaattttgacgtaataatccttacgggggacagggattctttccagctgatcagcgacagggtgaaagttatcctgccttcgacgaaagccggaaaaacagagaccaacgtatatgataaacaggccatcattgacaaatacggagttttaccccatcagcttattgacgttaaaggcttaatgggagattcgtcagataatatacccggcgttccgggagtgggtgagaaaacggcgttaagccttatttcagcctacggtacactggaaggtgtttacgagcatattgatgaaataaaacagcctaagctgaaagcatcgctgattgaatataaggatcaggcgtttttaagccgtaagctgggtactattgtaagaaatctggagctgtgtgcttcgctggaggatctgaaaagaaaagaaataaaccgcaaagagcttttgaatgttttcagaaaactcgaatttgaaagtatcatatcaaaaatgaatcttgcttccgctgaggtgacagaattacctcccgcgccggaagagcttaaaataacccatatttcagcggcagaggatcttaagaaatggattgcttacctgcttaaccagaaaaacatttccgtccttcaactgattgaccgggaggattcatacagttcccgtctttcagggctggctttgtgcaccggggatgaggttttttatatcgagaccgggactgcactccccgagaatttgattgcaacagagctgaaagaactgtggcagaatgaaaatattcacaaaatcggacacaatataaaagaatttataacctggctgctgaaacacgatgttgaactgaacggcctttatttcgacactatgattgccgaatacctgatagattccataagaaacggctatcctatagcaagcctttctcacaaatacctgaatcgcagcgttccgtcgctggacgaacttttgggcaagggaaagggagcaaaaaagtactctgaaattccgcccgaaaggctgaaagattacagcgcttataacgtcaaagccatttttgacatatggccgatgcagaaaaaagttcttcaggaaaaccggcaggaggagctttttaatgacatagagcttcctcttataaccgtacttgccagtatggaataccacggtttcaaagttgacgccgcaaaacttcacgaatacggcgaagttcttctgtcacgcataaaagacctggaaaaggtaatttacatgctggccggtgaagaattcaacatcaattcaacgaagcagcttggtaccatattattcgaaaaactgaagcttcccgttgtaaaaagtacaaagaccggatactccaccgacgtcgaggttcttgaagagctttattacaagcatgatataataccatgcataatagaataccgccagcttacaaaactttacaccacctacgccgaaggtcttgaaaaagtgataaatcctgtaaccggtaaaattcattcaagttttaaccagacggttacggctacaggccgcatcagcagtaccgaaccaaatttacagaatatcccagtcagacacgaaatgggaagggaaatacggaaagcttttattccgtcgtcggaaaacgctgtttttgttgatgccgattattcacagatagagcttcgcgtgcttgcccatataacaggcgatgaagccctgataaatgctttcgttaagggggaagatattcatacggccacggcgtcgctggtatttgacgtagctcccgaagatgtgacgccggaactgcgcagaaaggcaaaagccgtaaatttcggcatagtgtacgggatcagtgattacgggctggcacgggatttgggaattacccggaaggaagcaaagcggtatatagacgactattttgccaaataccccaaagtaaaaacctatgtggatgaaattgtgcgggtcggccaggaacaggggtatgtggaaactctgttccacagaagaagataccttcccgagcttgcatctaaaaattttcgtcagcgttctttcggaaaaagggttgcaatgaatacgcccatacagggcactgcagccgatattattaaaattgcgatggtgaaggtatacaaggctttgaaagaatccggccttaaatccaggcttatcctccaggtccatgacgaacttgttattgagacttttgaagacgaactggagactgtcaaggaacttgtcaaaaagtgcatggaagaggccgttgaattgagtgtgccgcttgttgtcgacgtttcaatcgggaaaaactggtatgaagcctcctgatatggatcc

SEQ ID NO: 332 - DNA, 2772 bp, Artificial Sequence
  Description of Artificial Sequence: Synthetic Clostridium stercorarium DNA Polymerase H826N
atgaaatacctgctgccgaccgctgctgctggtctgctgctcctcgctgcccagccggcgatggccatggatccaaaaataatccttatagacggaaacagtattttaaaccgcggtttttatgccctgtcggggcgatccatgctgactacgtccacaggtctgtataccaatgcggttttcgcttttgtaaatatattgaacaaatatatcgaagaggaaaaccctgattatattgccgttgctttcgatcttagggcaaaaactttccggcacggtctatatgagggatacaaagcgcagcggaaaggcatgcccgatgaacttgcaatgcagatacccctcgcgaaggaagtactgagggcgatgaatattgccataatagagcatgaaggttatgaagccgacgatataatcggcagcctttcgttaaaggccgaaaaagagaattttgacgtaataatccttacgggggacagggattctttccagctgatcagcgacagggtgaaagttatcctgccttcgacgaaagccggaaaaacagagaccaacgtatatgataaacaggccatcattgacaaatacggagttttaccccatcagcttattgacgttaaaggcttaatgggagattcgtcagataatatacccggcgttccgggagtgggtgagaaaacggcgttaagccttatttcagcctacggtacactggaaggtgtttacgagcatattgatgaaataaaacagcctaagctgaaagcatcgctgattgaatataaggatcaggcgtttttaagccgtaagctgggtactattgtaagaaatctggagctgtgtgcttcgctggaggatctgaaaagaaaagaaataaaccgcaaagagcttttgaatgttttcagaaaactcgaatttgaaagtatcatatcaaaaatgaatcttgcttccgctgaggtgacagaattacctcccgcgccggaagagcttaaaataacccatatttcagcggcagaggatcttaagaaatggattgcttacctgcttaaccagaaaaacatttccgtccttcaactgattgaccgggaggattcatacagttcccgtctttcagggctggctttgtgcaccggggatgaggttttttatatcgagaccgggactgcactccccgagaatttgattgcaacagagctgaaagaactgtggcagaatgaaaatattcacaaaatcggacacaatataaaagaatttataacctggctgctgaaacacgatgttgaactgaacggcctttatttcgacactatgattgccgaatacctgatagattccataagaaacggctatcctatagcaagcctttctcacaaatacctgaatcgcagcgttccgtcgctggacgaacttttgggcaagggaaagggagcaaaaaagtactctgaaattccgcccgaaaggctgaaagattacagcgcttataacgtcaaagccatttttgacatatggccgatgcagaaaaaagttcttcaggaaaaccggcaggaggagctttttaatgacatagagcttcctcttataaccgtacttgccagtatggaataccacggtttcaaagttgacgccgcaaaacttcacgaatacggcgaagttcttctgtcacgcataaaagacctggaaaaggtaatttacatgctggccggtgaagaattcaacatcaattcaacgaagcagcttggtaccatattattcgaaaaactgaagcttcccgttgtaaaaagtacaaagaccggatactccaccgacgtcgaggttcttgaagagctttattacaagcatgatataataccatgcataatagaataccgccagcttacaaaactttacaccacctacgccgaaggtcttgaaaaagtgataaatcctgtaaccggtaaaattcattcaagttttaaccagacggttacggctacaggccgcatcagcagtaccgaaccaaatttacagaatatcccagtcagacacgaaatgggaagggaaatacggaaagcttttattccgtcgtcggaaaacgctgtttttgttgatgccgattattcacagatagagcttcgcgtgcttgcccatataacaggcgatgaagccctgataaatgctttcgttaagggggaagatattcatacggccacggcgtcgctggtatttgacgtagctcccgaagatgtgacgccggaactgcgcagaaaggcaaaagccgtaaatttcggcatagtgtacgggatcagtgattacgggctggcacgggatttgggaattacccggaaggaagcaaagcggtatatagacgactattttgccaaataccccaaagtaaaaacctatgtggatgaaattgtgcgggtcggccaggaacaggggtatgtggaaactctgttccacagaagaagataccttcccgagcttgcatctaaaaattttaatcagcgttctttcggaaaaagggttgcaatgaatacgcccatacagggcactgcagccgatattattaaaattgcgatggtgaaggtatacaaggctttgaaagaatccggccttaaatccaggcttatcctccaggtccatgacgaacttgttattgagacttttgaagacgaactggagactgtcaaggaacttgtcaaaaagtgcatggaagaggccgttgaattgagtgtgccgcttgttgtcgacgtttcaatcgggaaaaactggtatgaagcctcctgatatggatcc

SEQ ID NO: 333 - DNA, 2772 bp, Artificial Sequence
  Description of Artificial Sequence: Synthetic Clostridium stercorarium DNA Polymerase H826D
atgaaatacctgctgccgaccgctgctgctggtctgctgctcctcgctgcccagccggcgatggccatggatccaaaaataatccttatagacggaaacagtattttaaaccgcggtttttatgccctgtcggggcgatccatgctgactacgtccacaggtctgtataccaatgcggttttcgcttttgtaaatatattgaacaaatatatcgaagaggaaaaccctgattatattgccgttgctttcgatcttagggcaaaaactttccggcacggtctatatgagggatacaaagcgcagcggaaaggcatgcccgatgaacttgcaatgcagatacccctcgcgaaggaagtactgagggcgatgaatattgccataatagagcatgaaggttatgaagccgacgatataatcggcagcctttcgttaaaggccgaaaaagagaattttgacgtaataatccttacgggggacagggattctttccagctgatcagcgacagggtgaaagttatcctgccttcgacgaaagccggaaaaacagagaccaacgtatatgataaacaggccatcattgacaaatacggagttttaccccatcagcttattgacgttaaaggcttaatgggagattcgtcagataatatacccggcgttccgggagtgggtgagaaaacggcgttaagccttatttcagcctacggtacactggaaggtgtttacgagcatattgatgaaataaaacagcctaagctgaaagcatcgctgattgaatataaggatcaggcgtttttaagccgtaagctgggtactattgtaagaaatctggagctgtgtgcttcgctggaggatctgaaaagaaaagaaataaaccgcaaagagcttttgaatgttttcagaaaactcgaatttgaaagtatcatatcaaaaatgaatcttgcttccgctgaggtgacagaattacctcccgcgccggaagagcttaaaataacccatatttcagcggcagaggatcttaagaaatggattgcttacctgcttaaccagaaaaacatttccgtccttcaactgattgaccgggaggattcatacagttcccgtctttcagggctggctttgtgcaccggggatgaggttttttatatcgagaccgggactgcactccccgagaatttgattgcaacagagctgaaagaactgtggcagaatgaaaatattcacaaaatcggacacaatataaaagaatttataacctggctgctgaaacacgatgttgaactgaacggcctttatttcgacactatgattgccgaatacctgatagattccataagaaacggctatcctatagcaagcctttctcacaaatacctgaatcgcagcgttccgtcgctggacgaacttttgggcaagggaaagggagcaaaaaagtactctgaaattccgcccgaaaggctgaaagattacagcgcttataacgtcaaagccatttttgacatatggccgatgcagaaaaaagttcttcaggaaaaccggcaggaggagctttttaatgacatagagcttcctcttataaccgtacttgccagtatggaataccacggtttcaaagttgacgccgcaaaacttcacgaatacggcgaagttcttctgtcacgcataaaagacctggaaaaggtaatttacatgctggccggtgaagaattcaacatcaattcaacgaagcagcttggtaccatattattcgaaaaactgaagcttcccgttgtaaaaagtacaaagaccggatactccaccgacgtcgaggttcttgaagagctttattacaagcatgatataataccatgcataatagaataccgccagcttacaaaactttacaccacctacgccgaaggtcttgaaaaagtgataaatcctgtaaccggtaaaattcattcaagttttaaccagacggttacggctacaggccgcatcagcagtaccgaaccaaatttacagaatatcccagtcagacacgaaatgggaagggaaatacggaaagcttttattccgtcgtcggaaaacgctgtttttgttgatgccgattattcacagatagagcttcgcgtgcttgcccatataacaggcgatgaagccctgataaatgctttcgttaagggggaagatattcatacggccacggcgtcgctggtatttgacgtagctcccgaagatgtgacgccggaactgcgcagaaaggcaaaagccgtaaatttcggcatagtgtacgggatcagtgattacgggctggcacgggatttgggaattacccggaaggaagcaaagcggtatatagacgactattttgccaaataccccaaagtaaaaacctatgtggatgaaattgtgcgggtcggccaggaacaggggtatgtggaaactctgttccacagaagaagataccttcccgagcttgcatctaaaaattttgatcagcgttctttcggaaaaagggttgcaatgaatacgcccatacagggcactgcagccgatattattaaaattgcgatggtgaaggtatacaaggctttgaaagaatccggccttaaatccaggcttatcctccaggtccatgacgaacttgttattgagacttttgaagacgaactggagactgtcaaggaacttgtcaaaaagtgcatggaagaggccgttgaattgagtgtgccgcttgttgtcgacgtttcaatcgggaaaaactggtatgaagcctcctgatatggatcc

SEQ ID NO: 334 - DNA, 2772 bp, Artificial Sequence
  Description of Artificial Sequence: Synthetic Clostridium stercorarium DNA Polymerase H826C
atgaaatacctgctgccgaccgctgctgctggtctgctgctcctcgctgcccagccggcgatggccatggatccaaaaataatccttatagacggaaacagtattttaaaccgcggtttttatgccctgtcggggcgatccatgctgactacgtccacaggtctgtataccaatgcggttttcgcttttgtaaatatattgaacaaatatatcgaagaggaaaaccctgattatattgccgttgctttcgatcttagggcaaaaactttccggcacggtctatatgagggatacaaagcgcagcggaaaggcatgcccgatgaacttgcaatgcagatacccctcgcgaaggaagtactgagggcgatgaatattgccataatagagcatgaaggttatgaagccgacgatataatcggcagcctttcgttaaaggccgaaaaagagaattttgacgtaataatccttacgggggacagggattctttccagctgatcagcgacagggtgaaagttatcctgccttcgacgaaagccggaaaaacagagaccaacgtatatgataaacaggccatcattgacaaatacggagttttaccccatcagcttattgacgttaaaggcttaatgggagattcgtcagataatatacccggcgttccgggagtgggtgagaaaacggcgttaagccttatttcagcctacggtacactggaaggtgtttacgagcatattgatgaaataaaacagcctaagctgaaagcatcgctgattgaatataaggatcaggcgtttttaagccgtaagctgggtactattgtaagaaatctggagctgtgtgcttcgctggaggatctgaaaagaaaagaaataaaccgcaaagagcttttgaatgttttcagaaaactcgaatttgaaagtatcatatcaaaaatgaatcttgcttccgctgaggtgacagaattacctcccgcgccggaagagcttaaaataacccatatttcagcggcagaggatcttaagaaatggattgcttacctgcttaaccagaaaaacatttccgtccttcaactgattgaccgggaggattcatacagttcccgtctttcagggctggctttgtgcaccggggatgaggttttttatatcgagaccgggactgcactccccgagaatttgattgcaacagagctgaaagaactgtggcagaatgaaaatattcacaaaatcggacacaatataaaagaatttataacctggctgctgaaacacgatgttgaactgaacggcctttatttcgacactatgattgccgaatacctgatagattccataagaaacggctatcctatagcaagcctttctcacaaatacctgaatcgcagcgttccgtcgctggacgaacttttgggcaagggaaagggagcaaaaaagtactctgaaattccgcccgaaaggctgaaagattacagcgcttataacgtcaaagccatttttgacatatggccgatgcagaaaaaagttcttcaggaaaaccggcaggaggagctttttaatgacatagagcttcctcttataaccgtacttgccagtatggaataccacggtttcaaagttgacgccgcaaaacttcacgaatacggcgaagttcttctgtcacgcataaaagacctggaaaaggtaatttacatgctggccggtgaagaattcaacatcaattcaacgaagcagcttggtaccatattattcgaaaaactgaagcttcccgttgtaaaaagtacaaagaccggatactccaccgacgtcgaggttcttgaagagctttattacaagcatgatataataccatgcataatagaataccgccagcttacaaaactttacaccacctacgccgaaggtcttgaaaaagtgataaatcctgtaaccggtaaaattcattcaagttttaaccagacggttacggctacaggccgcatcagcagtaccgaaccaaatttacagaatatcccagtcagacacgaaatgggaagggaaatacggaaagcttttattccgtcgtcggaaaacgctgtttttgttgatgccgattattcacagatagagcttcgcgtgcttgcccatataacaggcgatgaagccctgataaatgctttcgttaagggggaagatattcatacggccacggcgtcgctggtatttgacgtagctcccgaagatgtgacgccggaactgcgcagaaaggcaaaagccgtaaatttcggcatagtgtacgggatcagtgattacgggctggcacgggatttgggaattacccggaaggaagcaaagcggtatatagacgactattttgccaaataccccaaagtaaaaacctatgtggatgaaattgtgcgggtcggccaggaacaggggtatgtggaaactctgttccacagaagaagataccttcccgagcttgcatctaaaaatttttgtcagcgttctttcggaaaaagggttgcaatgaatacgcccatacagggcactgcagccgatattattaaaattgcgatggtgaaggtatacaaggctttgaaagaatccggccttaaatccaggcttatcctccaggtccatgacgaacttgttattgagacttttgaagacgaactggagactgtcaaggaacttgtcaaaaagtgcatggaagaggccgttgaattgagtgtgccgcttgttgtcgacgtttcaatcgggaaaaactggtatgaagcctcctgatatggatcc

SEQ ID NO: 335 - DNA, 2772 bp, Artificial Sequence
  Description of Artificial Sequence: Synthetic Clostridium stercorarium DNA Polymerase H826E
atgaaatacctgctgccgaccgctgctgctggtctgctgctcctcgctgcccagccggcgatggccatggatccaaaaataatccttatagacggaaacagtattttaaaccgcggtttttatgccctgtcggggcgatccatgctgactacgtccacaggtctgtataccaatgcggttttcgcttttgtaaatatattgaacaaatatatcgaagaggaaaaccctgattatattgccgttgctttcgatcttagggcaaaaactttccggcacggtctatatgagggatacaaagcgcagcggaaaggcatgcccgatgaacttgcaatgcagatacccctcgcgaaggaagtactgagggcgatgaatattgccataatagagcatgaaggttatgaagccgacgatataatcggcagcctttcgttaaaggccgaaaaagagaattttgacgtaataatccttacgggggacagggattctttccagctgatcagcgacagggtgaaagttatcctgccttcgacgaaagccggaaaaacagagaccaacgtatatgataaacaggccatcattgacaaatacggagttttaccccatcagcttattgacgttaaaggcttaatgggagattcgtcagataatatacccggcgttccgggagtgggtgagaaaacggcgttaagccttatttcagcctacggtacactggaaggtgtttacgagcatattgatgaaataaaacagcctaagctgaaagcatcgctgattgaatataaggatcaggcgtttttaagccgtaagctgggtactattgtaagaaatctggagctgtgtgcttcgctggaggatctgaaaagaaaagaaataaaccgcaaagagcttttgaatgttttcagaaaactcgaatttgaaagtatcatatcaaaaatgaatcttgcttccgctgaggtgacagaattacctcccgcgccggaagagcttaaaataacccatatttcagcggcagaggatcttaagaaatggattgcttacctgcttaaccagaaaaacatttccgtccttcaactgattgaccgggaggattcatacagttcccgtctttcagggctggctttgtgcaccggggatgaggttttttatatcgagaccgggactgcactccccgagaatttgattgcaacagagctgaaagaactgtggcagaatgaaaatattcacaaaatcggacacaatataaaagaatttataacctggctgctgaaacacgatgttgaactgaacggcctttatttcgacactatgattgccgaatacctgatagattccataagaaacggctatcctatagcaagcctttctcacaaatacctgaatcgcagcgttccgtcgctggacgaacttttgggcaagggaaagggagcaaaaaagtactctgaaattccgcccgaaaggctgaaagattacagcgcttataacgtcaaagccatttttgacatatggccgatgcagaaaaaagttcttcaggaaaaccggcaggaggagctttttaatgacatagagcttcctcttataaccgtacttgccagtatggaataccacggtttcaaagttgacgccgcaaaacttcacgaatacggcgaagttcttctgtcacgcataaaagacctggaaaaggtaatttacatgctggccggtgaagaattcaacatcaattcaacgaagcagcttggtaccatattattcgaaaaactgaagcttcccgttgtaaaaagtacaaagaccggatactccaccgacgtcgaggttcttgaagagctttattacaagcatgatataataccatgcataatagaataccgccagcttacaaaactttacaccacctacgccgaaggtcttgaaaaagtgataaatcctgtaaccggtaaaattcattcaagttttaaccagacggttacggctacaggccgcatcagcagtaccgaaccaaatttacagaatatcccagtcagacacgaaatgggaagggaaatacggaaagcttttattccgtcgtcggaaaacgctgtttttgttgatgccgattattcacagatagagcttcgcgtgcttgcccatataacaggcgatgaagccctgataaatgctttcgttaagggggaagatattcatacggccacggcgtcgctggtatttgacgtagctcccgaagatgtgacgccggaactgcgcagaaaggcaaaagccgtaaatttcggcatagtgtacgggatcagtgattacgggctggcacgggatttgggaattacccggaaggaagcaaagcggtatatagacgactattttgccaaataccccaaagtaaaaacctatgtggatgaaattgtgcgggtcggccaggaacaggggtatgtggaaactctgttccacagaagaagataccttcccgagcttgcatctaaaaattttgaacagcgttctttcggaaaaagggttgcaatgaatacgcccatacagggcactgcagccgatattattaaaattgcgatggtgaaggtatacaaggctttgaaagaatccggccttaaatccaggcttatcctccaggtccatgacgaacttgttattgagacttttgaagacgaactggagactgtcaaggaacttgtcaaaaagtgcatggaagaggccgttgaattgagtgtgccgcttgttgtcgacgtttcaatcgggaaaaactggtatgaagcctcctgatatggatcc

SEQ ID NO: 336 - DNA, 2772 bp, Artificial Sequence
  Description of Artificial Sequence: Synthetic Clostridium stercorarium DNA Polymerase H826Q
atgaaatacctgctgccgaccgctgctgctggtctgctgctcctcgctgcccagccggcgatggccatggatccaaaaataatccttatagacggaaacagtattttaaaccgcggtttttatgccctgtcggggcgatccatgctgactacgtccacaggtctgtataccaatgcggttttcgcttttgtaaatatattgaacaaatatatcgaagaggaaaaccctgattatattgccgttgctttcgatcttagggcaaaaactttccggcacggtctatatgagggatacaaagcgcagcggaaaggcatgcccgatgaacttgcaatgcagatacccctcgcgaaggaagtactgagggcgatgaatattgccataatagagcatgaaggttatgaagccgacgatataatcggcagcctttcgttaaaggccgaaaaagagaattttgacgtaataatccttacgggggacagggattctttccagctgatcagcgacagggtgaaagttatcctgccttcgacgaaagccggaaaaacagagaccaacgtatatgataaacaggccatcattgacaaatacggagttttaccccatcagcttattgacgttaaaggcttaatgggagattcgtcagataatatacccggcgttccgggagtgggtgagaaaacggcgttaagccttatttcagcctacggtacactggaaggtgtttacgagcatattgatgaaataaaacagcctaagctgaaagcatcgctgattgaatataaggatcaggcgtttttaagccgtaagctgggtactattgtaagaaatctggagctgtgtgcttcgctggaggatctgaaaagaaaagaaataaaccgcaaagagcttttgaatgttttcagaaaactcgaatttgaaagtatcatatcaaaaatgaatcttgcttccgctgaggtgacagaattacctcccgcgccggaagagcttaaaataacccatatttcagcggcagaggatcttaagaaatggattgcttacctgcttaaccagaaaaacatttccgtccttcaactgattgaccgggaggattcatacagttcccgtctttcagggctggctttgtgcaccggggatgaggttttttatatcgagaccgggactgcactccccgagaatttgattgcaacagagctgaaagaactgtggcagaatgaaaatattcacaaaatcggacacaatataaaagaatttataacctggctgctgaaacacgatgttgaactgaacggcctttatttcgacactatgattgccgaatacctgatagattccataagaaacggctatcctatagcaagcctttctcacaaatacctgaatcgcagcgttccgtcgctggacgaacttttgggcaagggaaagggagcaaaaaagtactctgaaattccgcccgaaaggctgaaagattacagcgcttataacgtcaaagccatttttgacatatggccgatgcagaaaaaagttcttcaggaaaaccggcaggaggagctttttaatgacatagagcttcctcttataaccgtacttgccagtatggaataccacggtttcaaagttgacgccgcaaaacttcacgaatacggcgaagttcttctgtcacgcataaaagacctggaaaaggtaatttacatgctggccggtgaagaattcaacatcaattcaacgaagcagcttggtaccatattattcgaaaaactgaagcttcccgttgtaaaaagtacaaagaccggatactccaccgacgtcgaggttcttgaagagctttattacaagcatgatataataccatgcataatagaataccgccagcttacaaaactttacaccacctacgccgaaggtcttgaaaaagtgataaatcctgtaaccggtaaaattcattcaagttttaaccagacggttacggctacaggccgcatcagcagtaccgaaccaaatttacagaatatcccagtcagacacgaaatgggaagggaaatacggaaagcttttattccgtcgtcggaaaacgctgtttttgttgatgccgattattcacagatagagcttcgcgtgcttgcccatataacaggcgatgaagccctgataaatgctttcgttaagggggaagatattcatacggccacggcgtcgctggtatttgacgtagctcccgaagatgtgacgccggaactgcgcagaaaggcaaaagccgtaaatttcggcatagtgtacgggatcagtgattacgggctggcacgggatttgggaattacccggaaggaagcaaagcggtatatagacgactattttgccaaataccccaaagtaaaaacctatgtggatgaaattgtgcgggtcggccaggaacaggggtatgtggaaactctgttccacagaagaagataccttcccgagcttgcatctaaaaattttcaacagcgttctttcggaaaaagggttgcaatgaatacgcccatacagggcactgcagccgatattattaaaattgcgatggtgaaggtatacaaggctttgaaagaatccggccttaaatccaggcttatcctccaggtccatgacgaacttgttattgagacttttgaagacgaactggagactgtcaaggaacttgtcaaaaagtgcatggaagaggccgttgaattgagtgtgccgcttgttgtcgacgtttcaatcgggaaaaactggtatgaagcctcctgatatggatcc

SEQ ID NO: 337 - DNA, 2772 bp, Artificial Sequence
  Description of Artificial Sequence: Synthetic Clostridium stercorarium DNA Polymerase H826G
atgaaatacctgctgccgaccgctgctgctggtctgctgctcctcgctgcccagccggcgatggccatggatccaaaaataatccttatagacggaaacagtattttaaaccgcggtttttatgccctgtcggggcgatccatgctgactacgtccacaggtctgtataccaatgcggttttcgcttttgtaaatatattgaacaaatatatcgaagaggaaaaccctgattatattgccgttgctttcgatcttagggcaaaaactttccggcacggtctatatgagggatacaaagcgcagcggaaaggcatgcccgatgaacttgcaatgcagatacccctcgcgaaggaagtactgagggcgatgaatattgccataatagagcatgaaggttatgaagccgacgatataatcggcagcctttcgttaaaggccgaaaaagagaattttgacgtaataatccttacgggggacagggattctttccagctgatcagcgacagggtgaaagttatcctgccttcgacgaaagccggaaaaacagagaccaacgtatatgataaacaggccatcattgacaaatacggagttttaccccatcagcttattgacgttaaaggcttaatgggagattcgtcagataatatacccggcgttccgggagtgggtgagaaaacggcgttaagccttatttcagcctacggtacactggaaggtgtttacgagcatattgatgaaataaaacagcctaagctgaaagcatcgctgattgaatataaggatcaggcgtttttaagccgtaagctgggtactattgtaagaaatctggagctgtgtgcttcgctggaggatctgaaaagaaaagaaataaaccgcaaagagcttttgaatgttttcagaaaactcgaatttgaaagtatcatatcaaaaatgaatcttgcttccgctgaggtgacagaattacctcccgcgccggaagagcttaaaataacccatatttcagcggcagaggatcttaagaaatggattgcttacctgcttaaccagaaaaacatttccgtccttcaactgattgaccgggaggattcatacagttcccgtctttcagggctggctttgtgcaccggggatgaggttttttatatcgagaccgggactgcactccccgagaatttgattgcaacagagctgaaagaactgtggcagaatgaaaatattcacaaaatcggacacaatataaaagaatttataacctggctgctgaaacacgatgttgaactgaacggcctttatttcgacactatgattgccgaatacctgatagattccataagaaacggctatcctatagcaagcctttctcacaaatacctgaatcgcagcgttccgtcgctggacgaacttttgggcaagggaaagggagcaaaaaagtactctgaaattccgcccgaaaggctgaaagattacagcgcttataacgtcaaagccatttttgacatatggccgatgcagaaaaaagttcttcaggaaaaccggcaggaggagctttttaatgacatagagcttcctcttataaccgtacttgccagtatggaataccacggtttcaaagttgacgccgcaaaacttcacgaatacggcgaagttcttctgtcacgcataaaagacctggaaaaggtaatttacatgctggccggtgaagaattcaacatcaattcaacgaagcagcttggtaccatattattcgaaaaactgaagcttcccgttgtaaaaagtacaaagaccggatactccaccgacgtcgaggttcttgaagagctttattacaagcatgatataataccatgcataatagaataccgccagcttacaaaactttacaccacctacgccgaaggtcttgaaaaagtgataaatcctgtaaccggtaaaattcattcaagttttaaccagacggttacggctacaggccgcatcagcagtaccgaaccaaatttacagaatatcccagtcagacacgaaatgggaagggaaatacggaaagcttttattccgtcgtcggaaaacgctgtttttgttgatgccgattattcacagatagagcttcgcgtgcttgcccatataacaggcgatgaagccctgataaatgctttcgttaagggggaagatattcatacggccacggcgtcgctggtatttgacgtagctcccgaagatgtgacgccggaactgcgcagaaaggcaaaagccgtaaatttcggcatagtgtacgggatcagtgattacgggctggcacgggatttgggaattacccggaaggaagcaaagcggtatatagacgactattttgccaaataccccaaagtaaaaacctatgtggatgaaattgtgcgggtcggccaggaacaggggtatgtggaaactctgttccacagaagaagataccttcccgagcttgcatctaaaaattttggtcagcgttctttcggaaaaagggttgcaatgaatacgcccatacagggcactgcagccgatattattaaaattgcgatggtgaaggtatacaaggctttgaaagaatccggccttaaatccaggcttatcctccaggtccatgacgaacttgttattgagacttttgaagacgaactggagactgtcaaggaacttgtcaaaaagtgcatggaagaggccgttgaattgagtgtgccgcttgttgtcgacgtttcaatcgggaaaaactggtatgaagcctcctgatatggatcc

SEQ ID NO: 338 - DNA, 2772 bp, Artificial Sequence
  Description of Artificial Sequence: Synthetic Clostridium stercorarium DNA Polymerase H826I
atgaaatacctgctgccgaccgctgctgctggtctgctgctcctcgctgcccagccggcgatggccatggatccaaaaataatccttatagacggaaacagtattttaaaccgcggtttttatgccctgtcggggcgatccatgctgactacgtccacaggtctgtataccaatgcggttttcgcttttgtaaatatattgaacaaatatatcgaagaggaaaaccctgattatattgccgttgctttcgatcttagggcaaaaactttccggcacggtctatatgagggatacaaagcgcagcggaaaggcatgcccgatgaacttgcaatgcagatacccctcgcgaaggaagtactgagggcgatgaatattgccataatagagcatgaaggttatgaagccgacgatataatcggcagcctttcgttaaaggccgaaaaagagaattttgacgtaataatccttacgggggacagggattctttccagctgatcagcgacagggtgaaagttatcctgccttcgacgaaagccggaaaaacagagaccaacgtatatgataaacaggccatcattgacaaatacggagttttaccccatcagcttattgacgttaaaggcttaatgggagattcgtcagataatatacccggcgttccgggagtgggtgagaaaacggcgttaagccttatttcagcctacggtacactggaaggtgtttacgagcatattgatgaaataaaacagcctaagctgaaagcatcgctgattgaatataaggatcaggcgtttttaagccgtaagctgggtactattgtaagaaatctggagctgtgtgcttcgctggaggatctgaaaagaaaagaaataaaccgcaaagagcttttgaatgttttcagaaaactcgaatttgaaagtatcatatcaaaaatgaatcttgcttccgctgaggtgacagaattacctcccgcgccggaagagcttaaaataacccatatttcagcggcagaggatcttaagaaatggattgcttacctgcttaaccagaaaaacatttccgtccttcaactgattgaccgggaggattcatacagttcccgtctttcagggctggctttgtgcaccggggatgaggttttttatatcgagaccgggactgcactccccgagaatttgattgcaacagagctgaaagaactgtggcagaatgaaaatattcacaaaatcggacacaatataaaagaatttataacctggctgctgaaacacgatgttgaactgaacggcctttatttcgacactatgattgccgaatacctgatagattccataagaaacggctatcctatagcaagcctttctcacaaatacctgaatcgcagcgttccgtcgctggacgaacttttgggcaagggaaagggagcaaaaaagtactctgaaattccgcccgaaaggctgaaagattacagcgcttataacgtcaaagccatttttgacatatggccgatgcagaaaaaagttcttcaggaaaaccggcaggaggagctttttaatgacatagagcttcctcttataaccgtacttgccagtatggaataccacggtttcaaagttgacgccgcaaaacttcacgaatacggcgaagttcttctgtcacgcataaaagacctggaaaaggtaatttacatgctggccggtgaagaattcaacatcaattcaacgaagcagcttggtaccatattattcgaaaaactgaagcttcccgttgtaaaaagtacaaagaccggatactccaccgacgtcgaggttcttgaagagctttattacaagcatgatataataccatgcataatagaataccgccagcttacaaaactttacaccacctacgccgaaggtcttgaaaaagtgataaatcctgtaaccggtaaaattcattcaagttttaaccagacggttacggctacaggccgcatcagcagtaccgaaccaaatttacagaatatcccagtcagacacgaaatgggaagggaaatacggaaagcttttattccgtcgtcggaaaacgctgtttttgttgatgccgattattcacagatagagcttcgcgtgcttgcccatataacaggcgatgaagccctgataaatgctttcgttaagggggaagatattcatacggccacggcgtcgctggtatttgacgtagctcccgaagatgtgacgccggaactgcgcagaaaggcaaaagccgtaaatttcggcatagtgtacgggatcagtgattacgggctggcacgggatttgggaattacccggaaggaagcaaagcggtatatagacgactattttgccaaataccccaaagtaaaaacctatgtggatgaaattgtgcgggtcggccaggaacaggggtatgtggaaactctgttccacagaagaagataccttcccgagcttgcatctaaaaattttattcagcgttctttcggaaaaagggttgcaatgaatacgcccatacagggcactgcagccgatattattaaaattgcgatggtgaaggtatacaaggctttgaaagaatccggccttaaatccaggcttatcctccaggtccatgacgaacttgttattgagacttttgaagacgaactggagactgtcaaggaacttgtcaaaaagtgcatggaagaggccgttgaattgagtgtgccgcttgttgtcgacgtttcaatcgggaaaaactggtatgaagcctcctgatatggatcc

SEQ ID NO: 339 - DNA, 2772 bp, Artificial Sequence
  Description of Artificial Sequence: Synthetic Clostridium stercorarium DNA Polymerase H826L
atgaaatacctgctgccgaccgctgctgctggtctgctgctcctcgctgcccagccggcgatggccatggatccaaaaataatccttatagacggaaacagtattttaaaccgcggtttttatgccctgtcggggcgatccatgctgactacgtccacaggtctgtataccaatgcggttttcgcttttgtaaatatattgaacaaatatatcgaagaggaaaaccctgattatattgccgttgctttcgatcttagggcaaaaactttccggcacggtctatatgagggatacaaagcgcagcggaaaggcatgcccgatgaacttgcaatgcagatacccctcgcgaaggaagtactgagggcgatgaatattgccataatagagcatgaaggttatgaagccgacgatataatcggcagcctttcgttaaaggccgaaaaagagaattttgacgtaataatccttacgggggacagggattctttccagctgatcagcgacagggtgaaagttatcctgccttcgacgaaagccggaaaaacagagaccaacgtatatgataaacaggccatcattgacaaatacggagttttaccccatcagcttattgacgttaaaggcttaatgggagattcgtcagataatatacccggcgttccgggagtgggtgagaaaacggcgttaagccttatttcagcctacggtacactggaaggtgtttacgagcatattgatgaaataaaacagcctaagctgaaagcatcgctgattgaatataaggatcaggcgtttttaagccgtaagctgggtactattgtaagaaatctggagctgtgtgcttcgctggaggatctgaaaagaaaagaaataaaccgcaaagagcttttgaatgttttcagaaaactcgaatttgaaagtatcatatcaaaaatgaatcttgcttccgctgaggtgacagaattacctcccgcgccggaagagcttaaaataacccatatttcagcggcagaggatcttaagaaatggattgcttacctgcttaaccagaaaaacatttccgtccttcaactgattgaccgggaggattcatacagttcccgtctttcagggctggctttgtgcaccggggatgaggttttttatatcgagaccgggactgcactccccgagaatttgattgcaacagagctgaaagaactgtggcagaatgaaaatattcacaaaatcggacacaatataaaagaatttataacctggctgctgaaacacgatgttgaactgaacggcctttatttcgacactatgattgccgaatacctgatagattccataagaaacggctatcctatagcaagcctttctcacaaatacctgaatcgcagcgttccgtcgctggacgaacttttgggcaagggaaagggagcaaaaaagtactctgaaattccgcccgaaaggctgaaagattacagcgcttataacgtcaaagccatttttgacatatggccgatgcagaaaaaagttcttcaggaaaaccggcaggaggagctttttaatgacatagagcttcctcttataaccgtacttgccagtatggaataccacggtttcaaagttgacgccgcaaaacttcacgaatacggcgaagttcttctgtcacgcataaaagacctggaaaaggtaatttacatgctggccggtgaagaattcaacatcaattcaacgaagcagcttggtaccatattattcgaaaaactgaagcttcccgttgtaaaaagtacaaagaccggatactccaccgacgtcgaggttcttgaagagctttattacaagcatgatataataccatgcataatagaataccgccagcttacaaaactttacaccacctacgccgaaggtcttgaaaaagtgataaatcctgtaaccggtaaaattcattcaagttttaaccagacggttacggctacaggccgcatcagcagtaccgaaccaaatttacagaatatcccagtcagacacgaaatgggaagggaaatacggaaagcttttattccgtcgtcggaaaacgctgtttttgttgatgccgattattcacagatagagcttcgcgtgcttgcccatataacaggcgatgaagccctgataaatgctttcgttaagggggaagatattcatacggccacggcgtcgctggtatttgacgtagctcccgaagatgtgacgccggaactgcgcagaaaggcaaaagccgtaaatttcggcatagtgtacgggatcagtgattacgggctggcacgggatttgggaattacccggaaggaagcaaagcggtatatagacgactattttgccaaataccccaaagtaaaaacctatgtggatgaaattgtgcgggtcggccaggaacaggggtatgtggaaactctgttccacagaagaagataccttcccgagcttgcatctaaaaattttcttcagcgttctttcggaaaaagggttgcaatgaatacgcccatacagggcactgcagccgatattattaaaattgcgatggtgaaggtatacaaggctttgaaagaatccggccttaaatccaggcttatcctccaggtccatgacgaacttgttattgagacttttgaagacgaactggagactgtcaaggaacttgtcaaaaagtgcatggaagaggccgttgaattgagtgtgccgcttgttgtcgacgtttcaatcgggaaaaactggtatgaagcctcctgatatggatcc

SEQ ID NO: 340 - DNA, 2772 bp, Artificial Sequence
  Description of Artificial Sequence: Synthetic Clostridium stercorarium DNA Polymerase H826K
atgaaatacctgctgccgaccgctgctgctggtctgctgctcctcgctgcccagccggcgatggccatggatccaaaaataatccttatagacggaaacagtattttaaaccgcggtttttatgccctgtcggggcgatccatgctgactacgtccacaggtctgtataccaatgcggttttcgcttttgtaaatatattgaacaaatatatcgaagaggaaaaccctgattatattgccgttgctttcgatcttagggcaaaaactttccggcacggtctatatgagggatacaaagcgcagcggaaaggcatgcccgatgaacttgcaatgcagatacccctcgcgaaggaagtactgagggcgatgaatattgccataatagagcatgaaggttatgaagccgacgatataatcggcagcctttcgttaaaggccgaaaaagagaattttgacgtaataatccttacgggggacagggattctttccagctgatcagcgacagggtgaaagttatcctgccttcgacgaaagccggaaaaacagagaccaacgtatatgataaacaggccatcattgacaaatacggagttttaccccatcagcttattgacgttaaaggcttaatgggagattcgtcagataatatacccggcgttccgggagtgggtgagaaaacggcgttaagccttatttcagcctacggtacactggaaggtgtttacgagcatattgatgaaataaaacagcctaagctgaaagcatcgctgattgaatataaggatcaggcgtttttaagccgtaagctgggtactattgtaagaaatctggagctgtgtgcttcgctggaggatctgaaaagaaaagaaataaaccgcaaagagcttttgaatgttttcagaaaactcgaatttgaaagtatcatatcaaaaatgaatcttgcttccgctgaggtgacagaattacctcccgcgccggaagagcttaaaataacccatatttcagcggcagaggatcttaagaaatggattgcttacctgcttaaccagaaaaacatttccgtccttcaactgattgaccgggaggattcatacagttcccgtctttcagggctggctttgtgcaccggggatgaggttttttatatcgagaccgggactgcactccccgagaatttgattgcaacagagctgaaagaactgtggcagaatgaaaatattcacaaaatcggacacaatataaaagaatttataacctggctgctgaaacacgatgttgaactgaacggcctttatttcgacactatgattgccgaatacctgatagattccataagaaacggctatcctatagcaagcctttctcacaaatacctgaatcgcagcgttccgtcgctggacgaacttttgggcaagggaaagggagcaaaaaagtactctgaaattccgcccgaaaggctgaaagattacagcgcttataacgtcaaagccatttttgacatatggccgatgcagaaaaaagttcttcaggaaaaccggcaggaggagctttttaatgacatagagcttcctcttataaccgtacttgccagtatggaataccacggtttcaaagttgacgccgcaaaacttcacgaatacggcgaagttcttctgtcacgcataaaagacctggaaaaggtaatttacatgctggccggtgaagaattcaacatcaattcaacgaagcagcttggtaccatattattcgaaaaactgaagcttcccgttgtaaaaagtacaaagaccggatactccaccgacgtcgaggttcttgaagagctttattacaagcatgatataataccatgcataatagaataccgccagcttacaaaactttacaccacctacgccgaaggtcttgaaaaagtgataaatcctgtaaccggtaaaattcattcaagttttaaccagacggttacggctacaggccgcatcagcagtaccgaaccaaatttacagaatatcccagtcagacacgaaatgggaagggaaatacggaaagcttttattccgtcgtcggaaaacgctgtttttgttgatgccgattattcacagatagagcttcgcgtgcttgcccatataacaggcgatgaagccctgataaatgctttcgttaagggggaagatattcatacggccacggcgtcgctggtatttgacgtagctcccgaagatgtgacgccggaactgcgcagaaaggcaaaagccgtaaatttcggcatagtgtacgggatcagtgattacgggctggcacgggatttgggaattacccggaaggaagcaaagcggtatatagacgactattttgccaaataccccaaagtaaaaacctatgtggatgaaattgtgcgggtcggccaggaacaggggtatgtggaaactctgttccacagaagaagataccttcccgagcttgcatctaaaaattttaaacagcgttctttcggaaaaagggttgcaatgaatacgcccatacagggcactgcagccgatattattaaaattgcgatggtgaaggtatacaaggctttgaaagaatccggccttaaatccaggcttatcctccaggtccatgacgaacttgttattgagacttttgaagacgaactggagactgtcaaggaacttgtcaaaaagtgcatggaagaggccgttgaattgagtgtgccgcttgttgtcgacgtttcaatcgggaaaaactggtatgaagcctcctgatatggatcc

SEQ ID NO: 341 - DNA, 2772 bp, Artificial Sequence
  Description of Artificial Sequence: Synthetic Clostridium stercorarium DNA Polymerase H826M
atgaaatacctgctgccgaccgctgctgctggtctgctgctcctcgctgcccagccggcgatggccatggatccaaaaataatccttatagacggaaacagtattttaaaccgcggtttttatgccctgtcggggcgatccatgctgactacgtccacaggtctgtataccaatgcggttttcgcttttgtaaatatattgaacaaatatatcgaagaggaaaaccctgattatattgccgttgctttcgatcttagggcaaaaactttccggcacggtctatatgagggatacaaagcgcagcggaaaggcatgcccgatgaacttgcaatgcagatacccctcgcgaaggaagtactgagggcgatgaatattgccataatagagcatgaaggttatgaagccgacgatataatcggcagcctttcgttaaaggccgaaaaagagaattttgacgtaataatccttacgggggacagggattctttccagctgatcagcgacagggtgaaagttatcctgccttcgacgaaagccggaaaaacagagaccaacgtatatgataaacaggccatcattgacaaatacggagttttaccccatcagcttattgacgttaaaggcttaatgggagattcgtcagataatatacccggcgttccgggagtgggtgagaaaacggcgttaagccttatttcagcctacggtacactggaaggtgtttacgagcatattgatgaaataaaacagcctaagctgaaagcatcgctgattgaatataaggatcaggcgtttttaagccgtaagctgggtactattgtaagaaatctggagctgtgtgcttcgctggaggatctgaaaagaaaagaaataaaccgcaaagagcttttgaatgttttcagaaaactcgaatttgaaagtatcatatcaaaaatgaatcttgcttccgctgaggtgacagaattacctcccgcgccggaagagcttaaaataacccatatttcagcggcagaggatcttaagaaatggattgcttacctgcttaaccagaaaaacatttccgtccttcaactgattgaccgggaggattcatacagttcccgtctttcagggctggctttgtgcaccggggatgaggttttttatatcgagaccgggactgcactccccgagaatttgattgcaacagagctgaaagaactgtggcagaatgaaaatattcacaaaatcggacacaatataaaagaatttataacctggctgctgaaacacgatgttgaactgaacggcctttatttcgacactatgattgccgaatacctgatagattccataagaaacggctatcctatagcaagcctttctcacaaatacctgaatcgcagcgttccgtcgctggacgaacttttgggcaagggaaagggagcaaaaaagtactctgaaattccgcccgaaaggctgaaagattacagcgcttataacgtcaaagccatttttgacatatggccgatgcagaaaaaagttcttcaggaaaaccggcaggaggagctttttaatgacatagagcttcctcttataaccgtacttgccagtatggaataccacggtttcaaagttgacgccgcaaaacttcacgaatacggcgaagttcttctgtcacgcataaaagacctggaaaaggtaatttacatgctggccggtgaagaattcaacatcaattcaacgaagcagcttggtaccatattattcgaaaaactgaagcttcccgttgtaaaaagtacaaagaccggatactccaccgacgtcgaggttcttgaagagctttattacaagcatgatataataccatgcataatagaataccgccagcttacaaaactttacaccacctacgccgaaggtcttgaaaaagtgataaatcctgtaaccggtaaaattcattcaagttttaaccagacggttacggctacaggccgcatcagcagtaccgaaccaaatttacagaatatcccagtcagacacgaaatgggaagggaaatacggaaagcttttattccgtcgtcggaaaacgctgtttttgttgatgccgattattcacagatagagcttcgcgtgcttgcccatataacaggcgatgaagccctgataaatgctttcgttaagggggaagatattcatacggccacggcgtcgctggtatttgacgtagctcccgaagatgtgacgccggaactgcgcagaaaggcaaaagccgtaaatttcggcatagtgtacgggatcagtgattacgggctggcacgggatttgggaattacccggaaggaagcaaagcggtatatagacgactattttgccaaataccccaaagtaaaaacctatgtggatgaaattgtgcgggtcggccaggaacaggggtatgtggaaactctgttccacagaagaagataccttcccgagcttgcatctaaaaattttatgcagcgttctttcggaaaaagggttgcaatgaatacgcccatacagggcactgcagccgatattattaaaattgcgatggtgaaggtatacaaggctttgaaagaatccggccttaaatccaggcttatcctccaggtccatgacgaacttgttattgagacttttgaagacgaactggagactgtcaaggaacttgtcaaaaagtgcatggaagaggccgttgaattgagtgtgccgcttgttgtcgacgtttcaatcgggaaaaactggtatgaagcctcctgatatggatcc

SEQ ID NO: 342 - DNA, 2772 bp, Artificial Sequence
  Description of Artificial Sequence: Synthetic Clostridium stercorarium DNA Polymerase H826F
atgaaatacctgctgccgaccgctgctgctggtctgctgctcctcgctgcccagccggcgatggccatggatccaaaaataatccttatagacggaaacagtattttaaaccgcggtttttatgccctgtcggggcgatccatgctgactacgtccacaggtctgtataccaatgcggttttcgcttttgtaaatatattgaacaaatatatcgaagaggaaaaccctgattatattgccgttgctttcgatcttagggcaaaaactttccggcacggtctatatgagggatacaaagcgcagcggaaaggcatgcccgatgaacttgcaatgcagatacccctcgcgaaggaagtactgagggcgatgaatattgccataatagagcatgaaggttatgaagccgacgatataatcggcagcctttcgttaaaggccgaaaaagagaattttgacgtaataatccttacgggggacagggattctttccagctgatcagcgacagggtgaaagttatcctgccttcgacgaaagccggaaaaacagagaccaacgtatatgataaacaggccatcattgacaaatacggagttttaccccatcagcttattgacgttaaaggcttaatgggagattcgtcagataatatacccggcgttccgggagtgggtgagaaaacggcgttaagccttatttcagcctacggtacactggaaggtgtttacgagcatattgatgaaataaaacagcctaagctgaaagcatcgctgattgaatataaggatcaggcgtttttaagccgtaagctgggtactattgtaagaaatctggagctgtgtgcttcgctggaggatctgaaaagaaaagaaataaaccgcaaagagcttttgaatgttttcagaaaactcgaatttgaaagtatcatatcaaaaatgaatcttgcttccgctgaggtgacagaattacctcccgcgccggaagagcttaaaataacccatatttcagcggcagaggatcttaagaaatggattgcttacctgcttaaccagaaaaacatttccgtccttcaactgattgaccgggaggattcatacagttcccgtctttcagggctggctttgtgcaccggggatgaggttttttatatcgagaccgggactgcactccccgagaatttgattgcaacagagctgaaagaactgtggcagaatgaaaatattcacaaaatcggacacaatataaaagaatttataacctggctgctgaaacacgatgttgaactgaacggcctttatttcgacactatgattgccgaatacctgatagattccataagaaacggctatcctatagcaagcctttctcacaaatacctgaatcgcagcgttccgtcgctggacgaacttttgggcaagggaaagggagcaaaaaagtactctgaaattccgcccgaaaggctgaaagattacagcgcttataacgtcaaagccatttttgacatatggccgatgcagaaaaaagttcttcaggaaaaccggcaggaggagctttttaatgacatagagcttcctcttataaccgtacttgccagtatggaataccacggtttcaaagttgacgccgcaaaacttcacgaatacggcgaagttcttctgtcacgcataaaagacctggaaaaggtaatttacatgctggccggtgaagaattcaacatcaattcaacgaagcagcttggtaccatattattcgaaaaactgaagcttcccgttgtaaaaagtacaaagaccggatactccaccgacgtcgaggttcttgaagagctttattacaagcatgatataataccatgcataatagaataccgccagcttacaaaactttacaccacctacgccgaaggtcttgaaaaagtgataaatcctgtaaccggtaaaattcattcaagttttaaccagacggttacggctacaggccgcatcagcagtaccgaaccaaatttacagaatatcccagtcagacacgaaatgggaagggaaatacggaaagcttttattccgtcgtcggaaaacgctgtttttgttgatgccgattattcacagatagagcttcgcgtgcttgcccatataacaggcgatgaagccctgataaatgctttcgttaagggggaagatattcatacggccacggcgtcgctggtatttgacgtagctcccgaagatgtgacgccggaactgcgcagaaaggcaaaagccgtaaatttcggcatagtgtacgggatcagtgattacgggctggcacgggatttgggaattacccggaaggaagcaaagcggtatatagacgactattttgccaaataccccaaagtaaaaacctatgtggatgaaattgtgcgggtcggccaggaacaggggtatgtggaaactctgttccacagaagaagataccttcccgagcttgcatctaaaaatttttttcagcgttctttcggaaaaagggttgcaatgaatacgcccatacagggcactgcagccgatattattaaaattgcgatggtgaaggtatacaaggctttgaaagaatccggccttaaatccaggcttatcctccaggtccatgacgaacttgttattgagacttttgaagacgaactggagactgtcaaggaacttgtcaaaaagtgcatggaagaggccgttgaattgagtgtgccgcttgttgtcgacgtttcaatcgggaaaaactggtatgaagcctcctgatatggatcc

SEQ ID NO: 343 - DNA, 2772 bp, Artificial Sequence
  Description of Artificial Sequence: Synthetic Clostridium stercorarium DNA Polymerase H826P
atgaaatacctgctgccgaccgctgctgctggtctgctgctcctcgctgcccagccggcgatggccatggatccaaaaataatccttatagacggaaacagtattttaaaccgcggtttttatgccctgtcggggcgatccatgctgactacgtccacaggtctgtataccaatgcggttttcgcttttgtaaatatattgaacaaatatatcgaagaggaaaaccctgattatattgccgttgctttcgatcttagggcaaaaactttccggcacggtctatatgagggatacaaagcgcagcggaaaggcatgcccgatgaacttgcaatgcagatacccctcgcgaaggaagtactgagggcgatgaatattgccataatagagcatgaaggttatgaagccgacgatataatcggcagcctttcgttaaaggccgaaaaagagaattttgacgtaataatccttacgggggacagggattctttccagctgatcagcgacagggtgaaagttatcctgccttcgacgaaagccggaaaaacagagaccaacgtatatgataaacaggccatcattgacaaatacggagttttaccccatcagcttattgacgttaaaggcttaatgggagattcgtcagataatatacccggcgttccgggagtgggtgagaaaacggcgttaagccttatttcagcctacggtacactggaaggtgtttacgagcatattgatgaaataaaacagcctaagctgaaagcatcgctgattgaatataaggatcaggcgtttttaagccgtaagctgggtactattgtaagaaatctggagctgtgtgcttcgctggaggatctgaaaagaaaagaaataaaccgcaaagagcttttgaatgttttcagaaaactcgaatttgaaagtatcatatcaaaaatgaatcttgcttccgctgaggtgacagaattacctcccgcgccggaagagcttaaaataacccatatttcagcggcagaggatcttaagaaatggattgcttacctgcttaaccagaaaaacatttccgtccttcaactgattgaccgggaggattcatacagttcccgtctttcagggctggctttgtgcaccggggatgaggttttttatatcgagaccgggactgcactccccgagaatttgattgcaacagagctgaaagaactgtggcagaatgaaaatattcacaaaatcggacacaatataaaagaatttataacctggctgctgaaacacgatgttgaactgaacggcctttatttcgacactatgattgccgaatacctgatagattccataagaaacggctatcctatagcaagcctttctcacaaatacctgaatcgcagcgttccgtcgctggacgaacttttgggcaagggaaagggagcaaaaaagtactctgaaattccgcccgaaaggctgaaagattacagcgcttataacgtcaaagccatttttgacatatggccgatgcagaaaaaagttcttcaggaaaaccggcaggaggagctttttaatgacatagagcttcctcttataaccgtacttgccagtatggaataccacggtttcaaagttgacgccgcaaaacttcacgaatacggcgaagttcttctgtcacgcataaaagacctggaaaaggtaatttacatgctggccggtgaagaattcaacatcaattcaacgaagcagcttggtaccatattattcgaaaaactgaagcttcccgttgtaaaaagtacaaagaccggatactccaccgacgtcgaggttcttgaagagctttattacaagcatgatataataccatgcataatagaataccgccagcttacaaaactttacaccacctacgccgaaggtcttgaaaaagtgataaatcctgtaaccggtaaaattcattcaagttttaaccagacggttacggctacaggccgcatcagcagtaccgaaccaaatttacagaatatcccagtcagacacgaaatgggaagggaaatacggaaagcttttattccgtcgtcggaaaacgctgtttttgttgatgccgattattcacagatagagcttcgcgtgcttgcccatataacaggcgatgaagccctgataaatgctttcgttaagggggaagatattcatacggccacggcgtcgctggtatttgacgtagctcccgaagatgtgacgccggaactgcgcagaaaggcaaaagccgtaaatttcggcatagtgtacgggatcagtgattacgggctggcacgggatttgggaattacccggaaggaagcaaagcggtatatagacgactattttgccaaataccccaaagtaaaaacctatgtggatgaaattgtgcgggtcggccaggaacaggggtatgtggaaactctgttccacagaagaagataccttcccgagcttgcatctaaaaattttcctcagcgttctttcggaaaaagggttgcaatgaatacgcccatacagggcactgcagccgatattattaaaattgcgatggtgaaggtatacaaggctttgaaagaatccggccttaaatccaggcttatcctccaggtccatgacgaacttgttattgagacttttgaagacgaactggagactgtcaaggaacttgtcaaaaagtgcatggaagaggccgttgaattgagtgtgccgcttgttgtcgacgtttcaatcgggaaaaactggtatgaagcctcctgatatggatcc

SEQ ID NO: 344 - DNA, 2772 bp, Artificial Sequence
  Description of Artificial Sequence: Synthetic Clostridium stercorarium DNA Polymerase H826S
atgaaatacctgctgccgaccgctgctgctggtctgctgctcctcgctgcccagccggcgatggccatggatccaaaaataatccttatagacggaaacagtattttaaaccgcggtttttatgccctgtcggggcgatccatgctgactacgtccacaggtctgtataccaatgcggttttcgcttttgtaaatatattgaacaaatatatcgaagaggaaaaccctgattatattgccgttgctttcgatcttagggcaaaaactttccggcacggtctatatgagggatacaaagcgcagcggaaaggcatgcccgatgaacttgcaatgcagatacccctcgcgaaggaagtactgagggcgatgaatattgccataatagagcatgaaggttatgaagccgacgatataatcggcagcctttcgttaaaggccgaaaaagagaattttgacgtaataatccttacgggggacagggattctttccagctgatcagcgacagggtgaaagttatcctgccttcgacgaaagccggaaaaacagagaccaacgtatatgataaacaggccatcattgacaaatacggagttttaccccatcagcttattgacgttaaaggcttaatgggagattcgtcagataatatacccggcgttccgggagtgggtgagaaaacggcgttaagccttatttcagcctacggtacactggaaggtgtttacgagcatattgatgaaataaaacagcctaagctgaaagcatcgctgattgaatataaggatcaggcgtttttaagccgtaagctgggtactattgtaagaaatctggagctgtgtgcttcgctggaggatctgaaaagaaaagaaataaaccgcaaagagcttttgaatgttttcagaaaactcgaatttgaaagtatcatatcaaaaatgaatcttgcttccgctgaggtgacagaattacctcccgcgccggaagagcttaaaataacccatatttcagcggcagaggatcttaagaaatggattgcttacctgcttaaccagaaaaacatttccgtccttcaactgattgaccgggaggattcatacagttcccgtctttcagggctggctttgtgcaccggggatgaggttttttatatcgagaccgggactgcactccccgagaatttgattgcaacagagctgaaagaactgtggcagaatgaaaatattcacaaaatcggacacaatataaaagaatttataacctggctgctgaaacacgatgttgaactgaacggcctttatttcgacactatgattgccgaatacctgatagattccataagaaacggctatcctatagcaagcctttctcacaaatacctgaatcgcagcgttccgtcgctggacgaacttttgggcaagggaaagggagcaaaaaagtactctgaaattccgcccgaaaggctgaaagattacagcgcttataacgtcaaagccatttttgacatatggccgatgcagaaaaaagttcttcaggaaaaccggcaggaggagctttttaatgacatagagcttcctcttataaccgtacttgccagtatggaataccacggtttcaaagttgacgccgcaaaacttcacgaatacggcgaagttcttctgtcacgcataaaagacctggaaaaggtaatttacatgctggccggtgaagaattcaacatcaattcaacgaagcagcttggtaccatattattcgaaaaactgaagcttcccgttgtaaaaagtacaaagaccggatactccaccgacgtcgaggttcttgaagagctttattacaagcatgatataataccatgcataatagaataccgccagcttacaaaactttacaccacctacgccgaaggtcttgaaaaagtgataaatcctgtaaccggtaaaattcattcaagttttaaccagacggttacggctacaggccgcatcagcagtaccgaaccaaatttacagaatatcccagtcagacacgaaatgggaagggaaatacggaaagcttttattccgtcgtcggaaaacgctgtttttgttgatgccgattattcacagatagagcttcgcgtgcttgcccatataacaggcgatgaagccctgataaatgctttcgttaagggggaagatattcatacggccacggcgtcgctggtatttgacgtagctcccgaagatgtgacgccggaactgcgcagaaaggcaaaagccgtaaatttcggcatagtgtacgggatcagtgattacgggctggcacgggatttgggaattacccggaaggaagcaaagcggtatatagacgactattttgccaaataccccaaagtaaaaacctatgtggatgaaattgtgcgggtcggccaggaacaggggtatgtggaaactctgttccacagaagaagataccttcccgagcttgcatctaaaaatttttctcagcgttctttcggaaaaagggttgcaatgaatacgcccatacagggcactgcagccgatattattaaaattgcgatggtgaaggtatacaaggctttgaaagaatccggccttaaatccaggcttatcctccaggtccatgacgaacttgttattgagacttttgaagacgaactggagactgtcaaggaacttgtcaaaaagtgcatggaagaggccgttgaattgagtgtgccgcttgttgtcgacgtttcaatcgggaaaaactggtatgaagcctcctgatatggatcc

SEQ ID NO: 345 - DNA, 2772 bp, Artificial Sequence
  Description of Artificial Sequence: Synthetic Clostridium stercorarium DNA Polymerase H826T
atgaaatacctgctgccgaccgctgctgctggtctgctgctcctcgctgcccagccggcgatggccatggatccaaaaataatccttatagacggaaacagtattttaaaccgcggtttttatgccctgtcggggcgatccatgctgactacgtccacaggtctgtataccaatgcggttttcgcttttgtaaatatattgaacaaatatatcgaagaggaaaaccctgattatattgccgttgctttcgatcttagggcaaaaactttccggcacggtctatatgagggatacaaagcgcagcggaaaggcatgcccgatgaacttgcaatgcagatacccctcgcgaaggaagtactgagggcgatgaatattgccataatagagcatgaaggttatgaagccgacgatataatcggcagcctttcgttaaaggccgaaaaagagaattttgacgtaataatccttacgggggacagggattctttccagctgatcagcgacagggtgaaagttatcctgccttcgacgaaagccggaaaaacagagaccaacgtatatgataaacaggccatcattgacaaatacggagttttaccccatcagcttattgacgttaaaggcttaatgggagattcgtcagataatatacccggcgttccgggagtgggtgagaaaacggcgttaagccttatttcagcctacggtacactggaaggtgtttacgagcatattgatgaaataaaacagcctaagctgaaagcatcgctgattgaatataaggatcaggcgtttttaagccgtaagctgggtactattgtaagaaatctggagctgtgtgcttcgctggaggatctgaaaagaaaagaaataaaccgcaaagagcttttgaatgttttcagaaaactcgaatttgaaagtatcatatcaaaaatgaatcttgcttccgctgaggtgacagaattacctcccgcgccggaagagcttaaaataacccatatttcagcggcagaggatcttaagaaatggattgcttacctgcttaaccagaaaaacatttccgtccttcaactgattgaccgggaggattcatacagttcccgtctttcagggctggctttgtgcaccggggatgaggttttttatatcgagaccgggactgcactccccgagaatttgattgcaacagagctgaaagaactgtggcagaatgaaaatattcacaaaatcggacacaatataaaagaatttataacctggctgctgaaacacgatgttgaactgaacggcctttatttcgacactatgattgccgaatacctgatagattccataagaaacggctatcctatagcaagcctttctcacaaatacctgaatcgcagcgttccgtcgctggacgaacttttgggcaagggaaagggagcaaaaaagtactctgaaattccgcccgaaaggctgaaagattacagcgcttataacgtcaaagccatttttgacatatggccgatgcagaaaaaagttcttcaggaaaaccggcaggaggagctttttaatgacatagagcttcctcttataaccgtacttgccagtatggaataccacggtttcaaagttgacgccgcaaaacttcacgaatacggcgaagttcttctgtcacgcataaaagacctggaaaaggtaatttacatgctggccggtgaagaattcaacatcaattcaacgaagcagcttggtaccatattattcgaaaaactgaagcttcccgttgtaaaaagtacaaagaccggatactccaccgacgtcgaggttcttgaagagctttattacaagcatgatataataccatgcataatagaataccgccagcttacaaaactttacaccacctacgccgaaggtcttgaaaaagtgataaatcctgtaaccggtaaaattcattcaagttttaaccagacggttacggctacaggccgcatcagcagtaccgaaccaaatttacagaatatcccagtcagacacgaaatgggaagggaaatacggaaagcttttattccgtcgtcggaaaacgctgtttttgttgatgccgattattcacagatagagcttcgcgtgcttgcccatataacaggcgatgaagccctgataaatgctttcgttaagggggaagatattcatacggccacggcgtcgctggtatttgacgtagctcccgaagatgtgacgccggaactgcgcagaaaggcaaaagccgtaaatttcggcatagtgtacgggatcagtgattacgggctggcacgggatttgggaattacccggaaggaagcaaagcggtatatagacgactattttgccaaataccccaaagtaaaaacctatgtggatgaaattgtgcgggtcggccaggaacaggggtatgtggaaactctgttccacagaagaagataccttcccgagcttgcatctaaaaattttactcagcgttctttcggaaaaagggttgcaatgaatacgcccatacagggcactgcagccgatattattaaaattgcgatggtgaaggtatacaaggctttgaaagaatccggccttaaatccaggcttatcctccaggtccatgacgaacttgttattgagacttttgaagacgaactggagactgtcaaggaacttgtcaaaaagtgcatggaagaggccgttgaattgagtgtgccgcttgttgtcgacgtttcaatcgggaaaaactggtatgaagcctcctgatatggatcc

SEQ ID NO: 346 - DNA, 2772 bp, Artificial Sequence
  Description of Artificial Sequence: Synthetic Clostridium stercorarium DNA Polymerase H826W
atgaaatacctgctgccgaccgctgctgctggtctgctgctcctcgctgcccagccggcgatggccatggatccaaaaataatccttatagacggaaacagtattttaaaccgcggtttttatgccctgtcggggcgatccatgctgactacgtccacaggtctgtataccaatgcggttttcgcttttgtaaatatattgaacaaatatatcgaagaggaaaaccctgattatattgccgttgctttcgatcttagggcaaaaactttccggcacggtctatatgagggatacaaagcgcagcggaaaggcatgcccgatgaacttgcaatgcagatacccctcgcgaaggaagtactgagggcgatgaatattgccataatagagcatgaaggttatgaagccgacgatataatcggcagcctttcgttaaaggccgaaaaagagaattttgacgtaataatccttacgggggacagggattctttccagctgatcagcgacagggtgaaagttatcctgccttcgacgaaagccggaaaaacagagaccaacgtatatgataaacaggccatcattgacaaatacggagttttaccccatcagcttattgacgttaaaggcttaatgggagattcgtcagataatatacccggcgttccgggagtgggtgagaaaacggcgttaagccttatttcagcctacggtacactggaaggtgtttacgagcatattgatgaaataaaacagcctaagctgaaagcatcgctgattgaatataaggatcaggcgtttttaagccgtaagctgggtactattgtaagaaatctggagctgtgtgcttcgctggaggatctgaaaagaaaagaaataaaccgcaaagagcttttgaatgttttcagaaaactcgaatttgaaagtatcatatcaaaaatgaatcttgcttccgctgaggtgacagaattacctcccgcgccggaagagcttaaaataacccatatttcagcggcagaggatcttaagaaatggattgcttacctgcttaaccagaaaaacatttccgtccttcaactgattgaccgggaggattcatacagttcccgtctttcagggctggctttgtgcaccggggatgaggttttttatatcgagaccgggactgcactccccgagaatttgattgcaacagagctgaaagaactgtggcagaatgaaaatattcacaaaatcggacacaatataaaagaatttataacctggctgctgaaacacgatgttgaactgaacggcctttatttcgacactatgattgccgaatacctgatagattccataagaaacggctatcctatagcaagcctttctcacaaatacctgaatcgcagcgttccgtcgctggacgaacttttgggcaagggaaagggagcaaaaaagtactctgaaattccgcccgaaaggctgaaagattacagcgcttataacgtcaaagccatttttgacatatggccgatgcagaaaaaagttcttcaggaaaaccggcaggaggagctttttaatgacatagagcttcctcttataaccgtacttgccagtatggaataccacggtttcaaagttgacgccgcaaaacttcacgaatacggcgaagttcttctgtcacgcataaaagacctggaaaaggtaatttacatgctggccggtgaagaattcaacatcaattcaacgaagcagcttggtaccatattattcgaaaaactgaagcttcccgttgtaaaaagtacaaagaccggatactccaccgacgtcgaggttcttgaagagctttattacaagcatgatataataccatgcataatagaataccgccagcttacaaaactttacaccacctacgccgaaggtcttgaaaaagtgataaatcctgtaaccggtaaaattcattcaagttttaaccagacggttacggctacaggccgcatcagcagtaccgaaccaaatttacagaatatcccagtcagacacgaaatgggaagggaaatacggaaagcttttattccgtcgtcggaaaacgctgtttttgttgatgccgattattcacagatagagcttcgcgtgcttgcccatataacaggcgatgaagccctgataaatgctttcgttaagggggaagatattcatacggccacggcgtcgctggtatttgacgtagctcccgaagatgtgacgccggaactgcgcagaaaggcaaaagccgtaaatttcggcatagtgtacgggatcagtgattacgggctggcacgggatttgggaattacccggaaggaagcaaagcggtatatagacgactattttgccaaataccccaaagtaaaaacctatgtggatgaaattgtgcgggtcggccaggaacaggggtatgtggaaactctgttccacagaagaagataccttcccgagcttgcatctaaaaatttttggcagcgttctttcggaaaaagggttgcaatgaatacgcccatacagggcactgcagccgatattattaaaattgcgatggtgaaggtatacaaggctttgaaagaatccggccttaaatccaggcttatcctccaggtccatgacgaacttgttattgagacttttgaagacgaactggagactgtcaaggaacttgtcaaaaagtgcatggaagaggccgttgaattgagtgtgccgcttgttgtcgacgtttcaatcgggaaaaactggtatgaagcctcctgatatggatcc

SEQ ID NO: 347 - DNA, 2772 bp, Artificial Sequence
  Description of Artificial Sequence: Synthetic Clostridium stercorarium DNA Polymerase H826Y
atgaaatacctgctgccgaccgctgctgctggtctgctgctcctcgctgcccagccggcgatggccatggatccaaaaataatccttatagacggaaacagtattttaaaccgcggtttttatgccctgtcggggcgatccatgctgactacgtccacaggtctgtataccaatgcggttttcgcttttgtaaatatattgaacaaatatatcgaagaggaaaaccctgattatattgccgttgctttcgatcttagggcaaaaactttccggcacggtctatatgagggatacaaagcgcagcggaaaggcatgcccgatgaacttgcaatgcagatacccctcgcgaaggaagtactgagggcgatgaatattgccataatagagcatgaaggttatgaagccgacgatataatcggcagcctttcgttaaaggccgaaaaagagaattttgacgtaataatccttacgggggacagggattctttccagctgatcagcgacagggtgaaagttatcctgccttcgacgaaagccggaaaaacagagaccaacgtatatgataaacaggccatcattgacaaatacggagttttaccccatcagcttattgacgttaaaggcttaatgggagattcgtcagataatatacccggcgttccgggagtgggtgagaaaacggcgttaagccttatttcagcctacggtacactggaaggtgtttacgagcatattgatgaaataaaacagcctaagctgaaagcatcgctgattgaatataaggatcaggcgtttttaagccgtaagctgggtactattgtaagaaatctggagctgtgtgcttcgctggaggatctgaaaagaaaagaaataaaccgcaaagagcttttgaatgttttcagaaaactcgaatttgaaagtatcatatcaaaaatgaatcttgcttccgctgaggtgacagaattacctcccgcgccggaagagcttaaaataacccatatttcagcggcagaggatcttaagaaatggattgcttacctgcttaaccagaaaaacatttccgtccttcaactgattgaccgggaggattcatacagttcccgtctttcagggctggctttgtgcaccggggatgaggttttttatatcgagaccgggactgcactccccgagaatttgattgcaacagagctgaaagaactgtggcagaatgaaaatattcacaaaatcggacacaatataaaagaatttataacctggctgctgaaacacgatgttgaactgaacggcctttatttcgacactatgattgccgaatacctgatagattccataagaaacggctatcctatagcaagcctttctcacaaatacctgaatcgcagcgttccgtcgctggacgaacttttgggcaagggaaagggagcaaaaaagtactctgaaattccgcccgaaaggctgaaagattacagcgcttataacgtcaaagccatttttgacatatggccgatgcagaaaaaagttcttcaggaaaaccggcaggaggagctttttaatgacatagagcttcctcttataaccgtacttgccagtatggaataccacggtttcaaagttgacgccgcaaaacttcacgaatacggcgaagttcttctgtcacgcataaaagacctggaaaaggtaatttacatgctggccggtgaagaattcaacatcaattcaacgaagcagcttggtaccatattattcgaaaaactgaagcttcccgttgtaaaaagtacaaagaccggatactccaccgacgtcgaggttcttgaagagctttattacaagcatgatataataccatgcataatagaataccgccagcttacaaaactttacaccacctacgccgaaggtcttgaaaaagtgataaatcctgtaaccggtaaaattcattcaagttttaaccagacggttacggctacaggccgcatcagcagtaccgaaccaaatttacagaatatcccagtcagacacgaaatgggaagggaaatacggaaagcttttattccgtcgtcggaaaacgctgtttttgttgatgccgattattcacagatagagcttcgcgtgcttgcccatataacaggcgatgaagccctgataaatgctttcgttaagggggaagatattcatacggccacggcgtcgctggtatttgacgtagctcccgaagatgtgacgccggaactgcgcagaaaggcaaaagccgtaaatttcggcatagtgtacgggatcagtgattacgggctggcacgggatttgggaattacccggaaggaagcaaagcggtatatagacgactattttgccaaataccccaaagtaaaaacctatgtggatgaaattgtgcgggtcggccaggaacaggggtatgtggaaactctgttccacagaagaagataccttcccgagcttgcatctaaaaatttttatcagcgttctttcggaaaaagggttgcaatgaatacgcccatacagggcactgcagccgatattattaaaattgcgatggtgaaggtatacaaggctttgaaagaatccggccttaaatccaggcttatcctccaggtccatgacgaacttgttattgagacttttgaagacgaactggagactgtcaaggaacttgtcaaaaagtgcatggaagaggccgttgaattgagtgtgccgcttgttgtcgacgtttcaatcgggaaaaactggtatgaagcctcctgatatggatcc

SEQ ID NO: 348 - DNA, 2772 bp, Artificial Sequence
  Description of Artificial Sequence: Synthetic Clostridium stercorarium DNA Polymerase H826V
atgaaatacctgctgccgaccgctgctgctggtctgctgctcctcgctgcccagccggcgatggccatggatccaaaaataatccttatagacggaaacagtattttaaaccgcggtttttatgccctgtcggggcgatccatgctgactacgtccacaggtctgtataccaatgcggttttcgcttttgtaaatatattgaacaaatatatcgaagaggaaaaccctgattatattgccgttgctttcgatcttagggcaaaaactttccggcacggtctatatgagggatacaaagcgcagcggaaaggcatgcccgatgaacttgcaatgcagatacccctcgcgaaggaagtactgagggcgatgaatattgccataatagagcatgaaggttatgaagccgacgatataatcggcagcctttcgttaaaggccgaaaaagagaattttgacgtaataatccttacgggggacagggattctttccagctgatcagcgacagggtgaaagttatcctgccttcgacgaaagccggaaaaacagagaccaacgtatatgataaacaggccatcattgacaaatacggagttttaccccatcagcttattgacgttaaaggcttaatgggagattcgtcagataatatacccggcgttccgggagtgggtgagaaaacggcgttaagccttatttcagcctacggtacactggaaggtgtttacgagcatattgatgaaataaaacagcctaagctgaaagcatcgctgattgaatataaggatcaggcgtttttaagccgtaagctgggtactattgtaagaaatctggagctgtgtgcttcgctggaggatctgaaaagaaaagaaataaaccgcaaagagcttttgaatgttttcagaaaactcgaatttgaaagtatcatatcaaaaatgaatcttgcttccgctgaggtgacagaattacctcccgcgccggaagagcttaaaataacccatatttcagcggcagaggatcttaagaaatggattgcttacctgcttaaccagaaaaacatttccgtccttcaactgattgaccgggaggattcatacagttcccgtctttcagggctggctttgtgcaccggggatgaggttttttatatcgagaccgggactgcactccccgagaatttgattgcaacagagctgaaagaactgtggcagaatgaaaatattcacaaaatcggacacaatataaaagaatttataacctggctgctgaaacacgatgttgaactgaacggcctttatttcgacactatgattgccgaatacctgatagattccataagaaacggctatcctatagcaagcctttctcacaaatacctgaatcgcagcgttccgtcgctggacgaacttttgggcaagggaaagggagcaaaaaagtactctgaaattccgcccgaaaggctgaaagattacagcgcttataacgtcaaagccatttttgacatatggccgatgcagaaaaaagttcttcaggaaaaccggcaggaggagctttttaatgacatagagcttcctcttataaccgtacttgccagtatggaataccacggtttcaaagttgacgccgcaaaacttcacgaatacggcgaagttcttctgtcacgcataaaagacctggaaaaggtaatttacatgctggccggtgaagaattcaacatcaattcaacgaagcagcttggtaccatattattcgaaaaactgaagcttcccgttgtaaaaagtacaaagaccggatactccaccgacgtcgaggttcttgaagagctttattacaagcatgatataataccatgcataatagaataccgccagcttacaaaactttacaccacctacgccgaaggtcttgaaaaagtgataaatcctgtaaccggtaaaattcattcaagttttaaccagacggttacggctacaggccgcatcagcagtaccgaaccaaatttacagaatatcccagtcagacacgaaatgggaagggaaatacggaaagcttttattccgtcgtcggaaaacgctgtttttgttgatgccgattattcacagatagagcttcgcgtgcttgcccatataacaggcgatgaagccctgataaatgctttcgttaagggggaagatattcatacggccacggcgtcgctggtatttgacgtagctcccgaagatgtgacgccggaactgcgcagaaaggcaaaagccgtaaatttcggcatagtgtacgggatcagtgattacgggctggcacgggatttgggaattacccggaaggaagcaaagcggtatatagacgactattttgccaaataccccaaagtaaaaacctatgtggatgaaattgtgcgggtcggccaggaacaggggtatgtggaaactctgttccacagaagaagataccttcccgagcttgcatctaaaaattttgttcagcgttctttcggaaaaagggttgcaatgaatacgcccatacagggcactgcagccgatattattaaaattgcgatggtgaaggtatacaaggctttgaaagaatccggccttaaatccaggcttatcctccaggtccatgacgaacttgttattgagacttttgaagacgaactggagactgtcaaggaacttgtcaaaaagtgcatggaagaggccgttgaattgagtgtgccgcttgttgtcgacgtttcaatcgggaaaaactggtatgaagcctcctgatatggatcc

SEQ ID NO: 349 - DNA, 2772 bp, Artificial Sequence
  Description of Artificial Sequence: Synthetic Clostridium stercorarium DNA Polymerase Q827A
atgaaatacctgctgccgaccgctgctgctggtctgctgctcctcgctgcccagccggcgatggccatggatccaaaaataatccttatagacggaaacagtattttaaaccgcggtttttatgccctgtcggggcgatccatgctgactacgtccacaggtctgtataccaatgcggttttcgcttttgtaaatatattgaacaaatatatcgaagaggaaaaccctgattatattgccgttgctttcgatcttagggcaaaaactttccggcacggtctatatgagggatacaaagcgcagcggaaaggcatgcccgatgaacttgcaatgcagatacccctcgcgaaggaagtactgagggcgatgaatattgccataatagagcatgaaggttatgaagccgacgatataatcggcagcctttcgttaaaggccgaaaaagagaattttgacgtaataatccttacgggggacagggattctttccagctgatcagcgacagggtgaaagttatcctgccttcgacgaaagccggaaaaacagagaccaacgtatatgataaacaggccatcattgacaaatacggagttttaccccatcagcttattgacgttaaaggcttaatgggagattcgtcagataatatacccggcgttccgggagtgggtgagaaaacggcgttaagccttatttcagcctacggtacactggaaggtgtttacgagcatattgatgaaataaaacagcctaagctgaaagcatcgctgattgaatataaggatcaggcgtttttaagccgtaagctgggtactattgtaagaaatctggagctgtgtgcttcgctggaggatctgaaaagaaaagaaataaaccgcaaagagcttttgaatgttttcagaaaactcgaatttgaaagtatcatatcaaaaatgaatcttgcttccgctgaggtgacagaattacctcccgcgccggaagagcttaaaataacccatatttcagcggcagaggatcttaagaaatggattgcttacctgcttaaccagaaaaacatttccgtccttcaactgattgaccgggaggattcatacagttcccgtctttcagggctggctttgtgcaccggggatgaggttttttatatcgagaccgggactgcactccccgagaatttgattgcaacagagctgaaagaactgtggcagaatgaaaatattcacaaaatcggacacaatataaaagaatttataacctggctgctgaaacacgatgttgaactgaacggcctttatttcgacactatgattgccgaatacctgatagattccataagaaacggctatcctatagcaagcctttctcacaaatacctgaatcgcagcgttccgtcgctggacgaacttttgggcaagggaaagggagcaaaaaagtactctgaaattccgcccgaaaggctgaaagattacagcgcttataacgtcaaagccatttttgacatatggccgatgcagaaaaaagttcttcaggaaaaccggcaggaggagctttttaatgacatagagcttcctcttataaccgtacttgccagtatggaataccacggtttcaaagttgacgccgcaaaacttcacgaatacggcgaagttcttctgtcacgcataaaagacctggaaaaggtaatttacatgctggccggtgaagaattcaacatcaattcaacgaagcagcttggtaccatattattcgaaaaactgaagcttcccgttgtaaaaagtacaaagaccggatactccaccgacgtcgaggttcttgaagagctttattacaagcatgatataataccatgcataatagaataccgccagcttacaaaactttacaccacctacgccgaaggtcttgaaaaagtgataaatcctgtaaccggtaaaattcattcaagttttaaccagacggttacggctacaggccgcatcagcagtaccgaaccaaatttacagaatatcccagtcagacacgaaatgggaagggaaatacggaaagcttttattccgtcgtcggaaaacgctgtttttgttgatgccgattattcacagatagagcttcgcgtgcttgcccatataacaggcgatgaagccctgataaatgctttcgttaagggggaagatattcatacggccacggcgtcgctggtatttgacgtagctcccgaagatgtgacgccggaactgcgcagaaaggcaaaagccgtaaatttcggcatagtgtacgggatcagtgattacgggctggcacgggatttgggaattacccggaaggaagcaaagcggtatatagacgactattttgccaaataccccaaagtaaaaacctatgtggatgaaattgtgcgggtcggccaggaacaggggtatgtggaaactctgttccacagaagaagataccttcccgagcttgcatctaaaaattttcacgctcgttctttcggaaaaagggttgcaatgaatacgcccatacagggcactgcagccgatattattaaaattgcgatggtgaaggtatacaaggctttgaaagaatccggccttaaatccaggcttatcctccaggtccatgacgaacttgttattgagacttttgaagacgaactggagactgtcaaggaacttgtcaaaaagtgcatggaagaggccgttgaattgagtgtgccgcttgttgtcgacgtttcaatcgggaaaaactggtatgaagcctcctgatatggatcc

SEQ ID NO: 350 - DNA, 2772 bp, Artificial Sequence
  Description of Artificial Sequence: Synthetic Clostridium stercorarium DNA Polymerase Q827R
atgaaatacctgctgccgaccgctgctgctggtctgctgctcctcgctgcccagccggcgatggccatggatccaaaaataatccttatagacggaaacagtattttaaaccgcggtttttatgccctgtcggggcgatccatgctgactacgtccacaggtctgtataccaatgcggttttcgcttttgtaaatatattgaacaaatatatcgaagaggaaaaccctgattatattgccgttgctttcgatcttagggcaaaaactttccggcacggtctatatgagggatacaaagcgcagcggaaaggcatgcccgatgaacttgcaatgcagatacccctcgcgaaggaagtactgagggcgatgaatattgccataatagagcatgaaggttatgaagccgacgatataatcggcagcctttcgttaaaggccgaaaaagagaattttgacgtaataatccttacgggggacagggattctttccagctgatcagcgacagggtgaaagttatcctgccttcgacgaaagccggaaaaacagagaccaacgtatatgataaacaggccatcattgacaaatacggagttttaccccatcagcttattgacgttaaaggcttaatgggagattcgtcagataatatacccggcgttccgggagtgggtgagaaaacggcgttaagccttatttcagcctacggtacactggaaggtgtttacgagcatattgatgaaataaaacagcctaagctgaaagcatcgctgattgaatataaggatcaggcgtttttaagccgtaagctgggtactattgtaagaaatctggagctgtgtgcttcgctggaggatctgaaaagaaaagaaataaaccgcaaagagcttttgaatgttttcagaaaactcgaatttgaaagtatcatatcaaaaatgaatcttgcttccgctgaggtgacagaattacctcccgcgccggaagagcttaaaataacccatatttcagcggcagaggatcttaagaaatggattgcttacctgcttaaccagaaaaacatttccgtccttcaactgattgaccgggaggattcatacagttcccgtctttcagggctggctttgtgcaccggggatgaggttttttatatcgagaccgggactgcactccccgagaatttgattgcaacagagctgaaagaactgtggcagaatgaaaatattcacaaaatcggacacaatataaaagaatttataacctggctgctgaaacacgatgttgaactgaacggcctttatttcgacactatgattgccgaatacctgatagattccataagaaacggctatcctatagcaagcctttctcacaaatacctgaatcgcagcgttccgtcgctggacgaacttttgggcaagggaaagggagcaaaaaagtactctgaaattccgcccgaaaggctgaaagattacagcgcttataacgtcaaagccatttttgacatatggccgatgcagaaaaaagttcttcaggaaaaccggcaggaggagctttttaatgacatagagcttcctcttataaccgtacttgccagtatggaataccacggtttcaaagttgacgccgcaaaacttcacgaatacggcgaagttcttctgtcacgcataaaagacctggaaaaggtaatttacatgctggccggtgaagaattcaacatcaattcaacgaagcagcttggtaccatattattcgaaaaactgaagcttcccgttgtaaaaagtacaaagaccggatactccaccgacgtcgaggttcttgaagagctttattacaagcatgatataataccatgcataatagaataccgccagcttacaaaactttacaccacctacgccgaaggtcttgaaaaagtgataaatcctgtaaccggtaaaattcattcaagttttaaccagacggttacggctacaggccgcatcagcagtaccgaaccaaatttacagaatatcccagtcagacacgaaatgggaagggaaatacggaaagcttttattccgtcgtcggaaaacgctgtttttgttgatgccgattattcacagatagagcttcgcgtgcttgcccatataacaggcgatgaagccctgataaatgctttcgttaagggggaagatattcatacggccacggcgtcgctggtatttgacgtagctcccgaagatgtgacgccggaactgcgcagaaaggcaaaagccgtaaatttcggcatagtgtacgggatcagtgattacgggctggcacgggatttgggaattacccggaaggaagcaaagcggtatatagacgactattttgccaaataccccaaagtaaaaacctatgtggatgaaattgtgcgggtcggccaggaacaggggtatgtggaaactctgttccacagaagaagataccttcccgagcttgcatctaaaaattttcaccgtcgttctttcggaaaaagggttgcaatgaatacgcccatacagggcactgcagccgatattattaaaattgcgatggtgaaggtatacaaggctttgaaagaatccggccttaaatccaggcttatcctccaggtccatgacgaacttgttattgagacttttgaagacgaactggagactgtcaaggaacttgtcaaaaagtgcatggaagaggccgttgaattgagtgtgccgcttgttgtcgacgtttcaatcgggaaaaactggtatgaagcctcctgatatggatcc

SEQ ID NO: 351 - DNA, 2772 bp, Artificial Sequence
  Description of Artificial Sequence: Synthetic Clostridium stercorarium DNA Polymerase Q827N
atgaaatacctgctgccgaccgctgctgctggtctgctgctcctcgctgcccagccggcgatggccatggatccaaaaataatccttatagacggaaacagtattttaaaccgcggtttttatgccctgtcggggcgatccatgctgactacgtccacaggtctgtataccaatgcggttttcgcttttgtaaatatattgaacaaatatatcgaagaggaaaaccctgattatattgccgttgctttcgatcttagggcaaaaactttccggcacggtctatatgagggatacaaagcgcagcggaaaggcatgcccgatgaacttgcaatgcagatacccctcgcgaaggaagtactgagggcgatgaatattgccataatagagcatgaaggttatgaagccgacgatataatcggcagcctttcgttaaaggccgaaaaagagaattttgacgtaataatccttacgggggacagggattctttccagctgatcagcgacagggtgaaagttatcctgccttcgacgaaagccggaaaaacagagaccaacgtatatgataaacaggccatcattgacaaatacggagttttaccccatcagcttattgacgttaaaggcttaatgggagattcgtcagataatatacccggcgttccgggagtgggtgagaaaacggcgttaagccttatttcagcctacggtacactggaaggtgtttacgagcatattgatgaaataaaacagcctaagctgaaagcatcgctgattgaatataaggatcaggcgtttttaagccgtaagctgggtactattgtaagaaatctggagctgtgtgcttcgctggaggatctgaaaagaaaagaaataaaccgcaaagagcttttgaatgttttcagaaaactcgaatttgaaagtatcatatcaaaaatgaatcttgcttccgctgaggtgacagaattacctcccgcgccggaagagcttaaaataacccatatttcagcggcagaggatcttaagaaatggattgcttacctgcttaaccagaaaaacatttccgtccttcaactgattgaccgggaggattcatacagttcccgtctttcagggctggctttgtgcaccggggatgaggttttttatatcgagaccgggactgcactccccgagaatttgattgcaacagagctgaaagaactgtggcagaatgaaaatattcacaaaatcggacacaatataaaagaatttataacctggctgctgaaacacgatgttgaactgaacggcctttatttcgacactatgattgccgaatacctgatagattccataagaaacggctatcctatagcaagcctttctcacaaatacctgaatcgcagcgttccgtcgctggacgaacttttgggcaagggaaagggagcaaaaaagtactctgaaattccgcccgaaaggctgaaagattacagcgcttataacgtcaaagccatttttgacatatggccgatgcagaaaaaagttcttcaggaaaaccggcaggaggagctttttaatgacatagagcttcctcttataaccgtacttgccagtatggaataccacggtttcaaagttgacgccgcaaaacttcacgaatacggcgaagttcttctgtcacgcataaaagacctggaaaaggtaatttacatgctggccggtgaagaattcaacatcaattcaacgaagcagcttggtaccatattattcgaaaaactgaagcttcccgttgtaaaaagtacaaagaccggatactccaccgacgtcgaggttcttgaagagctttattacaagcatgatataataccatgcataatagaataccgccagcttacaaaactttacaccacctacgccgaaggtcttgaaaaagtgataaatcctgtaaccggtaaaattcattcaagttttaaccagacggttacggctacaggccgcatcagcagtaccgaaccaaatttacagaatatcccagtcagacacgaaatgggaagggaaatacggaaagcttttattccgtcgtcggaaaacgctgtttttgttgatgccgattattcacagatagagcttcgcgtgcttgcccatataacaggcgatgaagccctgataaatgctttcgttaagggggaagatattcatacggccacggcgtcgctggtatttgacgtagctcccgaagatgtgacgccggaactgcgcagaaaggcaaaagccgtaaatttcggcatagtgtacgggatcagtgattacgggctggcacgggatttgggaattacccggaaggaagcaaagcggtatatagacgactattttgccaaataccccaaagtaaaaacctatgtggatgaaattgtgcgggtcggccaggaacaggggtatgtggaaactctgttccacagaagaagataccttcccgagcttgcatctaaaaattttcacaatcgttctttcggaaaaagggttgcaatgaatacgcccatacagggcactgcagccgatattattaaaattgcgatggtgaaggtatacaaggctttgaaagaatccggccttaaatccaggcttatcctccaggtccatgacgaacttgttattgagacttttgaagacgaactggagactgtcaaggaacttgtcaaaaagtgcatggaagaggccgttgaattgagtgtgccgcttgttgtcgacgtttcaatcgggaaaaactggtatgaagcctcctgatatggatcc

SEQ ID NO: 352 - DNA, 2772 bp, Artificial Sequence
  Description of Artificial Sequence: Synthetic Clostridium stercorarium DNA Polymerase Q827D
atgaaatacctgctgccgaccgctgctgctggtctgctgctcctcgctgcccagccggcgatggccatggatccaaaaataatccttatagacggaaacagtattttaaaccgcggtttttatgccctgtcggggcgatccatgctgactacgtccacaggtctgtataccaatgcggttttcgcttttgtaaatatattgaacaaatatatcgaagaggaaaaccctgattatattgccgttgctttcgatcttagggcaaaaactttccggcacggtctatatgagggatacaaagcgcagcggaaaggcatgcccgatgaacttgcaatgcagatacccctcgcgaaggaagtactgagggcgatgaatattgccataatagagcatgaaggttatgaagccgacgatataatcggcagcctttcgttaaaggccgaaaaagagaattttgacgtaataatccttacgggggacagggattctttccagctgatcagcgacagggtgaaagttatcctgccttcgacgaaagccggaaaaacagagaccaacgtatatgataaacaggccatcattgacaaatacggagttttaccccatcagcttattgacgttaaaggcttaatgggagattcgtcagataatatacccggcgttccgggagtgggtgagaaaacggcgttaagccttatttcagcctacggtacactggaaggtgtttacgagcatattgatgaaataaaacagcctaagctgaaagcatcgctgattgaatataaggatcaggcgtttttaagccgtaagctgggtactattgtaagaaatctggagctgtgtgcttcgctggaggatctgaaaagaaaagaaataaaccgcaaagagcttttgaatgttttcagaaaactcgaatttgaaagtatcatatcaaaaatgaatcttgcttccgctgaggtgacagaattacctcccgcgccggaagagcttaaaataacccatatttcagcggcagaggatcttaagaaatggattgcttacctgcttaaccagaaaaacatttccgtccttcaactgattgaccgggaggattcatacagttcccgtctttcagggctggctttgtgcaccggggatgaggttttttatatcgagaccgggactgcactccccgagaatttgattgcaacagagctgaaagaactgtggcagaatgaaaatattcacaaaatcggacacaatataaaagaatttataacctggctgctgaaacacgatgttgaactgaacggcctttatttcgacactatgattgccgaatacctgatagattccataagaaacggctatcctatagcaagcctttctcacaaatacctgaatcgcagcgttccgtcgctggacgaacttttgggcaagggaaagggagcaaaaaagtactctgaaattccgcccgaaaggctgaaagattacagcgcttataacgtcaaagccatttttgacatatggccgatgcagaaaaaagttcttcaggaaaaccggcaggaggagctttttaatgacatagagcttcctcttataaccgtacttgccagtatggaataccacggtttcaaagttgacgccgcaaaacttcacgaatacggcgaagttcttctgtcacgcataaaagacctggaaaaggtaatttacatgctggccggtgaagaattcaacatcaattcaacgaagcagcttggtaccatattattcgaaaaactgaagcttcccgttgtaaaaagtacaaagaccggatactccaccgacgtcgaggttcttgaagagctttattacaagcatgatataataccatgcataatagaataccgccagcttacaaaactttacaccacctacgccgaaggtcttgaaaaagtgataaatcctgtaaccggtaaaattcattcaagttttaaccagacggttacggctacaggccgcatcagcagtaccgaaccaaatttacagaatatcccagtcagacacgaaatgggaagggaaatacggaaagcttttattccgtcgtcggaaaacgctgtttttgttgatgccgattattcacagatagagcttcgcgtgcttgcccatataacaggcgatgaagccctgataaatgctttcgttaagggggaagatattcatacggccacggcgtcgctggtatttgacgtagctcccgaagatgtgacgccggaactgcgcagaaaggcaaaagccgtaaatttcggcatagtgtacgggatcagtgattacgggctggcacgggatttgggaattacccggaaggaagcaaagcggtatatagacgactattttgccaaataccccaaagtaaaaacctatgtggatgaaattgtgcgggtcggccaggaacaggggtatgtggaaactctgttccacagaagaagataccttcccgagcttgcatctaaaaattttcacgatcgttctttcggaaaaagggttgcaatgaatacgcccatacagggcactgcagccgatattattaaaattgcgatggtgaaggtatacaaggctttgaaagaatccggccttaaatccaggcttatcctccaggtccatgacgaacttgttattgagacttttgaagacgaactggagactgtcaaggaacttgtcaaaaagtgcatggaagaggccgttgaattgagtgtgccgcttgttgtcgacgtttcaatcgggaaaaactggtatgaagcctcctgatatggatcc

SEQ ID NO: 353 - DNA, 2772 bp, Artificial Sequence
  Description of Artificial Sequence: Synthetic Clostridium stercorarium DNA Polymerase Q827C
atgaaatacctgctgccgaccgctgctgctggtctgctgctcctcgctgcccagccggcgatggccatggatccaaaaataatccttatagacggaaacagtattttaaaccgcggtttttatgccctgtcggggcgatccatgctgactacgtccacaggtctgtataccaatgcggttttcgcttttgtaaatatattgaacaaatatatcgaagaggaaaaccctgattatattgccgttgctttcgatcttagggcaaaaactttccggcacggtctatatgagggatacaaagcgcagcggaaaggcatgcccgatgaacttgcaatgcagatacccctcgcgaaggaagtactgagggcgatgaatattgccataatagagcatgaaggttatgaagccgacgatataatcggcagcctttcgttaaaggccgaaaaagagaattttgacgtaataatccttacgggggacagggattctttccagctgatcagcgacagggtgaaagttatcctgccttcgacgaaagccggaaaaacagagaccaacgtatatgataaacaggccatcattgacaaatacggagttttaccccatcagcttattgacgttaaaggcttaatgggagattcgtcagataatatacccggcgttccgggagtgggtgagaaaacggcgttaagccttatttcagcctacggtacactggaaggtgtttacgagcatattgatgaaataaaacagcctaagctgaaagcatcgctgattgaatataaggatcaggcgtttttaagccgtaagctgggtactattgtaagaaatctggagctgtgtgcttcgctggaggatctgaaaagaaaagaaataaaccgcaaagagcttttgaatgttttcagaaaactcgaatttgaaagtatcatatcaaaaatgaatcttgcttccgctgaggtgacagaattacctcccgcgccggaagagcttaaaataacccatatttcagcggcagaggatcttaagaaatggattgcttacctgcttaaccagaaaaacatttccgtccttcaactgattgaccgggaggattcatacagttcccgtctttcagggctggctttgtgcaccggggatgaggttttttatatcgagaccgggactgcactccccgagaatttgattgcaacagagctgaaagaactgtggcagaatgaaaatattcacaaaatcggacacaatataaaagaatttataacctggctgctgaaacacgatgttgaactgaacggcctttatttcgacactatgattgccgaatacctgatagattccataagaaacggctatcctatagcaagcctttctcacaaatacctgaatcgcagcgttccgtcgctggacgaacttttgggcaagggaaagggagcaaaaaagtactctgaaattccgcccgaaaggctgaaagattacagcgcttataacgtcaaagccatttttgacatatggccgatgcagaaaaaagttcttcaggaaaaccggcaggaggagctttttaatgacatagagcttcctcttataaccgtacttgccagtatggaataccacggtttcaaagttgacgccgcaaaacttcacgaatacggcgaagttcttctgtcacgcataaaagacctggaaaaggtaatttacatgctggccggtgaagaattcaacatcaattcaacgaagcagcttggtaccatattattcgaaaaactgaagcttcccgttgtaaaaagtacaaagaccggatactccaccgacgtcgaggttcttgaagagctttattacaagcatgatataataccatgcataatagaataccgccagcttacaaaactttacaccacctacgccgaaggtcttgaaaaagtgataaatcctgtaaccggtaaaattcattcaagttttaaccagacggttacggctacaggccgcatcagcagtaccgaaccaaatttacagaatatcccagtcagacacgaaatgggaagggaaatacggaaagcttttattccgtcgtcggaaaacgctgtttttgttgatgccgattattcacagatagagcttcgcgtgcttgcccatataacaggcgatgaagccctgataaatgctttcgttaagggggaagatattcatacggccacggcgtcgctggtatttgacgtagctcccgaagatgtgacgccggaactgcgcagaaaggcaaaagccgtaaatttcggcatagtgtacgggatcagtgattacgggctggcacgggatttgggaattacccggaaggaagcaaagcggtatatagacgactattttgccaaataccccaaagtaaaaacctatgtggatgaaattgtgcgggtcggccaggaacaggggtatgtggaaactctgttccacagaagaagataccttcccgagcttgcatctaaaaattttcactgtcgttctttcggaaaaagggttgcaatgaatacgcccatacagggcactgcagccgatattattaaaattgcgatggtgaaggtatacaaggctttgaaagaatccggccttaaatccaggcttatcctccaggtccatgacgaacttgttattgagacttttgaagacgaactggagactgtcaaggaacttgtcaaaaagtgcatggaagaggccgttgaattgagtgtgccgcttgttgtcgacgtttcaatcgggaaaaactggtatgaagcctcctgatatggatcc

SEQ ID NO: 354 - DNA, 2772 bp, Artificial Sequence
  Description of Artificial Sequence: Synthetic Clostridium stercorarium DNA Polymerase Q827E
atgaaatacctgctgccgaccgctgctgctggtctgctgctcctcgctgcccagccggcgatggccatggatccaaaaataatccttatagacggaaacagtattttaaaccgcggtttttatgccctgtcggggcgatccatgctgactacgtccacaggtctgtataccaatgcggttttcgcttttgtaaatatattgaacaaatatatcgaagaggaaaaccctgattatattgccgttgctttcgatcttagggcaaaaactttccggcacggtctatatgagggatacaaagcgcagcggaaaggcatgcccgatgaacttgcaatgcagatacccctcgcgaaggaagtactgagggcgatgaatattgccataatagagcatgaaggttatgaagccgacgatataatcggcagcctttcgttaaaggccgaaaaagagaattttgacgtaataatccttacgggggacagggattctttccagctgatcagcgacagggtgaaagttatcctgccttcgacgaaagccggaaaaacagagaccaacgtatatgataaacaggccatcattgacaaatacggagttttaccccatcagcttattgacgttaaaggcttaatgggagattcgtcagataatatacccggcgttccgggagtgggtgagaaaacggcgttaagccttatttcagcctacggtacactggaaggtgtttacgagcatattgatgaaataaaacagcctaagctgaaagcatcgctgattgaatataaggatcaggcgtttttaagccgtaagctgggtactattgtaagaaatctggagctgtgtgcttcgctggaggatctgaaaagaaaagaaataaaccgcaaagagcttttgaatgttttcagaaaactcgaatttgaaagtatcatatcaaaaatgaatcttgcttccgctgaggtgacagaattacctcccgcgccggaagagcttaaaataacccatatttcagcggcagaggatcttaagaaatggattgcttacctgcttaaccagaaaaacatttccgtccttcaactgattgaccgggaggattcatacagttcccgtctttcagggctggctttgtgcaccggggatgaggttttttatatcgagaccgggactgcactccccgagaatttgattgcaacagagctgaaagaactgtggcagaatgaaaatattcacaaaatcggacacaatataaaagaatttataacctggctgctgaaacacgatgttgaactgaacggcctttatttcgacactatgattgccgaatacctgatagattccataagaaacggctatcctatagcaagcctttctcacaaatacctgaatcgcagcgttccgtcgctggacgaacttttgggcaagggaaagggagcaaaaaagtactctgaaattccgcccgaaaggctgaaagattacagcgcttataacgtcaaagccatttttgacatatggccgatgcagaaaaaagttcttcaggaaaaccggcaggaggagctttttaatgacatagagcttcctcttataaccgtacttgccagtatggaataccacggtttcaaagttgacgccgcaaaacttcacgaatacggcgaagttcttctgtcacgcataaaagacctggaaaaggtaatttacatgctggccggtgaagaattcaacatcaattcaacgaagcagcttggtaccatattattcgaaaaactgaagcttcccgttgtaaaaagtacaaagaccggatactccaccgacgtcgaggttcttgaagagctttattacaagcatgatataataccatgcataatagaataccgccagcttacaaaactttacaccacctacgccgaaggtcttgaaaaagtgataaatcctgtaaccggtaaaattcattcaagttttaaccagacggttacggctacaggccgcatcagcagtaccgaaccaaatttacagaatatcccagtcagacacgaaatgggaagggaaatacggaaagcttttattccgtcgtcggaaaacgctgtttttgttgatgccgattattcacagatagagcttcgcgtgcttgcccatataacaggcgatgaagccctgataaatgctttcgttaagggggaagatattcatacggccacggcgtcgctggtatttgacgtagctcccgaagatgtgacgccggaactgcgcagaaaggcaaaagccgtaaatttcggcatagtgtacgggatcagtgattacgggctggcacgggatttgggaattacccggaaggaagcaaagcggtatatagacgactattttgccaaataccccaaagtaaaaacctatgtggatgaaattgtgcgggtcggccaggaacaggggtatgtggaaactctgttccacagaagaagataccttcccgagcttgcatctaaaaattttcacgaacgttctttcggaaaaagggttgcaatgaatacgcccatacagggcactgcagccgatattattaaaattgcgatggtgaaggtatacaaggctttgaaagaatccggccttaaatccaggcttatcctccaggtccatgacgaacttgttattgagacttttgaagacgaactggagactgtcaaggaacttgtcaaaaagtgcatggaagaggccgttgaattgagtgtgccgcttgttgtcgacgtttcaatcgggaaaaactggtatgaagcctcctgatatggatcc

SEQ ID NO: 355 - DNA, 2772 bp, Artificial Sequence
  Description of Artificial Sequence: Synthetic Clostridium stercorarium DNA Polymerase Q827G
atgaaatacctgctgccgaccgctgctgctggtctgctgctcctcgctgcccagccggcgatggccatggatccaaaaataatccttatagacggaaacagtattttaaaccgcggtttttatgccctgtcggggcgatccatgctgactacgtccacaggtctgtataccaatgcggttttcgcttttgtaaatatattgaacaaatatatcgaagaggaaaaccctgattatattgccgttgctttcgatcttagggcaaaaactttccggcacggtctatatgagggatacaaagcgcagcggaaaggcatgcccgatgaacttgcaatgcagatacccctcgcgaaggaagtactgagggcgatgaatattgccataatagagcatgaaggttatgaagccgacgatataatcggcagcctttcgttaaaggccgaaaaagagaattttgacgtaataatccttacgggggacagggattctttccagctgatcagcgacagggtgaaagttatcctgccttcgacgaaagccggaaaaacagagaccaacgtatatgataaacaggccatcattgacaaatacggagttttaccccatcagcttattgacgttaaaggcttaatgggagattcgtcagataatatacccggcgttccgggagtgggtgagaaaacggcgttaagccttatttcagcctacggtacactggaaggtgtttacgagcatattgatgaaataaaacagcctaagctgaaagcatcgctgattgaatataaggatcaggcgtttttaagccgtaagctgggtactattgtaagaaatctggagctgtgtgcttcgctggaggatctgaaaagaaaagaaataaaccgcaaagagcttttgaatgttttcagaaaactcgaatttgaaagtatcatatcaaaaatgaatcttgcttccgctgaggtgacagaattacctcccgcgccggaagagcttaaaataacccatatttcagcggcagaggatcttaagaaatggattgcttacctgcttaaccagaaaaacatttccgtccttcaactgattgaccgggaggattcatacagttcccgtctttcagggctggctttgtgcaccggggatgaggttttttatatcgagaccgggactgcactccccgagaatttgattgcaacagagctgaaagaactgtggcagaatgaaaatattcacaaaatcggacacaatataaaagaatttataacctggctgctgaaacacgatgttgaactgaacggcctttatttcgacactatgattgccgaatacctgatagattccataagaaacggctatcctatagcaagcctttctcacaaatacctgaatcgcagcgttccgtcgctggacgaacttttgggcaagggaaagggagcaaaaaagtactctgaaattccgcccgaaaggctgaaagattacagcgcttataacgtcaaagccatttttgacatatggccgatgcagaaaaaagttcttcaggaaaaccggcaggaggagctttttaatgacatagagcttcctcttataaccgtacttgccagtatggaataccacggtttcaaagttgacgccgcaaaacttcacgaatacggcgaagttcttctgtcacgcataaaagacctggaaaaggtaatttacatgctggccggtgaagaattcaacatcaattcaacgaagcagcttggtaccatattattcgaaaaactgaagcttcccgttgtaaaaagtacaaagaccggatactccaccgacgtcgaggttcttgaagagctttattacaagcatgatataataccatgcataatagaataccgccagcttacaaaactttacaccacctacgccgaaggtcttgaaaaagtgataaatcctgtaaccggtaaaattcattcaagttttaaccagacggttacggctacaggccgcatcagcagtaccgaaccaaatttacagaatatcccagtcagacacgaaatgggaagggaaatacggaaagcttttattccgtcgtcggaaaacgctgtttttgttgatgccgattattcacagatagagcttcgcgtgcttgcccatataacaggcgatgaagccctgataaatgctttcgttaagggggaagatattcatacggccacggcgtcgctggtatttgacgtagctcccgaagatgtgacgccggaactgcgcagaaaggcaaaagccgtaaatttcggcatagtgtacgggatcagtgattacgggctggcacgggatttgggaattacccggaaggaagcaaagcggtatatagacgactattttgccaaataccccaaagtaaaaacctatgtggatgaaattgtgcgggtcggccaggaacaggggtatgtggaaactctgttccacagaagaagataccttcccgagcttgcatctaaaaattttcacggtcgttctttcggaaaaagggttgcaatgaatacgcccatacagggcactgcagccgatattattaaaattgcgatggtgaaggtatacaaggctttgaaagaatccggccttaaatccaggcttatcctccaggtccatgacgaacttgttattgagacttttgaagacgaactggagactgtcaaggaacttgtcaaaaagtgcatggaagaggccgttgaattgagtgtgccgcttgttgtcgacgtttcaatcgggaaaaactggtatgaagcctcctgatatggatcc

SEQ ID NO: 356 - DNA, 2772 bp, Artificial Sequence
  Description of Artificial Sequence: Synthetic Clostridium stercorarium DNA Polymerase Q827H
atgaaatacctgctgccgaccgctgctgctggtctgctgctcctcgctgcccagccggcgatggccatggatccaaaaataatccttatagacggaaacagtattttaaaccgcggtttttatgccctgtcggggcgatccatgctgactacgtccacaggtctgtataccaatgcggttttcgcttttgtaaatatattgaacaaatatatcgaagaggaaaaccctgattatattgccgttgctttcgatcttagggcaaaaactttccggcacggtctatatgagggatacaaagcgcagcggaaaggcatgcccgatgaacttgcaatgcagatacccctcgcgaaggaagtactgagggcgatgaatattgccataatagagcatgaaggttatgaagccgacgatataatcggcagcctttcgttaaaggccgaaaaagagaattttgacgtaataatccttacgggggacagggattctttccagctgatcagcgacagggtgaaagttatcctgccttcgacgaaagccggaaaaacagagaccaacgtatatgataaacaggccatcattgacaaatacggagttttaccccatcagcttattgacgttaaaggcttaatgggagattcgtcagataatatacccggcgttccgggagtgggtgagaaaacggcgttaagccttatttcagcctacggtacactggaaggtgtttacgagcatattgatgaaataaaacagcctaagctgaaagcatcgctgattgaatataaggatcaggcgtttttaagccgtaagctgggtactattgtaagaaatctggagctgtgtgcttcgctggaggatctgaaaagaaaagaaataaaccgcaaagagcttttgaatgttttcagaaaactcgaatttgaaagtatcatatcaaaaatgaatcttgcttccgctgaggtgacagaattacctcccgcgccggaagagcttaaaataacccatatttcagcggcagaggatcttaagaaatggattgcttacctgcttaaccagaaaaacatttccgtccttcaactgattgaccgggaggattcatacagttcccgtctttcagggctggctttgtgcaccggggatgaggttttttatatcgagaccgggactgcactccccgagaatttgattgcaacagagctgaaagaactgtggcagaatgaaaatattcacaaaatcggacacaatataaaagaatttataacctggctgctgaaacacgatgttgaactgaacggcctttatttcgacactatgattgccgaatacctgatagattccataagaaacggctatcctatagcaagcctttctcacaaatacctgaatcgcagcgttccgtcgctggacgaacttttgggcaagggaaagggagcaaaaaagtactctgaaattccgcccgaaaggctgaaagattacagcgcttataacgtcaaagccatttttgacatatggccgatgcagaaaaaagttcttcaggaaaaccggcaggaggagctttttaatgacatagagcttcctcttataaccgtacttgccagtatggaataccacggtttcaaagttgacgccgcaaaacttcacgaatacggcgaagttcttctgtcacgcataaaagacctggaaaaggtaatttacatgctggccggtgaagaattcaacatcaattcaacgaagcagcttggtaccatattattcgaaaaactgaagcttcccgttgtaaaaagtacaaagaccggatactccaccgacgtcgaggttcttgaagagctttattacaagcatgatataataccatgcataatagaataccgccagcttacaaaactttacaccacctacgccgaaggtcttgaaaaagtgataaatcctgtaaccggtaaaattcattcaagttttaaccagacggttacggctacaggccgcatcagcagtaccgaaccaaatttacagaatatcccagtcagacacgaaatgggaagggaaatacggaaagcttttattccgtcgtcggaaaacgctgtttttgttgatgccgattattcacagatagagcttcgcgtgcttgcccatataacaggcgatgaagccctgataaatgctttcgttaagggggaagatattcatacggccacggcgtcgctggtatttgacgtagctcccgaagatgtgacgccggaactgcgcagaaaggcaaaagccgtaaatttcggcatagtgtacgggatcagtgattacgggctggcacgggatttgggaattacccggaaggaagcaaagcggtatatagacgactattttgccaaataccccaaagtaaaaacctatgtggatgaaattgtgcgggtcggccaggaacaggggtatgtggaaactctgttccacagaagaagataccttcccgagcttgcatctaaaaattttcaccatcgttctttcggaaaaagggttgcaatgaatacgcccatacagggcactgcagccgatattattaaaattgcgatggtgaaggtatacaaggctttgaaagaatccggccttaaatccaggcttatcctccaggtccatgacgaacttgttattgagacttttgaagacgaactggagactgtcaaggaacttgtcaaaaagtgcatggaagaggccgttgaattgagtgtgccgcttgttgtcgacgtttcaatcgggaaaaactggtatgaagcctcctgatatggatcc

SEQ ID NO: 357 - DNA, 2772 bp, Artificial Sequence
  Description of Artificial Sequence: Synthetic Clostridium stercorarium DNA Polymerase Q827I
atgaaatacctgctgccgaccgctgctgctggtctgctgctcctcgctgcccagccggcgatggccatggatccaaaaataatccttatagacggaaacagtattttaaaccgcggtttttatgccctgtcggggcgatccatgctgactacgtccacaggtctgtataccaatgcggttttcgcttttgtaaatatattgaacaaatatatcgaagaggaaaaccctgattatattgccgttgctttcgatcttagggcaaaaactttccggcacggtctatatgagggatacaaagcgcagcggaaaggcatgcccgatgaacttgcaatgcagatacccctcgcgaaggaagtactgagggcgatgaatattgccataatagagcatgaaggttatgaagccgacgatataatcggcagcctttcgttaaaggccgaaaaagagaattttgacgtaataatccttacgggggacagggattctttccagctgatcagcgacagggtgaaagttatcctgccttcgacgaaagccggaaaaacagagaccaacgtatatgataaacaggccatcattgacaaatacggagttttaccccatcagcttattgacgttaaaggcttaatgggagattcgtcagataatatacccggcgttccgggagtgggtgagaaaacggcgttaagccttatttcagcctacggtacactggaaggtgtttacgagcatattgatgaaataaaacagcctaagctgaaagcatcgctgattgaatataaggatcaggcgtttttaagccgtaagctgggtactattgtaagaaatctggagctgtgtgcttcgctggaggatctgaaaagaaaagaaataaaccgcaaagagcttttgaatgttttcagaaaactcgaatttgaaagtatcatatcaaaaatgaatcttgcttccgctgaggtgacagaattacctcccgcgccggaagagcttaaaataacccatatttcagcggcagaggatcttaagaaatggattgcttacctgcttaaccagaaaaacatttccgtccttcaactgattgaccgggaggattcatacagttcccgtctttcagggctggctttgtgcaccggggatgaggttttttatatcgagaccgggactgcactccccgagaatttgattgcaacagagctgaaagaactgtggcagaatgaaaatattcacaaaatcggacacaatataaaagaatttataacctggctgctgaaacacgatgttgaactgaacggcctttatttcgacactatgattgccgaatacctgatagattccataagaaacggctatcctatagcaagcctttctcacaaatacctgaatcgcagcgttccgtcgctggacgaacttttgggcaagggaaagggagcaaaaaagtactctgaaattccgcccgaaaggctgaaagattacagcgcttataacgtcaaagccatttttgacatatggccgatgcagaaaaaagttcttcaggaaaaccggcaggaggagctttttaatgacatagagcttcctcttataaccgtacttgccagtatggaataccacggtttcaaagttgacgccgcaaaacttcacgaatacggcgaagttcttctgtcacgcataaaagacctggaaaaggtaatttacatgctggccggtgaagaattcaacatcaattcaacgaagcagcttggtaccatattattcgaaaaactgaagcttcccgttgtaaaaagtacaaagaccggatactccaccgacgtcgaggttcttgaagagctttattacaagcatgatataataccatgcataatagaataccgccagcttacaaaactttacaccacctacgccgaaggtcttgaaaaagtgataaatcctgtaaccggtaaaattcattcaagttttaaccagacggttacggctacaggccgcatcagcagtaccgaaccaaatttacagaatatcccagtcagacacgaaatgggaagggaaatacggaaagcttttattccgtcgtcggaaaacgctgtttttgttgatgccgattattcacagatagagcttcgcgtgcttgcccatataacaggcgatgaagccctgataaatgctttcgttaagggggaagatattcatacggccacggcgtcgctggtatttgacgtagctcccgaagatgtgacgccggaactgcgcagaaaggcaaaagccgtaaatttcggcatagtgtacgggatcagtgattacgggctggcacgggatttgggaattacccggaaggaagcaaagcggtatatagacgactattttgccaaataccccaaagtaaaaacctatgtggatgaaattgtgcgggtcggccaggaacaggggtatgtggaaactctgttccacagaagaagataccttcccgagcttgcatctaaaaattttcacattcgttctttcggaaaaagggttgcaatgaatacgcccatacagggcactgcagccgatattattaaaattgcgatggtgaaggtatacaaggctttgaaagaatccggccttaaatccaggcttatcctccaggtccatgacgaacttgttattgagacttttgaagacgaactggagactgtcaaggaacttgtcaaaaagtgcatggaagaggccgttgaattgagtgtgccgcttgttgtcgacgtttcaatcgggaaaaactggtatgaagcctcctgatatggatcc

SEQ ID NO: 358 - DNA, 2772 bp, Artificial Sequence
  Description of Artificial Sequence: Synthetic Clostridium stercorarium DNA Polymerase Q827L
atgaaatacctgctgccgaccgctgctgctggtctgctgctcctcgctgcccagccggcgatggccatggatccaaaaataatccttatagacggaaacagtattttaaaccgcggtttttatgccctgtcggggcgatccatgctgactacgtccacaggtctgtataccaatgcggttttcgcttttgtaaatatattgaacaaatatatcgaagaggaaaaccctgattatattgccgttgctttcgatcttagggcaaaaactttccggcacggtctatatgagggatacaaagcgcagcggaaaggcatgcccgatgaacttgcaatgcagatacccctcgcgaaggaagtactgagggcgatgaatattgccataatagagcatgaaggttatgaagccgacgatataatcggcagcctttcgttaaaggccgaaaaagagaattttgacgtaataatccttacgggggacagggattctttccagctgatcagcgacagggtgaaagttatcctgccttcgacgaaagccggaaaaacagagaccaacgtatatgataaacaggccatcattgacaaatacggagttttaccccatcagcttattgacgttaaaggcttaatgggagattcgtcagataatatacccggcgttccgggagtgggtgagaaaacggcgttaagccttatttcagcctacggtacactggaaggtgtttacgagcatattgatgaaataaaacagcctaagctgaaagcatcgctgattgaatataaggatcaggcgtttttaagccgtaagctgggtactattgtaagaaatctggagctgtgtgcttcgctggaggatctgaaaagaaaagaaataaaccgcaaagagcttttgaatgttttcagaaaactcgaatttgaaagtatcatatcaaaaatgaatcttgcttccgctgaggtgacagaattacctcccgcgccggaagagcttaaaataacccatatttcagcggcagaggatcttaagaaatggattgcttacctgcttaaccagaaaaacatttccgtccttcaactgattgaccgggaggattcatacagttcccgtctttcagggctggctttgtgcaccggggatgaggttttttatatcgagaccgggactgcactccccgagaatttgattgcaacagagctgaaagaactgtggcagaatgaaaatattcacaaaatcggacacaatataaaagaatttataacctggctgctgaaacacgatgttgaactgaacggcctttatttcgacactatgattgccgaatacctgatagattccataagaaacggctatcctatagcaagcctttctcacaaatacctgaatcgcagcgttccgtcgctggacgaacttttgggcaagggaaagggagcaaaaaagtactctgaaattccgcccgaaaggctgaaagattacagcgcttataacgtcaaagccatttttgacatatggccgatgcagaaaaaagttcttcaggaaaaccggcaggaggagctttttaatgacatagagcttcctcttataaccgtacttgccagtatggaataccacggtttcaaagttgacgccgcaaaacttcacgaatacggcgaagttcttctgtcacgcataaaagacctggaaaaggtaatttacatgctggccggtgaagaattcaacatcaattcaacgaagcagcttggtaccatattattcgaaaaactgaagcttcccgttgtaaaaagtacaaagaccggatactccaccgacgtcgaggttcttgaagagctttattacaagcatgatataataccatgcataatagaataccgccagcttacaaaactttacaccacctacgccgaaggtcttgaaaaagtgataaatcctgtaaccggtaaaattcattcaagttttaaccagacggttacggctacaggccgcatcagcagtaccgaaccaaatttacagaatatcccagtcagacacgaaatgggaagggaaatacggaaagcttttattccgtcgtcggaaaacgctgtttttgttgatgccgattattcacagatagagcttcgcgtgcttgcccatataacaggcgatgaagccctgataaatgctttcgttaagggggaagatattcatacggccacggcgtcgctggtatttgacgtagctcccgaagatgtgacgccggaactgcgcagaaaggcaaaagccgtaaatttcggcatagtgtacgggatcagtgattacgggctggcacgggatttgggaattacccggaaggaagcaaagcggtatatagacgactattttgccaaataccccaaagtaaaaacctatgtggatgaaattgtgcgggtcggccaggaacaggggtatgtggaaactctgttccacagaagaagataccttcccgagcttgcatctaaaaattttcaccttcgttctttcggaaaaagggttgcaatgaatacgcccatacagggcactgcagccgatattattaaaattgcgatggtgaaggtatacaaggctttgaaagaatccggccttaaatccaggcttatcctccaggtccatgacgaacttgttattgagacttttgaagacgaactggagactgtcaaggaacttgtcaaaaagtgcatggaagaggccgttgaattgagtgtgccgcttgttgtcgacgtttcaatcgggaaaaactggtatgaagcctcctgatatggatcc

SEQ ID NO: 359 - DNA, 2772 bp, Artificial Sequence
  Description of Artificial Sequence: Synthetic Clostridium stercorarium DNA Polymerase Q827K
atgaaatacctgctgccgaccgctgctgctggtctgctgctcctcgctgcccagccggcgatggccatggatccaaaaataatccttatagacggaaacagtattttaaaccgcggtttttatgccctgtcggggcgatccatgctgactacgtccacaggtctgtataccaatgcggttttcgcttttgtaaatatattgaacaaatatatcgaagaggaaaaccctgattatattgccgttgctttcgatcttagggcaaaaactttccggcacggtctatatgagggatacaaagcgcagcggaaaggcatgcccgatgaacttgcaatgcagatacccctcgcgaaggaagtactgagggcgatgaatattgccataatagagcatgaaggttatgaagccgacgatataatcggcagcctttcgttaaaggccgaaaaagagaattttgacgtaataatccttacgggggacagggattctttccagctgatcagcgacagggtgaaagttatcctgccttcgacgaaagccggaaaaacagagaccaacgtatatgataaacaggccatcattgacaaatacggagttttaccccatcagcttattgacgttaaaggcttaatgggagattcgtcagataatatacccggcgttccgggagtgggtgagaaaacggcgttaagccttatttcagcctacggtacactggaaggtgtttacgagcatattgatgaaataaaacagcctaagctgaaagcatcgctgattgaatataaggatcaggcgtttttaagccgtaagctgggtactattgtaagaaatctggagctgtgtgcttcgctggaggatctgaaaagaaaagaaataaaccgcaaagagcttttgaatgttttcagaaaactcgaatttgaaagtatcatatcaaaaatgaatcttgcttccgctgaggtgacagaattacctcccgcgccggaagagcttaaaataacccatatttcagcggcagaggatcttaagaaatggattgcttacctgcttaaccagaaaaacatttccgtccttcaactgattgaccgggaggattcatacagttcccgtctttcagggctggctttgtgcaccggggatgaggttttttatatcgagaccgggactgcactccccgagaatttgattgcaacagagctgaaagaactgtggcagaatgaaaatattcacaaaatcggacacaatataaaagaatttataacctggctgctgaaacacgatgttgaactgaacggcctttatttcgacactatgattgccgaatacctgatagattccataagaaacggctatcctatagcaagcctttctcacaaatacctgaatcgcagcgttccgtcgctggacgaacttttgggcaagggaaagggagcaaaaaagtactctgaaattccgcccgaaaggctgaaagattacagcgcttataacgtcaaagccatttttgacatatggccgatgcagaaaaaagttcttcaggaaaaccggcaggaggagctttttaatgacatagagcttcctcttataaccgtacttgccagtatggaataccacggtttcaaagttgacgccgcaaaacttcacgaatacggcgaagttcttctgtcacgcataaaagacctggaaaaggtaatttacatgctggccggtgaagaattcaacatcaattcaacgaagcagcttggtaccatattattcgaaaaactgaagcttcccgttgtaaaaagtacaaagaccggatactccaccgacgtcgaggttcttgaagagctttattacaagcatgatataataccatgcataatagaataccgccagcttacaaaactttacaccacctacgccgaaggtcttgaaaaagtgataaatcctgtaaccggtaaaattcattcaagttttaaccagacggttacggctacaggccgcatcagcagtaccgaaccaaatttacagaatatcccagtcagacacgaaatgggaagggaaatacggaaagcttttattccgtcgtcggaaaacgctgtttttgttgatgccgattattcacagatagagcttcgcgtgcttgcccatataacaggcgatgaagccctgataaatgctttcgttaagggggaagatattcatacggccacggcgtcgctggtatttgacgtagctcccgaagatgtgacgccggaactgcgcagaaaggcaaaagccgtaaatttcggcatagtgtacgggatcagtgattacgggctggcacgggatttgggaattacccggaaggaagcaaagcggtatatagacgactattttgccaaataccccaaagtaaaaacctatgtggatgaaattgtgcgggtcggccaggaacaggggtatgtggaaactctgttccacagaagaagataccttcccgagcttgcatctaaaaattttcacaaacgttctttcggaaaaagggttgcaatgaatacgcccatacagggcactgcagccgatattattaaaattgcgatggtgaaggtatacaaggctttgaaagaatccggccttaaatccaggcttatcctccaggtccatgacgaacttgttattgagacttttgaagacgaactggagactgtcaaggaacttgtcaaaaagtgcatggaagaggccgttgaattgagtgtgccgcttgttgtcgacgtttcaatcgggaaaaactggtatgaagcctcctgatatggatcc

SEQ ID NO: 360 - DNA, 2772 bp, Artificial Sequence
  Description of Artificial Sequence: Synthetic Clostridium stercorarium DNA Polymerase Q827M
atgaaatacctgctgccgaccgctgctgctggtctgctgctcctcgctgcccagccggcgatggccatggatccaaaaataatccttatagacggaaacagtattttaaaccgcggtttttatgccctgtcggggcgatccatgctgactacgtccacaggtctgtataccaatgcggttttcgcttttgtaaatatattgaacaaatatatcgaagaggaaaaccctgattatattgccgttgctttcgatcttagggcaaaaactttccggcacggtctatatgagggatacaaagcgcagcggaaaggcatgcccgatgaacttgcaatgcagatacccctcgcgaaggaagtactgagggcgatgaatattgccataatagagcatgaaggttatgaagccgacgatataatcggcagcctttcgttaaaggccgaaaaagagaattttgacgtaataatccttacgggggacagggattctttccagctgatcagcgacagggtgaaagttatcctgccttcgacgaaagccggaaaaacagagaccaacgtatatgataaacaggccatcattgacaaatacggagttttaccccatcagcttattgacgttaaaggcttaatgggagattcgtcagataatatacccggcgttccgggagtgggtgagaaaacggcgttaagccttatttcagcctacggtacactggaaggtgtttacgagcatattgatgaaataaaacagcctaagctgaaagcatcgctgattgaatataaggatcaggcgtttttaagccgtaagctgggtactattgtaagaaatctggagctgtgtgcttcgctggaggatctgaaaagaaaagaaataaaccgcaaagagcttttgaatgttttcagaaaactcgaatttgaaagtatcatatcaaaaatgaatcttgcttccgctgaggtgacagaattacctcccgcgccggaagagcttaaaataacccatatttcagcggcagaggatcttaagaaatggattgcttacctgcttaaccagaaaaacatttccgtccttcaactgattgaccgggaggattcatacagttcccgtctttcagggctggctttgtgcaccggggatgaggttttttatatcgagaccgggactgcactccccgagaatttgattgcaacagagctgaaagaactgtggcagaatgaaaatattcacaaaatcggacacaatataaaagaatttataacctggctgctgaaacacgatgttgaactgaacggcctttatttcgacactatgattgccgaatacctgatagattccataagaaacggctatcctatagcaagcctttctcacaaatacctgaatcgcagcgttccgtcgctggacgaacttttgggcaagggaaagggagcaaaaaagtactctgaaattccgcccgaaaggctgaaagattacagcgcttataacgtcaaagccatttttgacatatggccgatgcagaaaaaagttcttcaggaaaaccggcaggaggagctttttaatgacatagagcttcctcttataaccgtacttgccagtatggaataccacggtttcaaagttgacgccgcaaaacttcacgaatacggcgaagttcttctgtcacgcataaaagacctggaaaaggtaatttacatgctggccggtgaagaattcaacatcaattcaacgaagcagcttggtaccatattattcgaaaaactgaagcttcccgttgtaaaaagtacaaagaccggatactccaccgacgtcgaggttcttgaagagctttattacaagcatgatataataccatgcataatagaataccgccagcttacaaaactttacaccacctacgccgaaggtcttgaaaaagtgataaatcctgtaaccggtaaaattcattcaagttttaaccagacggttacggctacaggccgcatcagcagtaccgaaccaaatttacagaatatcccagtcagacacgaaatgggaagggaaatacggaaagcttttattccgtcgtcggaaaacgctgtttttgttgatgccgattattcacagatagagcttcgcgtgcttgcccatataacaggcgatgaagccctgataaatgctttcgttaagggggaagatattcatacggccacggcgtcgctggtatttgacgtagctcccgaagatgtgacgccggaactgcgcagaaaggcaaaagccgtaaatttcggcatagtgtacgggatcagtgattacgggctggcacgggatttgggaattacccggaaggaagcaaagcggtatatagacgactattttgccaaataccccaaagtaaaaacctatgtggatgaaattgtgcgggtcggccaggaacaggggtatgtggaaactctgttccacagaagaagataccttcccgagcttgcatctaaaaattttcacatgcgttctttcggaaaaagggttgcaatgaatacgcccatacagggcactgcagccgatattattaaaattgcgatggtgaaggtatacaaggctttgaaagaatccggccttaaatccaggcttatcctccaggtccatgacgaacttgttattgagacttttgaagacgaactggagactgtcaaggaacttgtcaaaaagtgcatggaagaggccgttgaattgagtgtgccgcttgttgtcgacgtttcaatcgggaaaaactggtatgaagcctcctgatatggatcc

SEQ ID NO: 361 - DNA, 2772 bp, Artificial Sequence
  Description of Artificial Sequence: Synthetic Clostridium stercorarium DNA Polymerase Q827F
atgaaatacctgctgccgaccgctgctgctggtctgctgctcctcgctgcccagccggcgatggccatggatccaaaaataatccttatagacggaaacagtattttaaaccgcggtttttatgccctgtcggggcgatccatgctgactacgtccacaggtctgtataccaatgcggttttcgcttttgtaaatatattgaacaaatatatcgaagaggaaaaccctgattatattgccgttgctttcgatcttagggcaaaaactttccggcacggtctatatgagggatacaaagcgcagcggaaaggcatgcccgatgaacttgcaatgcagatacccctcgcgaaggaagtactgagggcgatgaatattgccataatagagcatgaaggttatgaagccgacgatataatcggcagcctttcgttaaaggccgaaaaagagaattttgacgtaataatccttacgggggacagggattctttccagctgatcagcgacagggtgaaagttatcctgccttcgacgaaagccggaaaaacagagaccaacgtatatgataaacaggccatcattgacaaatacggagttttaccccatcagcttattgacgttaaaggcttaatgggagattcgtcagataatatacccggcgttccgggagtgggtgagaaaacggcgttaagccttatttcagcctacggtacactggaaggtgtttacgagcatattgatgaaataaaacagcctaagctgaaagcatcgctgattgaatataaggatcaggcgtttttaagccgtaagctgggtactattgtaagaaatctggagctgtgtgcttcgctggaggatctgaaaagaaaagaaataaaccgcaaagagcttttgaatgttttcagaaaactcgaatttgaaagtatcatatcaaaaatgaatcttgcttccgctgaggtgacagaattacctcccgcgccggaagagcttaaaataacccatatttcagcggcagaggatcttaagaaatggattgcttacctgcttaaccagaaaaacatttccgtccttcaactgattgaccgggaggattcatacagttcccgtctttcagggctggctttgtgcaccggggatgaggttttttatatcgagaccgggactgcactccccgagaatttgattgcaacagagctgaaagaactgtggcagaatgaaaatattcacaaaatcggacacaatataaaagaatttataacctggctgctgaaacacgatgttgaactgaacggcctttatttcgacactatgattgccgaatacctgatagattccataagaaacggctatcctatagcaagcctttctcacaaatacctgaatcgcagcgttccgtcgctggacgaacttttgggcaagggaaagggagcaaaaaagtactctgaaattccgcccgaaaggctgaaagattacagcgcttataacgtcaaagccatttttgacatatggccgatgcagaaaaaagttcttcaggaaaaccggcaggaggagctttttaatgacatagagcttcctcttataaccgtacttgccagtatggaataccacggtttcaaagttgacgccgcaaaacttcacgaatacggcgaagttcttctgtcacgcataaaagacctggaaaaggtaatttacatgctggccggtgaagaattcaacatcaattcaacgaagcagcttggtaccatattattcgaaaaactgaagcttcccgttgtaaaaagtacaaagaccggatactccaccgacgtcgaggttcttgaagagctttattacaagcatgatataataccatgcataatagaataccgccagcttacaaaactttacaccacctacgccgaaggtcttgaaaaagtgataaatcctgtaaccggtaaaattcattcaagttttaaccagacggttacggctacaggccgcatcagcagtaccgaaccaaatttacagaatatcccagtcagacacgaaatgggaagggaaatacggaaagcttttattccgtcgtcggaaaacgctgtttttgttgatgccgattattcacagatagagcttcgcgtgcttgcccatataacaggcgatgaagccctgataaatgctttcgttaagggggaagatattcatacggccacggcgtcgctggtatttgacgtagctcccgaagatgtgacgccggaactgcgcagaaaggcaaaagccgtaaatttcggcatagtgtacgggatcagtgattacgggctggcacgggatttgggaattacccggaaggaagcaaagcggtatatagacgactattttgccaaataccccaaagtaaaaacctatgtggatgaaattgtgcgggtcggccaggaacaggggtatgtggaaactctgttccacagaagaagataccttcccgagcttgcatctaaaaattttcactttcgttctttcggaaaaagggttgcaatgaatacgcccatacagggcactgcagccgatattattaaaattgcgatggtgaaggtatacaaggctttgaaagaatccggccttaaatccaggcttatcctccaggtccatgacgaacttgttattgagacttttgaagacgaactggagactgtcaaggaacttgtcaaaaagtgcatggaagaggccgttgaattgagtgtgccgcttgttgtcgacgtttcaatcgggaaaaactggtatgaagcctcctgatatggatcc

SEQ ID NO: 362 - DNA, 2772 bp, Artificial Sequence
  Description of Artificial Sequence: Synthetic Clostridium stercorarium DNA Polymerase Q827P
atgaaatacctgctgccgaccgctgctgctggtctgctgctcctcgctgcccagccggcgatggccatggatccaaaaataatccttatagacggaaacagtattttaaaccgcggtttttatgccctgtcggggcgatccatgctgactacgtccacaggtctgtataccaatgcggttttcgcttttgtaaatatattgaacaaatatatcgaagaggaaaaccctgattatattgccgttgctttcgatcttagggcaaaaactttccggcacggtctatatgagggatacaaagcgcagcggaaaggcatgcccgatgaacttgcaatgcagatacccctcgcgaaggaagtactgagggcgatgaatattgccataatagagcatgaaggttatgaagccgacgatataatcggcagcctttcgttaaaggccgaaaaagagaattttgacgtaataatccttacgggggacagggattctttccagctgatcagcgacagggtgaaagttatcctgccttcgacgaaagccggaaaaacagagaccaacgtatatgataaacaggccatcattgacaaatacggagttttaccccatcagcttattgacgttaaaggcttaatgggagattcgtcagataatatacccggcgttccgggagtgggtgagaaaacggcgttaagccttatttcagcctacggtacactggaaggtgtttacgagcatattgatgaaataaaacagcctaagctgaaagcatcgctgattgaatataaggatcaggcgtttttaagccgtaagctgggtactattgtaagaaatctggagctgtgtgcttcgctggaggatctgaaaagaaaagaaataaaccgcaaagagcttttgaatgttttcagaaaactcgaatttgaaagtatcatatcaaaaatgaatcttgcttccgctgaggtgacagaattacctcccgcgccggaagagcttaaaataacccatatttcagcggcagaggatcttaagaaatggattgcttacctgcttaaccagaaaaacatttccgtccttcaactgattgaccgggaggattcatacagttcccgtctttcagggctggctttgtgcaccggggatgaggttttttatatcgagaccgggactgcactccccgagaatttgattgcaacagagctgaaagaactgtggcagaatgaaaatattcacaaaatcggacacaatataaaagaatttataacctggctgctgaaacacgatgttgaactgaacggcctttatttcgacactatgattgccgaatacctgatagattccataagaaacggctatcctatagcaagcctttctcacaaatacctgaatcgcagcgttccgtcgctggacgaacttttgggcaagggaaagggagcaaaaaagtactctgaaattccgcccgaaaggctgaaagattacagcgcttataacgtcaaagccatttttgacatatggccgatgcagaaaaaagttcttcaggaaaaccggcaggaggagctttttaatgacatagagcttcctcttataaccgtacttgccagtatggaataccacggtttcaaagttgacgccgcaaaacttcacgaatacggcgaagttcttctgtcacgcataaaagacctggaaaaggtaatttacatgctggccggtgaagaattcaacatcaattcaacgaagcagcttggtaccatattattcgaaaaactgaagcttcccgttgtaaaaagtacaaagaccggatactccaccgacgtcgaggttcttgaagagctttattacaagcatgatataataccatgcataatagaataccgccagcttacaaaactttacaccacctacgccgaaggtcttgaaaaagtgataaatcctgtaaccggtaaaattcattcaagttttaaccagacggttacggctacaggccgcatcagcagtaccgaaccaaatttacagaatatcccagtcagacacgaaatgggaagggaaatacggaaagcttttattccgtcgtcggaaaacgctgtttttgttgatgccgattattcacagatagagcttcgcgtgcttgcccatataacaggcgatgaagccctgataaatgctttcgttaagggggaagatattcatacggccacggcgtcgctggtatttgacgtagctcccgaagatgtgacgccggaactgcgcagaaaggcaaaagccgtaaatttcggcatagtgtacgggatcagtgattacgggctggcacgggatttgggaattacccggaaggaagcaaagcggtatatagacgactattttgccaaataccccaaagtaaaaacctatgtggatgaaattgtgcgggtcggccaggaacaggggtatgtggaaactctgttccacagaagaagataccttcccgagcttgcatctaaaaattttcaccctcgttctttcggaaaaagggttgcaatgaatacgcccatacagggcactgcagccgatattattaaaattgcgatggtgaaggtatacaaggctttgaaagaatccggccttaaatccaggcttatcctccaggtccatgacgaacttgttattgagacttttgaagacgaactggagactgtcaaggaacttgtcaaaaagtgcatggaagaggccgttgaattgagtgtgccgcttgttgtcgacgtttcaatcgggaaaaactggtatgaagcctcctgatatggatcc

SEQ ID NO: 363 - DNA, 2772 bp, Artificial Sequence
  Description of Artificial Sequence: Synthetic Clostridium stercorarium DNA Polymerase Q827S
atgaaatacctgctgccgaccgctgctgctggtctgctgctcctcgctgcccagccggcgatggccatggatccaaaaataatccttatagacggaaacagtattttaaaccgcggtttttatgccctgtcggggcgatccatgctgactacgtccacaggtctgtataccaatgcggttttcgcttttgtaaatatattgaacaaatatatcgaagaggaaaaccctgattatattgccgttgctttcgatcttagggcaaaaactttccggcacggtctatatgagggatacaaagcgcagcggaaaggcatgcccgatgaacttgcaatgcagatacccctcgcgaaggaagtactgagggcgatgaatattgccataatagagcatgaaggttatgaagccgacgatataatcggcagcctttcgttaaaggccgaaaaagagaattttgacgtaataatccttacgggggacagggattctttccagctgatcagcgacagggtgaaagttatcctgccttcgacgaaagccggaaaaacagagaccaacgtatatgataaacaggccatcattgacaaatacggagttttaccccatcagcttattgacgttaaaggcttaatgggagattcgtcagataatatacccggcgttccgggagtgggtgagaaaacggcgttaagccttatttcagcctacggtacactggaaggtgtttacgagcatattgatgaaataaaacagcctaagctgaaagcatcgctgattgaatataaggatcaggcgtttttaagccgtaagctgggtactattgtaagaaatctggagctgtgtgcttcgctggaggatctgaaaagaaaagaaataaaccgcaaagagcttttgaatgttttcagaaaactcgaatttgaaagtatcatatcaaaaatgaatcttgcttccgctgaggtgacagaattacctcccgcgccggaagagcttaaaataacccatatttcagcggcagaggatcttaagaaatggattgcttacctgcttaaccagaaaaacatttccgtccttcaactgattgaccgggaggattcatacagttcccgtctttcagggctggctttgtgcaccggggatgaggttttttatatcgagaccgggactgcactccccgagaatttgattgcaacagagctgaaagaactgtggcagaatgaaaatattcacaaaatcggacacaatataaaagaatttataacctggctgctgaaacacgatgttgaactgaacggcctttatttcgacactatgattgccgaatacctgatagattccataagaaacggctatcctatagcaagcctttctcacaaatacctgaatcgcagcgttccgtcgctggacgaacttttgggcaagggaaagggagcaaaaaagtactctgaaattccgcccgaaaggctgaaagattacagcgcttataacgtcaaagccatttttgacatatggccgatgcagaaaaaagttcttcaggaaaaccggcaggaggagctttttaatgacatagagcttcctcttataaccgtacttgccagtatggaataccacggtttcaaagttgacgccgcaaaacttcacgaatacggcgaagttcttctgtcacgcataaaagacctggaaaaggtaatttacatgctggccggtgaagaattcaacatcaattcaacgaagcagcttggtaccatattattcgaaaaactgaagcttcccgttgtaaaaagtacaaagaccggatactccaccgacgtcgaggttcttgaagagctttattacaagcatgatataataccatgcataatagaataccgccagcttacaaaactttacaccacctacgccgaaggtcttgaaaaagtgataaatcctgtaaccggtaaaattcattcaagttttaaccagacggttacggctacaggccgcatcagcagtaccgaaccaaatttacagaatatcccagtcagacacgaaatgggaagggaaatacggaaagcttttattccgtcgtcggaaaacgctgtttttgttgatgccgattattcacagatagagcttcgcgtgcttgcccatataacaggcgatgaagccctgataaatgctttcgttaagggggaagatattcatacggccacggcgtcgctggtatttgacgtagctcccgaagatgtgacgccggaactgcgcagaaaggcaaaagccgtaaatttcggcatagtgtacgggatcagtgattacgggctggcacgggatttgggaattacccggaaggaagcaaagcggtatatagacgactattttgccaaataccccaaagtaaaaacctatgtggatgaaattgtgcgggtcggccaggaacaggggtatgtggaaactctgttccacagaagaagataccttcccgagcttgcatctaaaaattttcactctcgttctttcggaaaaagggttgcaatgaatacgcccatacagggcactgcagccgatattattaaaattgcgatggtgaaggtatacaaggctttgaaagaatccggccttaaatccaggcttatcctccaggtccatgacgaacttgttattgagacttttgaagacgaactggagactgtcaaggaacttgtcaaaaagtgcatggaagaggccgttgaattgagtgtgccgcttgttgtcgacgtttcaatcgggaaaaactggtatgaagcctcctgatatggatcc

SEQ ID NO: 364 - DNA, 2772 bp, Artificial Sequence
  Description of Artificial Sequence: Synthetic Clostridium stercorarium DNA Polymerase Q827A
atgaaatacctgctgccgaccgctgctgctggtctgctgctcctcgctgcccagccggcgatggccatggatccaaaaataatccttatagacggaaacagtattttaaaccgcggtttttatgccctgtcggggcgatccatgctgactacgtccacaggtctgtataccaatgcggttttcgcttttgtaaatatattgaacaaatatatcgaagaggaaaaccctgattatattgccgttgctttcgatcttagggcaaaaactttccggcacggtctatatgagggatacaaagcgcagcggaaaggcatgcccgatgaacttgcaatgcagatacccctcgcgaaggaagtactgagggcgatgaatattgccataatagagcatgaaggttatgaagccgacgatataatcggcagcctttcgttaaaggccgaaaaagagaattttgacgtaataatccttacgggggacagggattctttccagctgatcagcgacagggtgaaagttatcctgccttcgacgaaagccggaaaaacagagaccaacgtatatgataaacaggccatcattgacaaatacggagttttaccccatcagcttattgacgttaaaggcttaatgggagattcgtcagataatatacccggcgttccgggagtgggtgagaaaacggcgttaagccttatttcagcctacggtacactggaaggtgtttacgagcatattgatgaaataaaacagcctaagctgaaagcatcgctgattgaatataaggatcaggcgtttttaagccgtaagctgggtactattgtaagaaatctggagctgtgtgcttcgctggaggatctgaaaagaaaagaaataaaccgcaaagagcttttgaatgttttcagaaaactcgaatttgaaagtatcatatcaaaaatgaatcttgcttccgctgaggtgacagaattacctcccgcgccggaagagcttaaaataacccatatttcagcggcagaggatcttaagaaatggattgcttacctgcttaaccagaaaaacatttccgtccttcaactgattgaccgggaggattcatacagttcccgtctttcagggctggctttgtgcaccggggatgaggttttttatatcgagaccgggactgcactccccgagaatttgattgcaacagagctgaaagaactgtggcagaatgaaaatattcacaaaatcggacacaatataaaagaatttataacctggctgctgaaacacgatgttgaactgaacggcctttatttcgacactatgattgccgaatacctgatagattccataagaaacggctatcctatagcaagcctttctcacaaatacctgaatcgcagcgttccgtcgctggacgaacttttgggcaagggaaagggagcaaaaaagtactctgaaattccgcccgaaaggctgaaagattacagcgcttataacgtcaaagccatttttgacatatggccgatgcagaaaaaagttcttcaggaaaaccggcaggaggagctttttaatgacatagagcttcctcttataaccgtacttgccagtatggaataccacggtttcaaagttgacgccgcaaaacttcacgaatacggcgaagttcttctgtcacgcataaaagacctggaaaaggtaatttacatgctggccggtgaagaattcaacatcaattcaacgaagcagcttggtaccatattattcgaaaaactgaagcttcccgttgtaaaaagtacaaagaccggatactccaccgacgtcgaggttcttgaagagctttattacaagcatgatataataccatgcataatagaataccgccagcttacaaaactttacaccacctacgccgaaggtcttgaaaaagtgataaatcctgtaaccggtaaaattcattcaagttttaaccagacggttacggctacaggccgcatcagcagtaccgaaccaaatttacagaatatcccagtcagacacgaaatgggaagggaaatacggaaagcttttattccgtcgtcggaaaacgctgtttttgttgatgccgattattcacagatagagcttcgcgtgcttgcccatataacaggcgatgaagccctgataaatgctttcgttaagggggaagatattcatacggccacggcgtcgctggtatttgacgtagctcccgaagatgtgacgccggaactgcgcagaaaggcaaaagccgtaaatttcggcatagtgtacgggatcagtgattacgggctggcacgggatttgggaattacccggaaggaagcaaagcggtatatagacgactattttgccaaataccccaaagtaaaaacctatgtggatgaaattgtgcgggtcggccaggaacaggggtatgtggaaactctgttccacagaagaagataccttcccgagcttgcatctaaaaattttcacactcgttctttcggaaaaagggttgcaatgaatacgcccatacagggcactgcagccgatattattaaaattgcgatggtgaaggtatacaaggctttgaaagaatccggccttaaatccaggcttatcctccaggtccatgacgaacttgttattgagacttttgaagacgaactggagactgtcaaggaacttgtcaaaaagtgcatggaagaggccgttgaattgagtgtgccgcttgttgtcgacgtttcaatcgggaaaaactggtatgaagcctcctgatatggatcc

SEQ ID NO: 365 - DNA, 2772 bp, Artificial Sequence
  Description of Artificial Sequence: Synthetic Clostridium stercorarium DNA Polymerase Q827W
atgaaatacctgctgccgaccgctgctgctggtctgctgctcctcgctgcccagccggcgatggccatggatccaaaaataatccttatagacggaaacagtattttaaaccgcggtttttatgccctgtcggggcgatccatgctgactacgtccacaggtctgtataccaatgcggttttcgcttttgtaaatatattgaacaaatatatcgaagaggaaaaccctgattatattgccgttgctttcgatcttagggcaaaaactttccggcacggtctatatgagggatacaaagcgcagcggaaaggcatgcccgatgaacttgcaatgcagatacccctcgcgaaggaagtactgagggcgatgaatattgccataatagagcatgaaggttatgaagccgacgatataatcggcagcctttcgttaaaggccgaaaaagagaattttgacgtaataatccttacgggggacagggattctttccagctgatcagcgacagggtgaaagttatcctgccttcgacgaaagccggaaaaacagagaccaacgtatatgataaacaggccatcattgacaaatacggagttttaccccatcagcttattgacgttaaaggcttaatgggagattcgtcagataatatacccggcgttccgggagtgggtgagaaaacggcgttaagccttatttcagcctacggtacactggaaggtgtttacgagcatattgatgaaataaaacagcctaagctgaaagcatcgctgattgaatataaggatcaggcgtttttaagccgtaagctgggtactattgtaagaaatctggagctgtgtgcttcgctggaggatctgaaaagaaaagaaataaaccgcaaagagcttttgaatgttttcagaaaactcgaatttgaaagtatcatatcaaaaatgaatcttgcttccgctgaggtgacagaattacctcccgcgccggaagagcttaaaataacccatatttcagcggcagaggatcttaagaaatggattgcttacctgcttaaccagaaaaacatttccgtccttcaactgattgaccgggaggattcatacagttcccgtctttcagggctggctttgtgcaccggggatgaggttttttatatcgagaccgggactgcactccccgagaatttgattgcaacagagctgaaagaactgtggcagaatgaaaatattcacaaaatcggacacaatataaaagaatttataacctggctgctgaaacacgatgttgaactgaacggcctttatttcgacactatgattgccgaatacctgatagattccataagaaacggctatcctatagcaagcctttctcacaaatacctgaatcgcagcgttccgtcgctggacgaacttttgggcaagggaaagggagcaaaaaagtactctgaaattccgcccgaaaggctgaaagattacagcgcttataacgtcaaagccatttttgacatatggccgatgcagaaaaaagttcttcaggaaaaccggcaggaggagctttttaatgacatagagcttcctcttataaccgtacttgccagtatggaataccacggtttcaaagttgacgccgcaaaacttcacgaatacggcgaagttcttctgtcacgcataaaagacctggaaaaggtaatttacatgctggccggtgaagaattcaacatcaattcaacgaagcagcttggtaccatattattcgaaaaactgaagcttcccgttgtaaaaagtacaaagaccggatactccaccgacgtcgaggttcttgaagagctttattacaagcatgatataataccatgcataatagaataccgccagcttacaaaactttacaccacctacgccgaaggtcttgaaaaagtgataaatcctgtaaccggtaaaattcattcaagttttaaccagacggttacggctacaggccgcatcagcagtaccgaaccaaatttacagaatatcccagtcagacacgaaatgggaagggaaatacggaaagcttttattccgtcgtcggaaaacgctgtttttgttgatgccgattattcacagatagagcttcgcgtgcttgcccatataacaggcgatgaagccctgataaatgctttcgttaagggggaagatattcatacggccacggcgtcgctggtatttgacgtagctcccgaagatgtgacgccggaactgcgcagaaaggcaaaagccgtaaatttcggcatagtgtacgggatcagtgattacgggctggcacgggatttgggaattacccggaaggaagcaaagcggtatatagacgactattttgccaaataccccaaagtaaaaacctatgtggatgaaattgtgcgggtcggccaggaacaggggtatgtggaaactctgttccacagaagaagataccttcccgagcttgcatctaaaaattttcactggcgttctttcggaaaaagggttgcaatgaatacgcccatacagggcactgcagccgatattattaaaattgcgatggtgaaggtatacaaggctttgaaagaatccggccttaaatccaggcttatcctccaggtccatgacgaacttgttattgagacttttgaagacgaactggagactgtcaaggaacttgtcaaaaagtgcatggaagaggccgttgaattgagtgtgccgcttgttgtcgacgtttcaatcgggaaaaactggtatgaagcctcctgatatggatcc

SEQ ID NO: 366 - DNA, 2772 bp, Artificial Sequence
  Description of Artificial Sequence: Synthetic Clostridium stercorarium DNA Polymerase Q827Y
atgaaatacctgctgccgaccgctgctgctggtctgctgctcctcgctgcccagccggcgatggccatggatccaaaaataatccttatagacggaaacagtattttaaaccgcggtttttatgccctgtcggggcgatccatgctgactacgtccacaggtctgtataccaatgcggttttcgcttttgtaaatatattgaacaaatatatcgaagaggaaaaccctgattatattgccgttgctttcgatcttagggcaaaaactttccggcacggtctatatgagggatacaaagcgcagcggaaaggcatgcccgatgaacttgcaatgcagatacccctcgcgaaggaagtactgagggcgatgaatattgccataatagagcatgaaggttatgaagccgacgatataatcggcagcctttcgttaaaggccgaaaaagagaattttgacgtaataatccttacgggggacagggattctttccagctgatcagcgacagggtgaaagttatcctgccttcgacgaaagccggaaaaacagagaccaacgtatatgataaacaggccatcattgacaaatacggagttttaccccatcagcttattgacgttaaaggcttaatgggagattcgtcagataatatacccggcgttccgggagtgggtgagaaaacggcgttaagccttatttcagcctacggtacactggaaggtgtttacgagcatattgatgaaataaaacagcctaagctgaaagcatcgctgattgaatataaggatcaggcgtttttaagccgtaagctgggtactattgtaagaaatctggagctgtgtgcttcgctggaggatctgaaaagaaaagaaataaaccgcaaagagcttttgaatgttttcagaaaactcgaatttgaaagtatcatatcaaaaatgaatcttgcttccgctgaggtgacagaattacctcccgcgccggaagagcttaaaataacccatatttcagcggcagaggatcttaagaaatggattgcttacctgcttaaccagaaaaacatttccgtccttcaactgattgaccgggaggattcatacagttcccgtctttcagggctggctttgtgcaccggggatgaggttttttatatcgagaccgggactgcactccccgagaatttgattgcaacagagctgaaagaactgtggcagaatgaaaatattcacaaaatcggacacaatataaaagaatttataacctggctgctgaaacacgatgttgaactgaacggcctttatttcgacactatgattgccgaatacctgatagattccataagaaacggctatcctatagcaagcctttctcacaaatacctgaatcgcagcgttccgtcgctggacgaacttttgggcaagggaaagggagcaaaaaagtactctgaaattccgcccgaaaggctgaaagattacagcgcttataacgtcaaagccatttttgacatatggccgatgcagaaaaaagttcttcaggaaaaccggcaggaggagctttttaatgacatagagcttcctcttataaccgtacttgccagtatggaataccacggtttcaaagttgacgccgcaaaacttcacgaatacggcgaagttcttctgtcacgcataaaagacctggaaaaggtaatttacatgctggccggtgaagaattcaacatcaattcaacgaagcagcttggtaccatattattcgaaaaactgaagcttcccgttgtaaaaagtacaaagaccggatactccaccgacgtcgaggttcttgaagagctttattacaagcatgatataataccatgcataatagaataccgccagcttacaaaactttacaccacctacgccgaaggtcttgaaaaagtgataaatcctgtaaccggtaaaattcattcaagttttaaccagacggttacggctacaggccgcatcagcagtaccgaaccaaatttacagaatatcccagtcagacacgaaatgggaagggaaatacggaaagcttttattccgtcgtcggaaaacgctgtttttgttgatgccgattattcacagatagagcttcgcgtgcttgcccatataacaggcgatgaagccctgataaatgctttcgttaagggggaagatattcatacggccacggcgtcgctggtatttgacgtagctcccgaagatgtgacgccggaactgcgcagaaaggcaaaagccgtaaatttcggcatagtgtacgggatcagtgattacgggctggcacgggatttgggaattacccggaaggaagcaaagcggtatatagacgactattttgccaaataccccaaagtaaaaacctatgtggatgaaattgtgcgggtcggccaggaacaggggtatgtggaaactctgttccacagaagaagataccttcccgagcttgcatctaaaaattttcactatcgttctttcggaaaaagggttgcaatgaatacgcccatacagggcactgcagccgatattattaaaattgcgatggtgaaggtatacaaggctttgaaagaatccggccttaaatccaggcttatcctccaggtccatgacgaacttgttattgagacttttgaagacgaactggagactgtcaaggaacttgtcaaaaagtgcatggaagaggccgttgaattgagtgtgccgcttgttgtcgacgtttcaatcgggaaaaactggtatgaagcctcctgatatggatcc

SEQ ID NO: 367 - DNA, 2772 bp, Artificial Sequence
  Description of Artificial Sequence: Synthetic Clostridium stercorarium DNA Polymerase Q827V
atgaaatacctgctgccgaccgctgctgctggtctgctgctcctcgctgcccagccggcgatggccatggatccaaaaataatccttatagacggaaacagtattttaaaccgcggtttttatgccctgtcggggcgatccatgctgactacgtccacaggtctgtataccaatgcggttttcgcttttgtaaatatattgaacaaatatatcgaagaggaaaaccctgattatattgccgttgctttcgatcttagggcaaaaactttccggcacggtctatatgagggatacaaagcgcagcggaaaggcatgcccgatgaacttgcaatgcagatacccctcgcgaaggaagtactgagggcgatgaatattgccataatagagcatgaaggttatgaagccgacgatataatcggcagcctttcgttaaaggccgaaaaagagaattttgacgtaataatccttacgggggacagggattctttccagctgatcagcgacagggtgaaagttatcctgccttcgacgaaagccggaaaaacagagaccaacgtatatgataaacaggccatcattgacaaatacggagttttaccccatcagcttattgacgttaaaggcttaatgggagattcgtcagataatatacccggcgttccgggagtgggtgagaaaacggcgttaagccttatttcagcctacggtacactggaaggtgtttacgagcatattgatgaaataaaacagcctaagctgaaagcatcgctgattgaatataaggatcaggcgtttttaagccgtaagctgggtactattgtaagaaatctggagctgtgtgcttcgctggaggatctgaaaagaaaagaaataaaccgcaaagagcttttgaatgttttcagaaaactcgaatttgaaagtatcatatcaaaaatgaatcttgcttccgctgaggtgacagaattacctcccgcgccggaagagcttaaaataacccatatttcagcggcagaggatcttaagaaatggattgcttacctgcttaaccagaaaaacatttccgtccttcaactgattgaccgggaggattcatacagttcccgtctttcagggctggctttgtgcaccggggatgaggttttttatatcgagaccgggactgcactccccgagaatttgattgcaacagagctgaaagaactgtggcagaatgaaaatattcacaaaatcggacacaatataaaagaatttataacctggctgctgaaacacgatgttgaactgaacggcctttatttcgacactatgattgccgaatacctgatagattccataagaaacggctatcctatagcaagcctttctcacaaatacctgaatcgcagcgttccgtcgctggacgaacttttgggcaagggaaagggagcaaaaaagtactctgaaattccgcccgaaaggctgaaagattacagcgcttataacgtcaaagccatttttgacatatggccgatgcagaaaaaagttcttcaggaaaaccggcaggaggagctttttaatgacatagagcttcctcttataaccgtacttgccagtatggaataccacggtttcaaagttgacgccgcaaaacttcacgaatacggcgaagttcttctgtcacgcataaaagacctggaaaaggtaatttacatgctggccggtgaagaattcaacatcaattcaacgaagcagcttggtaccatattattcgaaaaactgaagcttcccgttgtaaaaagtacaaagaccggatactccaccgacgtcgaggttcttgaagagctttattacaagcatgatataataccatgcataatagaataccgccagcttacaaaactttacaccacctacgccgaaggtcttgaaaaagtgataaatcctgtaaccggtaaaattcattcaagttttaaccagacggttacggctacaggccgcatcagcagtaccgaaccaaatttacagaatatcccagtcagacacgaaatgggaagggaaatacggaaagcttttattccgtcgtcggaaaacgctgtttttgttgatgccgattattcacagatagagcttcgcgtgcttgcccatataacaggcgatgaagccctgataaatgctttcgttaagggggaagatattcatacggccacggcgtcgctggtatttgacgtagctcccgaagatgtgacgccggaactgcgcagaaaggcaaaagccgtaaatttcggcatagtgtacgggatcagtgattacgggctggcacgggatttgggaattacccggaaggaagcaaagcggtatatagacgactattttgccaaataccccaaagtaaaaacctatgtggatgaaattgtgcgggtcggccaggaacaggggtatgtggaaactctgttccacagaagaagataccttcccgagcttgcatctaaaaattttcacgttcgttctttcggaaaaagggttgcaatgaatacgcccatacagggcactgcagccgatattattaaaattgcgatggtgaaggtatacaaggctttgaaagaatccggccttaaatccaggcttatcctccaggtccatgacgaacttgttattgagacttttgaagacgaactggagactgtcaaggaacttgtcaaaaagtgcatggaagaggccgttgaattgagtgtgccgcttgttgtcgacgtttcaatcgggaaaaactggtatgaagcctcctgatatggatcc

SEQ ID NO: 368 - DNA, 2772 bp, Artificial Sequence
  Description of Artificial Sequence: Synthetic Clostridium stercorarium DNA Polymerase R828A
atgaaatacctgctgccgaccgctgctgctggtctgctgctcctcgctgcccagccggcgatggccatggatccaaaaataatccttatagacggaaacagtattttaaaccgcggtttttatgccctgtcggggcgatccatgctgactacgtccacaggtctgtataccaatgcggttttcgcttttgtaaatatattgaacaaatatatcgaagaggaaaaccctgattatattgccgttgctttcgatcttagggcaaaaactttccggcacggtctatatgagggatacaaagcgcagcggaaaggcatgcccgatgaacttgcaatgcagatacccctcgcgaaggaagtactgagggcgatgaatattgccataatagagcatgaaggttatgaagccgacgatataatcggcagcctttcgttaaaggccgaaaaagagaattttgacgtaataatccttacgggggacagggattctttccagctgatcagcgacagggtgaaagttatcctgccttcgacgaaagccggaaaaacagagaccaacgtatatgataaacaggccatcattgacaaatacggagttttaccccatcagcttattgacgttaaaggcttaatgggagattcgtcagataatatacccggcgttccgggagtgggtgagaaaacggcgttaagccttatttcagcctacggtacactggaaggtgtttacgagcatattgatgaaataaaacagcctaagctgaaagcatcgctgattgaatataaggatcaggcgtttttaagccgtaagctgggtactattgtaagaaatctggagctgtgtgcttcgctggaggatctgaaaagaaaagaaataaaccgcaaagagcttttgaatgttttcagaaaactcgaatttgaaagtatcatatcaaaaatgaatcttgcttccgctgaggtgacagaattacctcccgcgccggaagagcttaaaataacccatatttcagcggcagaggatcttaagaaatggattgcttacctgcttaaccagaaaaacatttccgtccttcaactgattgaccgggaggattcatacagttcccgtctttcagggctggctttgtgcaccggggatgaggttttttatatcgagaccgggactgcactccccgagaatttgattgcaacagagctgaaagaactgtggcagaatgaaaatattcacaaaatcggacacaatataaaagaatttataacctggctgctgaaacacgatgttgaactgaacggcctttatttcgacactatgattgccgaatacctgatagattccataagaaacggctatcctatagcaagcctttctcacaaatacctgaatcgcagcgttccgtcgctggacgaacttttgggcaagggaaagggagcaaaaaagtactctgaaattccgcccgaaaggctgaaagattacagcgcttataacgtcaaagccatttttgacatatggccgatgcagaaaaaagttcttcaggaaaaccggcaggaggagctttttaatgacatagagcttcctcttataaccgtacttgccagtatggaataccacggtttcaaagttgacgccgcaaaacttcacgaatacggcgaagttcttctgtcacgcataaaagacctggaaaaggtaatttacatgctggccggtgaagaattcaacatcaattcaacgaagcagcttggtaccatattattcgaaaaactgaagcttcccgttgtaaaaagtacaaagaccggatactccaccgacgtcgaggttcttgaagagctttattacaagcatgatataataccatgcataatagaataccgccagcttacaaaactttacaccacctacgccgaaggtcttgaaaaagtgataaatcctgtaaccggtaaaattcattcaagttttaaccagacggttacggctacaggccgcatcagcagtaccgaaccaaatttacagaatatcccagtcagacacgaaatgggaagggaaatacggaaagcttttattccgtcgtcggaaaacgctgtttttgttgatgccgattattcacagatagagcttcgcgtgcttgcccatataacaggcgatgaagccctgataaatgctttcgttaagggggaagatattcatacggccacggcgtcgctggtatttgacgtagctcccgaagatgtgacgccggaactgcgcagaaaggcaaaagccgtaaatttcggcatagtgtacgggatcagtgattacgggctggcacgggatttgggaattacccggaaggaagcaaagcggtatatagacgactattttgccaaataccccaaagtaaaaacctatgtggatgaaattgtgcgggtcggccaggaacaggggtatgtggaaactctgttccacagaagaagataccttcccgagcttgcatctaaaaattttcaccaggcttctttcggaaaaagggttgcaatgaatacgcccatacagggcactgcagccgatattattaaaattgcgatggtgaaggtatacaaggctttgaaagaatccggccttaaatccaggcttatcctccaggtccatgacgaacttgttattgagacttttgaagacgaactggagactgtcaaggaacttgtcaaaaagtgcatggaagaggccgttgaattgagtgtgccgcttgttgtcgacgtttcaatcgggaaaaactggtatgaagcctcctgatatggatcc

SEQ ID NO: 369 - DNA, 2772 bp, Artificial Sequence
  Description of Artificial Sequence: Synthetic Clostridium stercorarium DNA Polymerase R828N
atgaaatacctgctgccgaccgctgctgctggtctgctgctcctcgctgcccagccggcgatggccatggatccaaaaataatccttatagacggaaacagtattttaaaccgcggtttttatgccctgtcggggcgatccatgctgactacgtccacaggtctgtataccaatgcggttttcgcttttgtaaatatattgaacaaatatatcgaagaggaaaaccctgattatattgccgttgctttcgatcttagggcaaaaactttccggcacggtctatatgagggatacaaagcgcagcggaaaggcatgcccgatgaacttgcaatgcagatacccctcgcgaaggaagtactgagggcgatgaatattgccataatagagcatgaaggttatgaagccgacgatataatcggcagcctttcgttaaaggccgaaaaagagaattttgacgtaataatccttacgggggacagggattctttccagctgatcagcgacagggtgaaagttatcctgccttcgacgaaagccggaaaaacagagaccaacgtatatgataaacaggccatcattgacaaatacggagttttaccccatcagcttattgacgttaaaggcttaatgggagattcgtcagataatatacccggcgttccgggagtgggtgagaaaacggcgttaagccttatttcagcctacggtacactggaaggtgtttacgagcatattgatgaaataaaacagcctaagctgaaagcatcgctgattgaatataaggatcaggcgtttttaagccgtaagctgggtactattgtaagaaatctggagctgtgtgcttcgctggaggatctgaaaagaaaagaaataaaccgcaaagagcttttgaatgttttcagaaaactcgaatttgaaagtatcatatcaaaaatgaatcttgcttccgctgaggtgacagaattacctcccgcgccggaagagcttaaaataacccatatttcagcggcagaggatcttaagaaatggattgcttacctgcttaaccagaaaaacatttccgtccttcaactgattgaccgggaggattcatacagttcccgtctttcagggctggctttgtgcaccggggatgaggttttttatatcgagaccgggactgcactccccgagaatttgattgcaacagagctgaaagaactgtggcagaatgaaaatattcacaaaatcggacacaatataaaagaatttataacctggctgctgaaacacgatgttgaactgaacggcctttatttcgacactatgattgccgaatacctgatagattccataagaaacggctatcctatagcaagcctttctcacaaatacctgaatcgcagcgttccgtcgctggacgaacttttgggcaagggaaagggagcaaaaaagtactctgaaattccgcccgaaaggctgaaagattacagcgcttataacgtcaaagccatttttgacatatggccgatgcagaaaaaagttcttcaggaaaaccggcaggaggagctttttaatgacatagagcttcctcttataaccgtacttgccagtatggaataccacggtttcaaagttgacgccgcaaaacttcacgaatacggcgaagttcttctgtcacgcataaaagacctggaaaaggtaatttacatgctggccggtgaagaattcaacatcaattcaacgaagcagcttggtaccatattattcgaaaaactgaagcttcccgttgtaaaaagtacaaagaccggatactccaccgacgtcgaggttcttgaagagctttattacaagcatgatataataccatgcataatagaataccgccagcttacaaaactttacaccacctacgccgaaggtcttgaaaaagtgataaatcctgtaaccggtaaaattcattcaagttttaaccagacggttacggctacaggccgcatcagcagtaccgaaccaaatttacagaatatcccagtcagacacgaaatgggaagggaaatacggaaagcttttattccgtcgtcggaaaacgctgtttttgttgatgccgattattcacagatagagcttcgcgtgcttgcccatataacaggcgatgaagccctgataaatgctttcgttaagggggaagatattcatacggccacggcgtcgctggtatttgacgtagctcccgaagatgtgacgccggaactgcgcagaaaggcaaaagccgtaaatttcggcatagtgtacgggatcagtgattacgggctggcacgggatttgggaattacccggaaggaagcaaagcggtatatagacgactattttgccaaataccccaaagtaaaaacctatgtggatgaaattgtgcgggtcggccaggaacaggggtatgtggaaactctgttccacagaagaagataccttcccgagcttgcatctaaaaattttcaccagaattctttcggaaaaagggttgcaatgaatacgcccatacagggcactgcagccgatattattaaaattgcgatggtgaaggtatacaaggctttgaaagaatccggccttaaatccaggcttatcctccaggtccatgacgaacttgttattgagacttttgaagacgaactggagactgtcaaggaacttgtcaaaaagtgcatggaagaggccgttgaattgagtgtgccgcttgttgtcgacgtttcaatcgggaaaaactggtatgaagcctcctgatatggatcc

SEQ ID NO: 370 - DNA, 2772 bp, Artificial Sequence
  Description of Artificial Sequence: Synthetic Clostridium stercorarium DNA Polymerase R828D
atgaaatacctgctgccgaccgctgctgctggtctgctgctcctcgctgcccagccggcgatggccatggatccaaaaataatccttatagacggaaacagtattttaaaccgcggtttttatgccctgtcggggcgatccatgctgactacgtccacaggtctgtataccaatgcggttttcgcttttgtaaatatattgaacaaatatatcgaagaggaaaaccctgattatattgccgttgctttcgatcttagggcaaaaactttccggcacggtctatatgagggatacaaagcgcagcggaaaggcatgcccgatgaacttgcaatgcagatacccctcgcgaaggaagtactgagggcgatgaatattgccataatagagcatgaaggttatgaagccgacgatataatcggcagcctttcgttaaaggccgaaaaagagaattttgacgtaataatccttacgggggacagggattctttccagctgatcagcgacagggtgaaagttatcctgccttcgacgaaagccggaaaaacagagaccaacgtatatgataaacaggccatcattgacaaatacggagttttaccccatcagcttattgacgttaaaggcttaatgggagattcgtcagataatatacccggcgttccgggagtgggtgagaaaacggcgttaagccttatttcagcctacggtacactggaaggtgtttacgagcatattgatgaaataaaacagcctaagctgaaagcatcgctgattgaatataaggatcaggcgtttttaagccgtaagctgggtactattgtaagaaatctggagctgtgtgcttcgctggaggatctgaaaagaaaagaaataaaccgcaaagagcttttgaatgttttcagaaaactcgaatttgaaagtatcatatcaaaaatgaatcttgcttccgctgaggtgacagaattacctcccgcgccggaagagcttaaaataacccatatttcagcggcagaggatcttaagaaatggattgcttacctgcttaaccagaaaaacatttccgtccttcaactgattgaccgggaggattcatacagttcccgtctttcagggctggctttgtgcaccggggatgaggttttttatatcgagaccgggactgcactccccgagaatttgattgcaacagagctgaaagaactgtggcagaatgaaaatattcacaaaatcggacacaatataaaagaatttataacctggctgctgaaacacgatgttgaactgaacggcctttatttcgacactatgattgccgaatacctgatagattccataagaaacggctatcctatagcaagcctttctcacaaatacctgaatcgcagcgttccgtcgctggacgaacttttgggcaagggaaagggagcaaaaaagtactctgaaattccgcccgaaaggctgaaagattacagcgcttataacgtcaaagccatttttgacatatggccgatgcagaaaaaagttcttcaggaaaaccggcaggaggagctttttaatgacatagagcttcctcttataaccgtacttgccagtatggaataccacggtttcaaagttgacgccgcaaaacttcacgaatacggcgaagttcttctgtcacgcataaaagacctggaaaaggtaatttacatgctggccggtgaagaattcaacatcaattcaacgaagcagcttggtaccatattattcgaaaaactgaagcttcccgttgtaaaaagtacaaagaccggatactccaccgacgtcgaggttcttgaagagctttattacaagcatgatataataccatgcataatagaataccgccagcttacaaaactttacaccacctacgccgaaggtcttgaaaaagtgataaatcctgtaaccggtaaaattcattcaagttttaaccagacggttacggctacaggccgcatcagcagtaccgaaccaaatttacagaatatcccagtcagacacgaaatgggaagggaaatacggaaagcttttattccgtcgtcggaaaacgctgtttttgttgatgccgattattcacagatagagcttcgcgtgcttgcccatataacaggcgatgaagccctgataaatgctttcgttaagggggaagatattcatacggccacggcgtcgctggtatttgacgtagctcccgaagatgtgacgccggaactgcgcagaaaggcaaaagccgtaaatttcggcatagtgtacgggatcagtgattacgggctggcacgggatttgggaattacccggaaggaagcaaagcggtatatagacgactattttgccaaataccccaaagtaaaaacctatgtggatgaaattgtgcgggtcggccaggaacaggggtatgtggaaactctgttccacagaagaagataccttcccgagcttgcatctaaaaattttcaccaggattctttcggaaaaagggttgcaatgaatacgcccatacagggcactgcagccgatattattaaaattgcgatggtgaaggtatacaaggctttgaaagaatccggccttaaatccaggcttatcctccaggtccatgacgaacttgttattgagacttttgaagacgaactggagactgtcaaggaacttgtcaaaaagtgcatggaagaggccgttgaattgagtgtgccgcttgttgtcgacgtttcaatcgggaaaaactggtatgaagcctcctgatatggatcc

SEQ ID NO: 371 - DNA, 2772 bp, Artificial Sequence
  Description of Artificial Sequence: Synthetic Clostridium stercorarium DNA Polymerase R828C
atgaaatacctgctgccgaccgctgctgctggtctgctgctcctcgctgcccagccggcgatggccatggatccaaaaataatccttatagacggaaacagtattttaaaccgcggtttttatgccctgtcggggcgatccatgctgactacgtccacaggtctgtataccaatgcggttttcgcttttgtaaatatattgaacaaatatatcgaagaggaaaaccctgattatattgccgttgctttcgatcttagggcaaaaactttccggcacggtctatatgagggatacaaagcgcagcggaaaggcatgcccgatgaacttgcaatgcagatacccctcgcgaaggaagtactgagggcgatgaatattgccataatagagcatgaaggttatgaagccgacgatataatcggcagcctttcgttaaaggccgaaaaagagaattttgacgtaataatccttacgggggacagggattctttccagctgatcagcgacagggtgaaagttatcctgccttcgacgaaagccggaaaaacagagaccaacgtatatgataaacaggccatcattgacaaatacggagttttaccccatcagcttattgacgttaaaggcttaatgggagattcgtcagataatatacccggcgttccgggagtgggtgagaaaacggcgttaagccttatttcagcctacggtacactggaaggtgtttacgagcatattgatgaaataaaacagcctaagctgaaagcatcgctgattgaatataaggatcaggcgtttttaagccgtaagctgggtactattgtaagaaatctggagctgtgtgcttcgctggaggatctgaaaagaaaagaaataaaccgcaaagagcttttgaatgttttcagaaaactcgaatttgaaagtatcatatcaaaaatgaatcttgcttccgctgaggtgacagaattacctcccgcgccggaagagcttaaaataacccatatttcagcggcagaggatcttaagaaatggattgcttacctgcttaaccagaaaaacatttccgtccttcaactgattgaccgggaggattcatacagttcccgtctttcagggctggctttgtgcaccggggatgaggttttttatatcgagaccgggactgcactccccgagaatttgattgcaacagagctgaaagaactgtggcagaatgaaaatattcacaaaatcggacacaatataaaagaatttataacctggctgctgaaacacgatgttgaactgaacggcctttatttcgacactatgattgccgaatacctgatagattccataagaaacggctatcctatagcaagcctttctcacaaatacctgaatcgcagcgttccgtcgctggacgaacttttgggcaagggaaagggagcaaaaaagtactctgaaattccgcccgaaaggctgaaagattacagcgcttataacgtcaaagccatttttgacatatggccgatgcagaaaaaagttcttcaggaaaaccggcaggaggagctttttaatgacatagagcttcctcttataaccgtacttgccagtatggaataccacggtttcaaagttgacgccgcaaaacttcacgaatacggcgaagttcttctgtcacgcataaaagacctggaaaaggtaatttacatgctggccggtgaagaattcaacatcaattcaacgaagcagcttggtaccatattattcgaaaaactgaagcttcccgttgtaaaaagtacaaagaccggatactccaccgacgtcgaggttcttgaagagctttattacaagcatgatataataccatgcataatagaataccgccagcttacaaaactttacaccacctacgccgaaggtcttgaaaaagtgataaatcctgtaaccggtaaaattcattcaagttttaaccagacggttacggctacaggccgcatcagcagtaccgaaccaaatttacagaatatcccagtcagacacgaaatgggaagggaaatacggaaagcttttattccgtcgtcggaaaacgctgtttttgttgatgccgattattcacagatagagcttcgcgtgcttgcccatataacaggcgatgaagccctgataaatgctttcgttaagggggaagatattcatacggccacggcgtcgctggtatttgacgtagctcccgaagatgtgacgccggaactgcgcagaaaggcaaaagccgtaaatttcggcatagtgtacgggatcagtgattacgggctggcacgggatttgggaattacccggaaggaagcaaagcggtatatagacgactattttgccaaataccccaaagtaaaaacctatgtggatgaaattgtgcgggtcggccaggaacaggggtatgtggaaactctgttccacagaagaagataccttcccgagcttgcatctaaaaattttcaccagtgttctttcggaaaaagggttgcaatgaatacgcccatacagggcactgcagccgatattattaaaattgcgatggtgaaggtatacaaggctttgaaagaatccggccttaaatccaggcttatcctccaggtccatgacgaacttgttattgagacttttgaagacgaactggagactgtcaaggaacttgtcaaaaagtgcatggaagaggccgttgaattgagtgtgccgcttgttgtcgacgtttcaatcgggaaaaactggtatgaagcctcctgatatggatcc

SEQ ID NO: 372 - DNA, 2772 bp, Artificial Sequence
  Description of Artificial Sequence: Synthetic Clostridium stercorarium DNA Polymerase R828E
atgaaatacctgctgccgaccgctgctgctggtctgctgctcctcgctgcccagccggcgatggccatggatccaaaaataatccttatagacggaaacagtattttaaaccgcggtttttatgccctgtcggggcgatccatgctgactacgtccacaggtctgtataccaatgcggttttcgcttttgtaaatatattgaacaaatatatcgaagaggaaaaccctgattatattgccgttgctttcgatcttagggcaaaaactttccggcacggtctatatgagggatacaaagcgcagcggaaaggcatgcccgatgaacttgcaatgcagatacccctcgcgaaggaagtactgagggcgatgaatattgccataatagagcatgaaggttatgaagccgacgatataatcggcagcctttcgttaaaggccgaaaaagagaattttgacgtaataatccttacgggggacagggattctttccagctgatcagcgacagggtgaaagttatcctgccttcgacgaaagccggaaaaacagagaccaacgtatatgataaacaggccatcattgacaaatacggagttttaccccatcagcttattgacgttaaaggcttaatgggagattcgtcagataatatacccggcgttccgggagtgggtgagaaaacggcgttaagccttatttcagcctacggtacactggaaggtgtttacgagcatattgatgaaataaaacagcctaagctgaaagcatcgctgattgaatataaggatcaggcgtttttaagccgtaagctgggtactattgtaagaaatctggagctgtgtgcttcgctggaggatctgaaaagaaaagaaataaaccgcaaagagcttttgaatgttttcagaaaactcgaatttgaaagtatcatatcaaaaatgaatcttgcttccgctgaggtgacagaattacctcccgcgccggaagagcttaaaataacccatatttcagcggcagaggatcttaagaaatggattgcttacctgcttaaccagaaaaacatttccgtccttcaactgattgaccgggaggattcatacagttcccgtctttcagggctggctttgtgcaccggggatgaggttttttatatcgagaccgggactgcactccccgagaatttgattgcaacagagctgaaagaactgtggcagaatgaaaatattcacaaaatcggacacaatataaaagaatttataacctggctgctgaaacacgatgttgaactgaacggcctttatttcgacactatgattgccgaatacctgatagattccataagaaacggctatcctatagcaagcctttctcacaaatacctgaatcgcagcgttccgtcgctggacgaacttttgggcaagggaaagggagcaaaaaagtactctgaaattccgcccgaaaggctgaaagattacagcgcttataacgtcaaagccatttttgacatatggccgatgcagaaaaaagttcttcaggaaaaccggcaggaggagctttttaatgacatagagcttcctcttataaccgtacttgccagtatggaataccacggtttcaaagttgacgccgcaaaacttcacgaatacggcgaagttcttctgtcacgcataaaagacctggaaaaggtaatttacatgctggccggtgaagaattcaacatcaattcaacgaagcagcttggtaccatattattcgaaaaactgaagcttcccgttgtaaaaagtacaaagaccggatactccaccgacgtcgaggttcttgaagagctttattacaagcatgatataataccatgcataatagaataccgccagcttacaaaactttacaccacctacgccgaaggtcttgaaaaagtgataaatcctgtaaccggtaaaattcattcaagttttaaccagacggttacggctacaggccgcatcagcagtaccgaaccaaatttacagaatatcccagtcagacacgaaatgggaagggaaatacggaaagcttttattccgtcgtcggaaaacgctgtttttgttgatgccgattattcacagatagagcttcgcgtgcttgcccatataacaggcgatgaagccctgataaatgctttcgttaagggggaagatattcatacggccacggcgtcgctggtatttgacgtagctcccgaagatgtgacgccggaactgcgcagaaaggcaaaagccgtaaatttcggcatagtgtacgggatcagtgattacgggctggcacgggatttgggaattacccggaaggaagcaaagcggtatatagacgactattttgccaaataccccaaagtaaaaacctatgtggatgaaattgtgcgggtcggccaggaacaggggtatgtggaaactctgttccacagaagaagataccttcccgagcttgcatctaaaaattttcaccaggaatctttcggaaaaagggttgcaatgaatacgcccatacagggcactgcagccgatattattaaaattgcgatggtgaaggtatacaaggctttgaaagaatccggccttaaatccaggcttatcctccaggtccatgacgaacttgttattgagacttttgaagacgaactggagactgtcaaggaacttgtcaaaaagtgcatggaagaggccgttgaattgagtgtgccgcttgttgtcgacgtttcaatcgggaaaaactggtatgaagcctcctgatatggatcc

SEQ ID NO: 373 - DNA, 2772 bp, Artificial Sequence
  Description of Artificial Sequence: Synthetic Clostridium stercorarium DNA Polymerase R828Q
atgaaatacctgctgccgaccgctgctgctggtctgctgctcctcgctgcccagccggcgatggccatggatccaaaaataatccttatagacggaaacagtattttaaaccgcggtttttatgccctgtcggggcgatccatgctgactacgtccacaggtctgtataccaatgcggttttcgcttttgtaaatatattgaacaaatatatcgaagaggaaaaccctgattatattgccgttgctttcgatcttagggcaaaaactttccggcacggtctatatgagggatacaaagcgcagcggaaaggcatgcccgatgaacttgcaatgcagatacccctcgcgaaggaagtactgagggcgatgaatattgccataatagagcatgaaggttatgaagccgacgatataatcggcagcctttcgttaaaggccgaaaaagagaattttgacgtaataatccttacgggggacagggattctttccagctgatcagcgacagggtgaaagttatcctgccttcgacgaaagccggaaaaacagagaccaacgtatatgataaacaggccatcattgacaaatacggagttttaccccatcagcttattgacgttaaaggcttaatgggagattcgtcagataatatacccggcgttccgggagtgggtgagaaaacggcgttaagccttatttcagcctacggtacactggaaggtgtttacgagcatattgatgaaataaaacagcctaagctgaaagcatcgctgattgaatataaggatcaggcgtttttaagccgtaagctgggtactattgtaagaaatctggagctgtgtgcttcgctggaggatctgaaaagaaaagaaataaaccgcaaagagcttttgaatgttttcagaaaactcgaatttgaaagtatcatatcaaaaatgaatcttgcttccgctgaggtgacagaattacctcccgcgccggaagagcttaaaataacccatatttcagcggcagaggatcttaagaaatggattgcttacctgcttaaccagaaaaacatttccgtccttcaactgattgaccgggaggattcatacagttcccgtctttcagggctggctttgtgcaccggggatgaggttttttatatcgagaccgggactgcactccccgagaatttgattgcaacagagctgaaagaactgtggcagaatgaaaatattcacaaaatcggacacaatataaaagaatttataacctggctgctgaaacacgatgttgaactgaacggcctttatttcgacactatgattgccgaatacctgatagattccataagaaacggctatcctatagcaagcctttctcacaaatacctgaatcgcagcgttccgtcgctggacgaacttttgggcaagggaaagggagcaaaaaagtactctgaaattccgcccgaaaggctgaaagattacagcgcttataacgtcaaagccatttttgacatatggccgatgcagaaaaaagttcttcaggaaaaccggcaggaggagctttttaatgacatagagcttcctcttataaccgtacttgccagtatggaataccacggtttcaaagttgacgccgcaaaacttcacgaatacggcgaagttcttctgtcacgcataaaagacctggaaaaggtaatttacatgctggccggtgaagaattcaacatcaattcaacgaagcagcttggtaccatattattcgaaaaactgaagcttcccgttgtaaaaagtacaaagaccggatactccaccgacgtcgaggttcttgaagagctttattacaagcatgatataataccatgcataatagaataccgccagcttacaaaactttacaccacctacgccgaaggtcttgaaaaagtgataaatcctgtaaccggtaaaattcattcaagttttaaccagacggttacggctacaggccgcatcagcagtaccgaaccaaatttacagaatatcccagtcagacacgaaatgggaagggaaatacggaaagcttttattccgtcgtcggaaaacgctgtttttgttgatgccgattattcacagatagagcttcgcgtgcttgcccatataacaggcgatgaagccctgataaatgctttcgttaagggggaagatattcatacggccacggcgtcgctggtatttgacgtagctcccgaagatgtgacgccggaactgcgcagaaaggcaaaagccgtaaatttcggcatagtgtacgggatcagtgattacgggctggcacgggatttgggaattacccggaaggaagcaaagcggtatatagacgactattttgccaaataccccaaagtaaaaacctatgtggatgaaattgtgcgggtcggccaggaacaggggtatgtggaaactctgttccacagaagaagataccttcccgagcttgcatctaaaaattttcaccagcaatctttcggaaaaagggttgcaatgaatacgcccatacagggcactgcagccgatattattaaaattgcgatggtgaaggtatacaaggctttgaaagaatccggccttaaatccaggcttatcctccaggtccatgacgaacttgttattgagacttttgaagacgaactggagactgtcaaggaacttgtcaaaaagtgcatggaagaggccgttgaattgagtgtgccgcttgttgtcgacgtttcaatcgggaaaaactggtatgaagcctcctgatatggatcc

SEQ ID NO: 374 - DNA, 2772 bp, Artificial Sequence
  Description of Artificial Sequence: Synthetic Clostridium stercorarium DNA Polymerase R828G
atgaaatacctgctgccgaccgctgctgctggtctgctgctcctcgctgcccagccggcgatggccatggatccaaaaataatccttatagacggaaacagtattttaaaccgcggtttttatgccctgtcggggcgatccatgctgactacgtccacaggtctgtataccaatgcggttttcgcttttgtaaatatattgaacaaatatatcgaagaggaaaaccctgattatattgccgttgctttcgatcttagggcaaaaactttccggcacggtctatatgagggatacaaagcgcagcggaaaggcatgcccgatgaacttgcaatgcagatacccctcgcgaaggaagtactgagggcgatgaatattgccataatagagcatgaaggttatgaagccgacgatataatcggcagcctttcgttaaaggccgaaaaagagaattttgacgtaataatccttacgggggacagggattctttccagctgatcagcgacagggtgaaagttatcctgccttcgacgaaagccggaaaaacagagaccaacgtatatgataaacaggccatcattgacaaatacggagttttaccccatcagcttattgacgttaaaggcttaatgggagattcgtcagataatatacccggcgttccgggagtgggtgagaaaacggcgttaagccttatttcagcctacggtacactggaaggtgtttacgagcatattgatgaaataaaacagcctaagctgaaagcatcgctgattgaatataaggatcaggcgtttttaagccgtaagctgggtactattgtaagaaatctggagctgtgtgcttcgctggaggatctgaaaagaaaagaaataaaccgcaaagagcttttgaatgttttcagaaaactcgaatttgaaagtatcatatcaaaaatgaatcttgcttccgctgaggtgacagaattacctcccgcgccggaagagcttaaaataacccatatttcagcggcagaggatcttaagaaatggattgcttacctgcttaaccagaaaaacatttccgtccttcaactgattgaccgggaggattcatacagttcccgtctttcagggctggctttgtgcaccggggatgaggttttttatatcgagaccgggactgcactccccgagaatttgattgcaacagagctgaaagaactgtggcagaatgaaaatattcacaaaatcggacacaatataaaagaatttataacctggctgctgaaacacgatgttgaactgaacggcctttatttcgacactatgattgccgaatacctgatagattccataagaaacggctatcctatagcaagcctttctcacaaatacctgaatcgcagcgttccgtcgctggacgaacttttgggcaagggaaagggagcaaaaaagtactctgaaattccgcccgaaaggctgaaagattacagcgcttataacgtcaaagccatttttgacatatggccgatgcagaaaaaagttcttcaggaaaaccggcaggaggagctttttaatgacatagagcttcctcttataaccgtacttgccagtatggaataccacggtttcaaagttgacgccgcaaaacttcacgaatacggcgaagttcttctgtcacgcataaaagacctggaaaaggtaatttacatgctggccggtgaagaattcaacatcaattcaacgaagcagcttggtaccatattattcgaaaaactgaagcttcccgttgtaaaaagtacaaagaccggatactccaccgacgtcgaggttcttgaagagctttattacaagcatgatataataccatgcataatagaataccgccagcttacaaaactttacaccacctacgccgaaggtcttgaaaaagtgataaatcctgtaaccggtaaaattcattcaagttttaaccagacggttacggctacaggccgcatcagcagtaccgaaccaaatttacagaatatcccagtcagacacgaaatgggaagggaaatacggaaagcttttattccgtcgtcggaaaacgctgtttttgttgatgccgattattcacagatagagcttcgcgtgcttgcccatataacaggcgatgaagccctgataaatgctttcgttaagggggaagatattcatacggccacggcgtcgctggtatttgacgtagctcccgaagatgtgacgccggaactgcgcagaaaggcaaaagccgtaaatttcggcatagtgtacgggatcagtgattacgggctggcacgggatttgggaattacccggaaggaagcaaagcggtatatagacgactattttgccaaataccccaaagtaaaaacctatgtggatgaaattgtgcgggtcggccaggaacaggggtatgtggaaactctgttccacagaagaagataccttcccgagcttgcatctaaaaattttcaccagggttctttcggaaaaagggttgcaatgaatacgcccatacagggcactgcagccgatattattaaaattgcgatggtgaaggtatacaaggctttgaaagaatccggccttaaatccaggcttatcctccaggtccatgacgaacttgttattgagacttttgaagacgaactggagactgtcaaggaacttgtcaaaaagtgcatggaagaggccgttgaattgagtgtgccgcttgttgtcgacgtttcaatcgggaaaaactggtatgaagcctcctgatatggatcc

SEQ ID NO: 375 - DNA, 2772 bp, Artificial Sequence
  Description of Artificial Sequence: Synthetic Clostridium stercorarium DNA Polymerase R828H
atgaaatacctgctgccgaccgctgctgctggtctgctgctcctcgctgcccagccggcgatggccatggatccaaaaataatccttatagacggaaacagtattttaaaccgcggtttttatgccctgtcggggcgatccatgctgactacgtccacaggtctgtataccaatgcggttttcgcttttgtaaatatattgaacaaatatatcgaagaggaaaaccctgattatattgccgttgctttcgatcttagggcaaaaactttccggcacggtctatatgagggatacaaagcgcagcggaaaggcatgcccgatgaacttgcaatgcagatacccctcgcgaaggaagtactgagggcgatgaatattgccataatagagcatgaaggttatgaagccgacgatataatcggcagcctttcgttaaaggccgaaaaagagaattttgacgtaataatccttacgggggacagggattctttccagctgatcagcgacagggtgaaagttatcctgccttcgacgaaagccggaaaaacagagaccaacgtatatgataaacaggccatcattgacaaatacggagttttaccccatcagcttattgacgttaaaggcttaatgggagattcgtcagataatatacccggcgttccgggagtgggtgagaaaacggcgttaagccttatttcagcctacggtacactggaaggtgtttacgagcatattgatgaaataaaacagcctaagctgaaagcatcgctgattgaatataaggatcaggcgtttttaagccgtaagctgggtactattgtaagaaatctggagctgtgtgcttcgctggaggatctgaaaagaaaagaaataaaccgcaaagagcttttgaatgttttcagaaaactcgaatttgaaagtatcatatcaaaaatgaatcttgcttccgctgaggtgacagaattacctcccgcgccggaagagcttaaaataacccatatttcagcggcagaggatcttaagaaatggattgcttacctgcttaaccagaaaaacatttccgtccttcaactgattgaccgggaggattcatacagttcccgtctttcagggctggctttgtgcaccggggatgaggttttttatatcgagaccgggactgcactccccgagaatttgattgcaacagagctgaaagaactgtggcagaatgaaaatattcacaaaatcggacacaatataaaagaatttataacctggctgctgaaacacgatgttgaactgaacggcctttatttcgacactatgattgccgaatacctgatagattccataagaaacggctatcctatagcaagcctttctcacaaatacctgaatcgcagcgttccgtcgctggacgaacttttgggcaagggaaagggagcaaaaaagtactctgaaattccgcccgaaaggctgaaagattacagcgcttataacgtcaaagccatttttgacatatggccgatgcagaaaaaagttcttcaggaaaaccggcaggaggagctttttaatgacatagagcttcctcttataaccgtacttgccagtatggaataccacggtttcaaagttgacgccgcaaaacttcacgaatacggcgaagttcttctgtcacgcataaaagacctggaaaaggtaatttacatgctggccggtgaagaattcaacatcaattcaacgaagcagcttggtaccatattattcgaaaaactgaagcttcccgttgtaaaaagtacaaagaccggatactccaccgacgtcgaggttcttgaagagctttattacaagcatgatataataccatgcataatagaataccgccagcttacaaaactttacaccacctacgccgaaggtcttgaaaaagtgataaatcctgtaaccggtaaaattcattcaagttttaaccagacggttacggctacaggccgcatcagcagtaccgaaccaaatttacagaatatcccagtcagacacgaaatgggaagggaaatacggaaagcttttattccgtcgtcggaaaacgctgtttttgttgatgccgattattcacagatagagcttcgcgtgcttgcccatataacaggcgatgaagccctgataaatgctttcgttaagggggaagatattcatacggccacggcgtcgctggtatttgacgtagctcccgaagatgtgacgccggaactgcgcagaaaggcaaaagccgtaaatttcggcatagtgtacgggatcagtgattacgggctggcacgggatttgggaattacccggaaggaagcaaagcggtatatagacgactattttgccaaataccccaaagtaaaaacctatgtggatgaaattgtgcgggtcggccaggaacaggggtatgtggaaactctgttccacagaagaagataccttcccgagcttgcatctaaaaattttcaccagcattctttcggaaaaagggttgcaatgaatacgcccatacagggcactgcagccgatattattaaaattgcgatggtgaaggtatacaaggctttgaaagaatccggccttaaatccaggcttatcctccaggtccatgacgaacttgttattgagacttttgaagacgaactggagactgtcaaggaacttgtcaaaaagtgcatggaagaggccgttgaattgagtgtgccgcttgttgtcgacgtttcaatcgggaaaaactggtatgaagcctcctgatatggatcc

SEQ ID NO: 376 - DNA, 2772 bp, Artificial Sequence
  Description of Artificial Sequence: Synthetic Clostridium stercorarium DNA Polymerase R828I
atgaaatacctgctgccgaccgctgctgctggtctgctgctcctcgctgcccagccggcgatggccatggatccaaaaataatccttatagacggaaacagtattttaaaccgcggtttttatgccctgtcggggcgatccatgctgactacgtccacaggtctgtataccaatgcggttttcgcttttgtaaatatattgaacaaatatatcgaagaggaaaaccctgattatattgccgttgctttcgatcttagggcaaaaactttccggcacggtctatatgagggatacaaagcgcagcggaaaggcatgcccgatgaacttgcaatgcagatacccctcgcgaaggaagtactgagggcgatgaatattgccataatagagcatgaaggttatgaagccgacgatataatcggcagcctttcgttaaaggccgaaaaagagaattttgacgtaataatccttacgggggacagggattctttccagctgatcagcgacagggtgaaagttatcctgccttcgacgaaagccggaaaaacagagaccaacgtatatgataaacaggccatcattgacaaatacggagttttaccccatcagcttattgacgttaaaggcttaatgggagattcgtcagataatatacccggcgttccgggagtgggtgagaaaacggcgttaagccttatttcagcctacggtacactggaaggtgtttacgagcatattgatgaaataaaacagcctaagctgaaagcatcgctgattgaatataaggatcaggcgtttttaagccgtaagctgggtactattgtaagaaatctggagctgtgtgcttcgctggaggatctgaaaagaaaagaaataaaccgcaaagagcttttgaatgttttcagaaaactcgaatttgaaagtatcatatcaaaaatgaatcttgcttccgctgaggtgacagaattacctcccgcgccggaagagcttaaaataacccatatttcagcggcagaggatcttaagaaatggattgcttacctgcttaaccagaaaaacatttccgtccttcaactgattgaccgggaggattcatacagttcccgtctttcagggctggctttgtgcaccggggatgaggttttttatatcgagaccgggactgcactccccgagaatttgattgcaacagagctgaaagaactgtggcagaatgaaaatattcacaaaatcggacacaatataaaagaatttataacctggctgctgaaacacgatgttgaactgaacggcctttatttcgacactatgattgccgaatacctgatagattccataagaaacggctatcctatagcaagcctttctcacaaatacctgaatcgcagcgttccgtcgctggacgaacttttgggcaagggaaagggagcaaaaaagtactctgaaattccgcccgaaaggctgaaagattacagcgcttataacgtcaaagccatttttgacatatggccgatgcagaaaaaagttcttcaggaaaaccggcaggaggagctttttaatgacatagagcttcctcttataaccgtacttgccagtatggaataccacggtttcaaagttgacgccgcaaaacttcacgaatacggcgaagttcttctgtcacgcataaaagacctggaaaaggtaatttacatgctggccggtgaagaattcaacatcaattcaacgaagcagcttggtaccatattattcgaaaaactgaagcttcccgttgtaaaaagtacaaagaccggatactccaccgacgtcgaggttcttgaagagctttattacaagcatgatataataccatgcataatagaataccgccagcttacaaaactttacaccacctacgccgaaggtcttgaaaaagtgataaatcctgtaaccggtaaaattcattcaagttttaaccagacggttacggctacaggccgcatcagcagtaccgaaccaaatttacagaatatcccagtcagacacgaaatgggaagggaaatacggaaagcttttattccgtcgtcggaaaacgctgtttttgttgatgccgattattcacagatagagcttcgcgtgcttgcccatataacaggcgatgaagccctgataaatgctttcgttaagggggaagatattcatacggccacggcgtcgctggtatttgacgtagctcccgaagatgtgacgccggaactgcgcagaaaggcaaaagccgtaaatttcggcatagtgtacgggatcagtgattacgggctggcacgggatttgggaattacccggaaggaagcaaagcggtatatagacgactattttgccaaataccccaaagtaaaaacctatgtggatgaaattgtgcgggtcggccaggaacaggggtatgtggaaactctgttccacagaagaagataccttcccgagcttgcatctaaaaattttcaccagatttctttcggaaaaagggttgcaatgaatacgcccatacagggcactgcagccgatattattaaaattgcgatggtgaaggtatacaaggctttgaaagaatccggccttaaatccaggcttatcctccaggtccatgacgaacttgttattgagacttttgaagacgaactggagactgtcaaggaacttgtcaaaaagtgcatggaagaggccgttgaattgagtgtgccgcttgttgtcgacgtttcaatcgggaaaaactggtatgaagcctcctgatatggatcc

SEQ ID NO: 377 - DNA, 2772 bp, Artificial Sequence
  Description of Artificial Sequence: Synthetic Clostridium stercorarium DNA Polymerase R828L
atgaaatacctgctgccgaccgctgctgctggtctgctgctcctcgctgcccagccggcgatggccatggatccaaaaataatccttatagacggaaacagtattttaaaccgcggtttttatgccctgtcggggcgatccatgctgactacgtccacaggtctgtataccaatgcggttttcgcttttgtaaatatattgaacaaatatatcgaagaggaaaaccctgattatattgccgttgctttcgatcttagggcaaaaactttccggcacggtctatatgagggatacaaagcgcagcggaaaggcatgcccgatgaacttgcaatgcagatacccctcgcgaaggaagtactgagggcgatgaatattgccataatagagcatgaaggttatgaagccgacgatataatcggcagcctttcgttaaaggccgaaaaagagaattttgacgtaataatccttacgggggacagggattctttccagctgatcagcgacagggtgaaagttatcctgccttcgacgaaagccggaaaaacagagaccaacgtatatgataaacaggccatcattgacaaatacggagttttaccccatcagcttattgacgttaaaggcttaatgggagattcgtcagataatatacccggcgttccgggagtgggtgagaaaacggcgttaagccttatttcagcctacggtacactggaaggtgtttacgagcatattgatgaaataaaacagcctaagctgaaagcatcgctgattgaatataaggatcaggcgtttttaagccgtaagctgggtactattgtaagaaatctggagctgtgtgcttcgctggaggatctgaaaagaaaagaaataaaccgcaaagagcttttgaatgttttcagaaaactcgaatttgaaagtatcatatcaaaaatgaatcttgcttccgctgaggtgacagaattacctcccgcgccggaagagcttaaaataacccatatttcagcggcagaggatcttaagaaatggattgcttacctgcttaaccagaaaaacatttccgtccttcaactgattgaccgggaggattcatacagttcccgtctttcagggctggctttgtgcaccggggatgaggttttttatatcgagaccgggactgcactccccgagaatttgattgcaacagagctgaaagaactgtggcagaatgaaaatattcacaaaatcggacacaatataaaagaatttataacctggctgctgaaacacgatgttgaactgaacggcctttatttcgacactatgattgccgaatacctgatagattccataagaaacggctatcctatagcaagcctttctcacaaatacctgaatcgcagcgttccgtcgctggacgaacttttgggcaagggaaagggagcaaaaaagtactctgaaattccgcccgaaaggctgaaagattacagcgcttataacgtcaaagccatttttgacatatggccgatgcagaaaaaagttcttcaggaaaaccggcaggaggagctttttaatgacatagagcttcctcttataaccgtacttgccagtatggaataccacggtttcaaagttgacgccgcaaaacttcacgaatacggcgaagttcttctgtcacgcataaaagacctggaaaaggtaatttacatgctggccggtgaagaattcaacatcaattcaacgaagcagcttggtaccatattattcgaaaaactgaagcttcccgttgtaaaaagtacaaagaccggatactccaccgacgtcgaggttcttgaagagctttattacaagcatgatataataccatgcataatagaataccgccagcttacaaaactttacaccacctacgccgaaggtcttgaaaaagtgataaatcctgtaaccggtaaaattcattcaagttttaaccagacggttacggctacaggccgcatcagcagtaccgaaccaaatttacagaatatcccagtcagacacgaaatgggaagggaaatacggaaagcttttattccgtcgtcggaaaacgctgtttttgttgatgccgattattcacagatagagcttcgcgtgcttgcccatataacaggcgatgaagccctgataaatgctttcgttaagggggaagatattcatacggccacggcgtcgctggtatttgacgtagctcccgaagatgtgacgccggaactgcgcagaaaggcaaaagccgtaaatttcggcatagtgtacgggatcagtgattacgggctggcacgggatttgggaattacccggaaggaagcaaagcggtatatagacgactattttgccaaataccccaaagtaaaaacctatgtggatgaaattgtgcgggtcggccaggaacaggggtatgtggaaactctgttccacagaagaagataccttcccgagcttgcatctaaaaattttcaccagctttctttcggaaaaagggttgcaatgaatacgcccatacagggcactgcagccgatattattaaaattgcgatggtgaaggtatacaaggctttgaaagaatccggccttaaatccaggcttatcctccaggtccatgacgaacttgttattgagacttttgaagacgaactggagactgtcaaggaacttgtcaaaaagtgcatggaagaggccgttgaattgagtgtgccgcttgttgtcgacgtttcaatcgggaaaaactggtatgaagcctcctgatatggatcc

SEQ ID NO: 378 - DNA, 2772 bp, Artificial Sequence
  Description of Artificial Sequence: Synthetic Clostridium stercorarium DNA Polymerase R828K
atgaaatacctgctgccgaccgctgctgctggtctgctgctcctcgctgcccagccggcgatggccatggatccaaaaataatccttatagacggaaacagtattttaaaccgcggtttttatgccctgtcggggcgatccatgctgactacgtccacaggtctgtataccaatgcggttttcgcttttgtaaatatattgaacaaatatatcgaagaggaaaaccctgattatattgccgttgctttcgatcttagggcaaaaactttccggcacggtctatatgagggatacaaagcgcagcggaaaggcatgcccgatgaacttgcaatgcagatacccctcgcgaaggaagtactgagggcgatgaatattgccataatagagcatgaaggttatgaagccgacgatataatcggcagcctttcgttaaaggccgaaaaagagaattttgacgtaataatccttacgggggacagggattctttccagctgatcagcgacagggtgaaagttatcctgccttcgacgaaagccggaaaaacagagaccaacgtatatgataaacaggccatcattgacaaatacggagttttaccccatcagcttattgacgttaaaggcttaatgggagattcgtcagataatatacccggcgttccgggagtgggtgagaaaacggcgttaagccttatttcagcctacggtacactggaaggtgtttacgagcatattgatgaaataaaacagcctaagctgaaagcatcgctgattgaatataaggatcaggcgtttttaagccgtaagctgggtactattgtaagaaatctggagctgtgtgcttcgctggaggatctgaaaagaaaagaaataaaccgcaaagagcttttgaatgttttcagaaaactcgaatttgaaagtatcatatcaaaaatgaatcttgcttccgctgaggtgacagaattacctcccgcgccggaagagcttaaaataacccatatttcagcggcagaggatcttaagaaatggattgcttacctgcttaaccagaaaaacatttccgtccttcaactgattgaccgggaggattcatacagttcccgtctttcagggctggctttgtgcaccggggatgaggttttttatatcgagaccgggactgcactccccgagaatttgattgcaacagagctgaaagaactgtggcagaatgaaaatattcacaaaatcggacacaatataaaagaatttataacctggctgctgaaacacgatgttgaactgaacggcctttatttcgacactatgattgccgaatacctgatagattccataagaaacggctatcctatagcaagcctttctcacaaatacctgaatcgcagcgttccgtcgctggacgaacttttgggcaagggaaagggagcaaaaaagtactctgaaattccgcccgaaaggctgaaagattacagcgcttataacgtcaaagccatttttgacatatggccgatgcagaaaaaagttcttcaggaaaaccggcaggaggagctttttaatgacatagagcttcctcttataaccgtacttgccagtatggaataccacggtttcaaagttgacgccgcaaaacttcacgaatacggcgaagttcttctgtcacgcataaaagacctggaaaaggtaatttacatgctggccggtgaagaattcaacatcaattcaacgaagcagcttggtaccatattattcgaaaaactgaagcttcccgttgtaaaaagtacaaagaccggatactccaccgacgtcgaggttcttgaagagctttattacaagcatgatataataccatgcataatagaataccgccagcttacaaaactttacaccacctacgccgaaggtcttgaaaaagtgataaatcctgtaaccggtaaaattcattcaagttttaaccagacggttacggctacaggccgcatcagcagtaccgaaccaaatttacagaatatcccagtcagacacgaaatgggaagggaaatacggaaagcttttattccgtcgtcggaaaacgctgtttttgttgatgccgattattcacagatagagcttcgcgtgcttgcccatataacaggcgatgaagccctgataaatgctttcgttaagggggaagatattcatacggccacggcgtcgctggtatttgacgtagctcccgaagatgtgacgccggaactgcgcagaaaggcaaaagccgtaaatttcggcatagtgtacgggatcagtgattacgggctggcacgggatttgggaattacccggaaggaagcaaagcggtatatagacgactattttgccaaataccccaaagtaaaaacctatgtggatgaaattgtgcgggtcggccaggaacaggggtatgtggaaactctgttccacagaagaagataccttcccgagcttgcatctaaaaattttcaccagaaatctttcggaaaaagggttgcaatgaatacgcccatacagggcactgcagccgatattattaaaattgcgatggtgaaggtatacaaggctttgaaagaatccggccttaaatccaggcttatcctccaggtccatgacgaacttgttattgagacttttgaagacgaactggagactgtcaaggaacttgtcaaaaagtgcatggaagaggccgttgaattgagtgtgccgcttgttgtcgacgtttcaatcgggaaaaactggtatgaagcctcctgatatggatcc

SEQ ID NO: 379 - DNA, 2772 bp, Artificial Sequence
  Description of Artificial Sequence: Synthetic Clostridium stercorarium DNA Polymerase R828M
atgaaatacctgctgccgaccgctgctgctggtctgctgctcctcgctgcccagccggcgatggccatggatccaaaaataatccttatagacggaaacagtattttaaaccgcggtttttatgccctgtcggggcgatccatgctgactacgtccacaggtctgtataccaatgcggttttcgcttttgtaaatatattgaacaaatatatcgaagaggaaaaccctgattatattgccgttgctttcgatcttagggcaaaaactttccggcacggtctatatgagggatacaaagcgcagcggaaaggcatgcccgatgaacttgcaatgcagatacccctcgcgaaggaagtactgagggcgatgaatattgccataatagagcatgaaggttatgaagccgacgatataatcggcagcctttcgttaaaggccgaaaaagagaattttgacgtaataatccttacgggggacagggattctttccagctgatcagcgacagggtgaaagttatcctgccttcgacgaaagccggaaaaacagagaccaacgtatatgataaacaggccatcattgacaaatacggagttttaccccatcagcttattgacgttaaaggcttaatgggagattcgtcagataatatacccggcgttccgggagtgggtgagaaaacggcgttaagccttatttcagcctacggtacactggaaggtgtttacgagcatattgatgaaataaaacagcctaagctgaaagcatcgctgattgaatataaggatcaggcgtttttaagccgtaagctgggtactattgtaagaaatctggagctgtgtgcttcgctggaggatctgaaaagaaaagaaataaaccgcaaagagcttttgaatgttttcagaaaactcgaatttgaaagtatcatatcaaaaatgaatcttgcttccgctgaggtgacagaattacctcccgcgccggaagagcttaaaataacccatatttcagcggcagaggatcttaagaaatggattgcttacctgcttaaccagaaaaacatttccgtccttcaactgattgaccgggaggattcatacagttcccgtctttcagggctggctttgtgcaccggggatgaggttttttatatcgagaccgggactgcactccccgagaatttgattgcaacagagctgaaagaactgtggcagaatgaaaatattcacaaaatcggacacaatataaaagaatttataacctggctgctgaaacacgatgttgaactgaacggcctttatttcgacactatgattgccgaatacctgatagattccataagaaacggctatcctatagcaagcctttctcacaaatacctgaatcgcagcgttccgtcgctggacgaacttttgggcaagggaaagggagcaaaaaagtactctgaaattccgcccgaaaggctgaaagattacagcgcttataacgtcaaagccatttttgacatatggccgatgcagaaaaaagttcttcaggaaaaccggcaggaggagctttttaatgacatagagcttcctcttataaccgtacttgccagtatggaataccacggtttcaaagttgacgccgcaaaacttcacgaatacggcgaagttcttctgtcacgcataaaagacctggaaaaggtaatttacatgctggccggtgaagaattcaacatcaattcaacgaagcagcttggtaccatattattcgaaaaactgaagcttcccgttgtaaaaagtacaaagaccggatactccaccgacgtcgaggttcttgaagagctttattacaagcatgatataataccatgcataatagaataccgccagcttacaaaactttacaccacctacgccgaaggtcttgaaaaagtgataaatcctgtaaccggtaaaattcattcaagttttaaccagacggttacggctacaggccgcatcagcagtaccgaaccaaatttacagaatatcccagtcagacacgaaatgggaagggaaatacggaaagcttttattccgtcgtcggaaaacgctgtttttgttgatgccgattattcacagatagagcttcgcgtgcttgcccatataacaggcgatgaagccctgataaatgctttcgttaagggggaagatattcatacggccacggcgtcgctggtatttgacgtagctcccgaagatgtgacgccggaactgcgcagaaaggcaaaagccgtaaatttcggcatagtgtacgggatcagtgattacgggctggcacgggatttgggaattacccggaaggaagcaaagcggtatatagacgactattttgccaaataccccaaagtaaaaacctatgtggatgaaattgtgcgggtcggccaggaacaggggtatgtggaaactctgttccacagaagaagataccttcccgagcttgcatctaaaaattttcaccagatgtctttcggaaaaagggttgcaatgaatacgcccatacagggcactgcagccgatattattaaaattgcgatggtgaaggtatacaaggctttgaaagaatccggccttaaatccaggcttatcctccaggtccatgacgaacttgttattgagacttttgaagacgaactggagactgtcaaggaacttgtcaaaaagtgcatggaagaggccgttgaattgagtgtgccgcttgttgtcgacgtttcaatcgggaaaaactggtatgaagcctcctgatatggatcc

SEQ ID NO: 380 - DNA, 2772 bp, Artificial Sequence
  Description of Artificial Sequence: Synthetic Clostridium stercorarium DNA Polymerase R828F
atgaaatacctgctgccgaccgctgctgctggtctgctgctcctcgctgcccagccggcgatggccatggatccaaaaataatccttatagacggaaacagtattttaaaccgcggtttttatgccctgtcggggcgatccatgctgactacgtccacaggtctgtataccaatgcggttttcgcttttgtaaatatattgaacaaatatatcgaagaggaaaaccctgattatattgccgttgctttcgatcttagggcaaaaactttccggcacggtctatatgagggatacaaagcgcagcggaaaggcatgcccgatgaacttgcaatgcagatacccctcgcgaaggaagtactgagggcgatgaatattgccataatagagcatgaaggttatgaagccgacgatataatcggcagcctttcgttaaaggccgaaaaagagaattttgacgtaataatccttacgggggacagggattctttccagctgatcagcgacagggtgaaagttatcctgccttcgacgaaagccggaaaaacagagaccaacgtatatgataaacaggccatcattgacaaatacggagttttaccccatcagcttattgacgttaaaggcttaatgggagattcgtcagataatatacccggcgttccgggagtgggtgagaaaacggcgttaagccttatttcagcctacggtacactggaaggtgtttacgagcatattgatgaaataaaacagcctaagctgaaagcatcgctgattgaatataaggatcaggcgtttttaagccgtaagctgggtactattgtaagaaatctggagctgtgtgcttcgctggaggatctgaaaagaaaagaaataaaccgcaaagagcttttgaatgttttcagaaaactcgaatttgaaagtatcatatcaaaaatgaatcttgcttccgctgaggtgacagaattacctcccgcgccggaagagcttaaaataacccatatttcagcggcagaggatcttaagaaatggattgcttacctgcttaaccagaaaaacatttccgtccttcaactgattgaccgggaggattcatacagttcccgtctttcagggctggctttgtgcaccggggatgaggttttttatatcgagaccgggactgcactccccgagaatttgattgcaacagagctgaaagaactgtggcagaatgaaaatattcacaaaatcggacacaatataaaagaatttataacctggctgctgaaacacgatgttgaactgaacggcctttatttcgacactatgattgccgaatacctgatagattccataagaaacggctatcctatagcaagcctttctcacaaatacctgaatcgcagcgttccgtcgctggacgaacttttgggcaagggaaagggagcaaaaaagtactctgaaattccgcccgaaaggctgaaagattacagcgcttataacgtcaaagccatttttgacatatggccgatgcagaaaaaagttcttcaggaaaaccggcaggaggagctttttaatgacatagagcttcctcttataaccgtacttgccagtatggaataccacggtttcaaagttgacgccgcaaaacttcacgaatacggcgaagttcttctgtcacgcataaaagacctggaaaaggtaatttacatgctggccggtgaagaattcaacatcaattcaacgaagcagcttggtaccatattattcgaaaaactgaagcttcccgttgtaaaaagtacaaagaccggatactccaccgacgtcgaggttcttgaagagctttattacaagcatgatataataccatgcataatagaataccgccagcttacaaaactttacaccacctacgccgaaggtcttgaaaaagtgataaatcctgtaaccggtaaaattcattcaagttttaaccagacggttacggctacaggccgcatcagcagtaccgaaccaaatttacagaatatcccagtcagacacgaaatgggaagggaaatacggaaagcttttattccgtcgtcggaaaacgctgtttttgttgatgccgattattcacagatagagcttcgcgtgcttgcccatataacaggcgatgaagccctgataaatgctttcgttaagggggaagatattcatacggccacggcgtcgctggtatttgacgtagctcccgaagatgtgacgccggaactgcgcagaaaggcaaaagccgtaaatttcggcatagtgtacgggatcagtgattacgggctggcacgggatttgggaattacccggaaggaagcaaagcggtatatagacgactattttgccaaataccccaaagtaaaaacctatgtggatgaaattgtgcgggtcggccaggaacaggggtatgtggaaactctgttccacagaagaagataccttcccgagcttgcatctaaaaattttcaccagttttctttcggaaaaagggttgcaatgaatacgcccatacagggcactgcagccgatattattaaaattgcgatggtgaaggtatacaaggctttgaaagaatccggccttaaatccaggcttatcctccaggtccatgacgaacttgttattgagacttttgaagacgaactggagactgtcaaggaacttgtcaaaaagtgcatggaagaggccgttgaattgagtgtgccgcttgttgtcgacgtttcaatcgggaaaaactggtatgaagcctcctgatatggatcc

SEQ ID NO: 381 - DNA, 2772 bp, Artificial Sequence
  Description of Artificial Sequence: Synthetic Clostridium stercorarium DNA Polymerase R828P
atgaaatacctgctgccgaccgctgctgctggtctgctgctcctcgctgcccagccggcgatggccatggatccaaaaataatccttatagacggaaacagtattttaaaccgcggtttttatgccctgtcggggcgatccatgctgactacgtccacaggtctgtataccaatgcggttttcgcttttgtaaatatattgaacaaatatatcgaagaggaaaaccctgattatattgccgttgctttcgatcttagggcaaaaactttccggcacggtctatatgagggatacaaagcgcagcggaaaggcatgcccgatgaacttgcaatgcagatacccctcgcgaaggaagtactgagggcgatgaatattgccataatagagcatgaaggttatgaagccgacgatataatcggcagcctttcgttaaaggccgaaaaagagaattttgacgtaataatccttacgggggacagggattctttccagctgatcagcgacagggtgaaagttatcctgccttcgacgaaagccggaaaaacagagaccaacgtatatgataaacaggccatcattgacaaatacggagttttaccccatcagcttattgacgttaaaggcttaatgggagattcgtcagataatatacccggcgttccgggagtgggtgagaaaacggcgttaagccttatttcagcctacggtacactggaaggtgtttacgagcatattgatgaaataaaacagcctaagctgaaagcatcgctgattgaatataaggatcaggcgtttttaagccgtaagctgggtactattgtaagaaatctggagctgtgtgcttcgctggaggatctgaaaagaaaagaaataaaccgcaaagagcttttgaatgttttcagaaaactcgaatttgaaagtatcatatcaaaaatgaatcttgcttccgctgaggtgacagaattacctcccgcgccggaagagcttaaaataacccatatttcagcggcagaggatcttaagaaatggattgcttacctgcttaaccagaaaaacatttccgtccttcaactgattgaccgggaggattcatacagttcccgtctttcagggctggctttgtgcaccggggatgaggttttttatatcgagaccgggactgcactccccgagaatttgattgcaacagagctgaaagaactgtggcagaatgaaaatattcacaaaatcggacacaatataaaagaatttataacctggctgctgaaacacgatgttgaactgaacggcctttatttcgacactatgattgccgaatacctgatagattccataagaaacggctatcctatagcaagcctttctcacaaatacctgaatcgcagcgttccgtcgctggacgaacttttgggcaagggaaagggagcaaaaaagtactctgaaattccgcccgaaaggctgaaagattacagcgcttataacgtcaaagccatttttgacatatggccgatgcagaaaaaagttcttcaggaaaaccggcaggaggagctttttaatgacatagagcttcctcttataaccgtacttgccagtatggaataccacggtttcaaagttgacgccgcaaaacttcacgaatacggcgaagttcttctgtcacgcataaaagacctggaaaaggtaatttacatgctggccggtgaagaattcaacatcaattcaacgaagcagcttggtaccatattattcgaaaaactgaagcttcccgttgtaaaaagtacaaagaccggatactccaccgacgtcgaggttcttgaagagctttattacaagcatgatataataccatgcataatagaataccgccagcttacaaaactttacaccacctacgccgaaggtcttgaaaaagtgataaatcctgtaaccggtaaaattcattcaagttttaaccagacggttacggctacaggccgcatcagcagtaccgaaccaaatttacagaatatcccagtcagacacgaaatgggaagggaaatacggaaagcttttattccgtcgtcggaaaacgctgtttttgttgatgccgattattcacagatagagcttcgcgtgcttgcccatataacaggcgatgaagccctgataaatgctttcgttaagggggaagatattcatacggccacggcgtcgctggtatttgacgtagctcccgaagatgtgacgccggaactgcgcagaaaggcaaaagccgtaaatttcggcatagtgtacgggatcagtgattacgggctggcacgggatttgggaattacccggaaggaagcaaagcggtatatagacgactattttgccaaataccccaaagtaaaaacctatgtggatgaaattgtgcgggtcggccaggaacaggggtatgtggaaactctgttccacagaagaagataccttcccgagcttgcatctaaaaattttcaccagccttctttcggaaaaagggttgcaatgaatacgcccatacagggcactgcagccgatattattaaaattgcgatggtgaaggtatacaaggctttgaaagaatccggccttaaatccaggcttatcctccaggtccatgacgaacttgttattgagacttttgaagacgaactggagactgtcaaggaacttgtcaaaaagtgcatggaagaggccgttgaattgagtgtgccgcttgttgtcgacgtttcaatcgggaaaaactggtatgaagcctcctgatatggatcc

SEQ ID NO: 382 - DNA, 2772 bp, Artificial Sequence
  Description of Artificial Sequence: Synthetic Clostridium stercorarium DNA Polymerase R828S
atgaaatacctgctgccgaccgctgctgctggtctgctgctcctcgctgcccagccggcgatggccatggatccaaaaataatccttatagacggaaacagtattttaaaccgcggtttttatgccctgtcggggcgatccatgctgactacgtccacaggtctgtataccaatgcggttttcgcttttgtaaatatattgaacaaatatatcgaagaggaaaaccctgattatattgccgttgctttcgatcttagggcaaaaactttccggcacggtctatatgagggatacaaagcgcagcggaaaggcatgcccgatgaacttgcaatgcagatacccctcgcgaaggaagtactgagggcgatgaatattgccataatagagcatgaaggttatgaagccgacgatataatcggcagcctttcgttaaaggccgaaaaagagaattttgacgtaataatccttacgggggacagggattctttccagctgatcagcgacagggtgaaagttatcctgccttcgacgaaagccggaaaaacagagaccaacgtatatgataaacaggccatcattgacaaatacggagttttaccccatcagcttattgacgttaaaggcttaatgggagattcgtcagataatatacccggcgttccgggagtgggtgagaaaacggcgttaagccttatttcagcctacggtacactggaaggtgtttacgagcatattgatgaaataaaacagcctaagctgaaagcatcgctgattgaatataaggatcaggcgtttttaagccgtaagctgggtactattgtaagaaatctggagctgtgtgcttcgctggaggatctgaaaagaaaagaaataaaccgcaaagagcttttgaatgttttcagaaaactcgaatttgaaagtatcatatcaaaaatgaatcttgcttccgctgaggtgacagaattacctcccgcgccggaagagcttaaaataacccatatttcagcggcagaggatcttaagaaatggattgcttacctgcttaaccagaaaaacatttccgtccttcaactgattgaccgggaggattcatacagttcccgtctttcagggctggctttgtgcaccggggatgaggttttttatatcgagaccgggactgcactccccgagaatttgattgcaacagagctgaaagaactgtggcagaatgaaaatattcacaaaatcggacacaatataaaagaatttataacctggctgctgaaacacgatgttgaactgaacggcctttatttcgacactatgattgccgaatacctgatagattccataagaaacggctatcctatagcaagcctttctcacaaatacctgaatcgcagcgttccgtcgctggacgaacttttgggcaagggaaagggagcaaaaaagtactctgaaattccgcccgaaaggctgaaagattacagcgcttataacgtcaaagccatttttgacatatggccgatgcagaaaaaagttcttcaggaaaaccggcaggaggagctttttaatgacatagagcttcctcttataaccgtacttgccagtatggaataccacggtttcaaagttgacgccgcaaaacttcacgaatacggcgaagttcttctgtcacgcataaaagacctggaaaaggtaatttacatgctggccggtgaagaattcaacatcaattcaacgaagcagcttggtaccatattattcgaaaaactgaagcttcccgttgtaaaaagtacaaagaccggatactccaccgacgtcgaggttcttgaagagctttattacaagcatgatataataccatgcataatagaataccgccagcttacaaaactttacaccacctacgccgaaggtcttgaaaaagtgataaatcctgtaaccggtaaaattcattcaagttttaaccagacggttacggctacaggccgcatcagcagtaccgaaccaaatttacagaatatcccagtcagacacgaaatgggaagggaaatacggaaagcttttattccgtcgtcggaaaacgctgtttttgttgatgccgattattcacagatagagcttcgcgtgcttgcccatataacaggcgatgaagccctgataaatgctttcgttaagggggaagatattcatacggccacggcgtcgctggtatttgacgtagctcccgaagatgtgacgccggaactgcgcagaaaggcaaaagccgtaaatttcggcatagtgtacgggatcagtgattacgggctggcacgggatttgggaattacccggaaggaagcaaagcggtatatagacgactattttgccaaataccccaaagtaaaaacctatgtggatgaaattgtgcgggtcggccaggaacaggggtatgtggaaactctgttccacagaagaagataccttcccgagcttgcatctaaaaattttcaccagtcttctttcggaaaaagggttgcaatgaatacgcccatacagggcactgcagccgatattattaaaattgcgatggtgaaggtatacaaggctttgaaagaatccggccttaaatccaggcttatcctccaggtccatgacgaacttgttattgagacttttgaagacgaactggagactgtcaaggaacttgtcaaaaagtgcatggaagaggccgttgaattgagtgtgccgcttgttgtcgacgtttcaatcgggaaaaactggtatgaagcctcctgatatggatcc

SEQ ID NO: 383 - DNA, 2772 bp, Artificial Sequence
  Description of Artificial Sequence: Synthetic Clostridium stercorarium DNA Polymerase R828T
atgaaatacctgctgccgaccgctgctgctggtctgctgctcctcgctgcccagccggcgatggccatggatccaaaaataatccttatagacggaaacagtattttaaaccgcggtttttatgccctgtcggggcgatccatgctgactacgtccacaggtctgtataccaatgcggttttcgcttttgtaaatatattgaacaaatatatcgaagaggaaaaccctgattatattgccgttgctttcgatcttagggcaaaaactttccggcacggtctatatgagggatacaaagcgcagcggaaaggcatgcccgatgaacttgcaatgcagatacccctcgcgaaggaagtactgagggcgatgaatattgccataatagagcatgaaggttatgaagccgacgatataatcggcagcctttcgttaaaggccgaaaaagagaattttgacgtaataatccttacgggggacagggattctttccagctgatcagcgacagggtgaaagttatcctgccttcgacgaaagccggaaaaacagagaccaacgtatatgataaacaggccatcattgacaaatacggagttttaccccatcagcttattgacgttaaaggcttaatgggagattcgtcagataatatacccggcgttccgggagtgggtgagaaaacggcgttaagccttatttcagcctacggtacactggaaggtgtttacgagcatattgatgaaataaaacagcctaagctgaaagcatcgctgattgaatataaggatcaggcgtttttaagccgtaagctgggtactattgtaagaaatctggagctgtgtgcttcgctggaggatctgaaaagaaaagaaataaaccgcaaagagcttttgaatgttttcagaaaactcgaatttgaaagtatcatatcaaaaatgaatcttgcttccgctgaggtgacagaattacctcccgcgccggaagagcttaaaataacccatatttcagcggcagaggatcttaagaaatggattgcttacctgcttaaccagaaaaacatttccgtccttcaactgattgaccgggaggattcatacagttcccgtctttcagggctggctttgtgcaccggggatgaggttttttatatcgagaccgggactgcactccccgagaatttgattgcaacagagctgaaagaactgtggcagaatgaaaatattcacaaaatcggacacaatataaaagaatttataacctggctgctgaaacacgatgttgaactgaacggcctttatttcgacactatgattgccgaatacctgatagattccataagaaacggctatcctatagcaagcctttctcacaaatacctgaatcgcagcgttccgtcgctggacgaacttttgggcaagggaaagggagcaaaaaagtactctgaaattccgcccgaaaggctgaaagattacagcgcttataacgtcaaagccatttttgacatatggccgatgcagaaaaaagttcttcaggaaaaccggcaggaggagctttttaatgacatagagcttcctcttataaccgtacttgccagtatggaataccacggtttcaaagttgacgccgcaaaacttcacgaatacggcgaagttcttctgtcacgcataaaagacctggaaaaggtaatttacatgctggccggtgaagaattcaacatcaattcaacgaagcagcttggtaccatattattcgaaaaactgaagcttcccgttgtaaaaagtacaaagaccggatactccaccgacgtcgaggttcttgaagagctttattacaagcatgatataataccatgcataatagaataccgccagcttacaaaactttacaccacctacgccgaaggtcttgaaaaagtgataaatcctgtaaccggtaaaattcattcaagttttaaccagacggttacggctacaggccgcatcagcagtaccgaaccaaatttacagaatatcccagtcagacacgaaatgggaagggaaatacggaaagcttttattccgtcgtcggaaaacgctgtttttgttgatgccgattattcacagatagagcttcgcgtgcttgcccatataacaggcgatgaagccctgataaatgctttcgttaagggggaagatattcatacggccacggcgtcgctggtatttgacgtagctcccgaagatgtgacgccggaactgcgcagaaaggcaaaagccgtaaatttcggcatagtgtacgggatcagtgattacgggctggcacgggatttgggaattacccggaaggaagcaaagcggtatatagacgactattttgccaaataccccaaagtaaaaacctatgtggatgaaattgtgcgggtcggccaggaacaggggtatgtggaaactctgttccacagaagaagataccttcccgagcttgcatctaaaaattttcaccagacttctttcggaaaaagggttgcaatgaatacgcccatacagggcactgcagccgatattattaaaattgcgatggtgaaggtatacaaggctttgaaagaatccggccttaaatccaggcttatcctccaggtccatgacgaacttgttattgagacttttgaagacgaactggagactgtcaaggaacttgtcaaaaagtgcatggaagaggccgttgaattgagtgtgccgcttgttgtcgacgtttcaatcgggaaaaactggtatgaagcctcctgatatggatcc

SEQ ID NO: 384 - DNA, 2772 bp, Artificial Sequence
  Description of Artificial Sequence: Synthetic Clostridium stercorarium DNA Polymerase R828W
atgaaatacctgctgccgaccgctgctgctggtctgctgctcctcgctgcccagccggcgatggccatggatccaaaaataatccttatagacggaaacagtattttaaaccgcggtttttatgccctgtcggggcgatccatgctgactacgtccacaggtctgtataccaatgcggttttcgcttttgtaaatatattgaacaaatatatcgaagaggaaaaccctgattatattgccgttgctttcgatcttagggcaaaaactttccggcacggtctatatgagggatacaaagcgcagcggaaaggcatgcccgatgaacttgcaatgcagatacccctcgcgaaggaagtactgagggcgatgaatattgccataatagagcatgaaggttatgaagccgacgatataatcggcagcctttcgttaaaggccgaaaaagagaattttgacgtaataatccttacgggggacagggattctttccagctgatcagcgacagggtgaaagttatcctgccttcgacgaaagccggaaaaacagagaccaacgtatatgataaacaggccatcattgacaaatacggagttttaccccatcagcttattgacgttaaaggcttaatgggagattcgtcagataatatacccggcgttccgggagtgggtgagaaaacggcgttaagccttatttcagcctacggtacactggaaggtgtttacgagcatattgatgaaataaaacagcctaagctgaaagcatcgctgattgaatataaggatcaggcgtttttaagccgtaagctgggtactattgtaagaaatctggagctgtgtgcttcgctggaggatctgaaaagaaaagaaataaaccgcaaagagcttttgaatgttttcagaaaactcgaatttgaaagtatcatatcaaaaatgaatcttgcttccgctgaggtgacagaattacctcccgcgccggaagagcttaaaataacccatatttcagcggcagaggatcttaagaaatggattgcttacctgcttaaccagaaaaacatttccgtccttcaactgattgaccgggaggattcatacagttcccgtctttcagggctggctttgtgcaccggggatgaggttttttatatcgagaccgggactgcactccccgagaatttgattgcaacagagctgaaagaactgtggcagaatgaaaatattcacaaaatcggacacaatataaaagaatttataacctggctgctgaaacacgatgttgaactgaacggcctttatttcgacactatgattgccgaatacctgatagattccataagaaacggctatcctatagcaagcctttctcacaaatacctgaatcgcagcgttccgtcgctggacgaacttttgggcaagggaaagggagcaaaaaagtactctgaaattccgcccgaaaggctgaaagattacagcgcttataacgtcaaagccatttttgacatatggccgatgcagaaaaaagttcttcaggaaaaccggcaggaggagctttttaatgacatagagcttcctcttataaccgtacttgccagtatggaataccacggtttcaaagttgacgccgcaaaacttcacgaatacggcgaagttcttctgtcacgcataaaagacctggaaaaggtaatttacatgctggccggtgaagaattcaacatcaattcaacgaagcagcttggtaccatattattcgaaaaactgaagcttcccgttgtaaaaagtacaaagaccggatactccaccgacgtcgaggttcttgaagagctttattacaagcatgatataataccatgcataatagaataccgccagcttacaaaactttacaccacctacgccgaaggtcttgaaaaagtgataaatcctgtaaccggtaaaattcattcaagttttaaccagacggttacggctacaggccgcatcagcagtaccgaaccaaatttacagaatatcccagtcagacacgaaatgggaagggaaatacggaaagcttttattccgtcgtcggaaaacgctgtttttgttgatgccgattattcacagatagagcttcgcgtgcttgcccatataacaggcgatgaagccctgataaatgctttcgttaagggggaagatattcatacggccacggcgtcgctggtatttgacgtagctcccgaagatgtgacgccggaactgcgcagaaaggcaaaagccgtaaatttcggcatagtgtacgggatcagtgattacgggctggcacgggatttgggaattacccggaaggaagcaaagcggtatatagacgactattttgccaaataccccaaagtaaaaacctatgtggatgaaattgtgcgggtcggccaggaacaggggtatgtggaaactctgttccacagaagaagataccttcccgagcttgcatctaaaaattttcaccagtggtctttcggaaaaagggttgcaatgaatacgcccatacagggcactgcagccgatattattaaaattgcgatggtgaaggtatacaaggctttgaaagaatccggccttaaatccaggcttatcctccaggtccatgacgaacttgttattgagacttttgaagacgaactggagactgtcaaggaacttgtcaaaaagtgcatggaagaggccgttgaattgagtgtgccgcttgttgtcgacgtttcaatcgggaaaaactggtatgaagcctcctgatatggatcc

SEQ ID NO: 385 - DNA, 2772 bp, Artificial Sequence
  Description of Artificial Sequence: Synthetic Clostridium stercorarium DNA Polymerase R828Y
atgaaatacctgctgccgaccgctgctgctggtctgctgctcctcgctgcccagccggcgatggccatggatccaaaaataatccttatagacggaaacagtattttaaaccgcggtttttatgccctgtcggggcgatccatgctgactacgtccacaggtctgtataccaatgcggttttcgcttttgtaaatatattgaacaaatatatcgaagaggaaaaccctgattatattgccgttgctttcgatcttagggcaaaaactttccggcacggtctatatgagggatacaaagcgcagcggaaaggcatgcccgatgaacttgcaatgcagatacccctcgcgaaggaagtactgagggcgatgaatattgccataatagagcatgaaggttatgaagccgacgatataatcggcagcctttcgttaaaggccgaaaaagagaattttgacgtaataatccttacgggggacagggattctttccagctgatcagcgacagggtgaaagttatcctgccttcgacgaaagccggaaaaacagagaccaacgtatatgataaacaggccatcattgacaaatacggagttttaccccatcagcttattgacgttaaaggcttaatgggagattcgtcagataatatacccggcgttccgggagtgggtgagaaaacggcgttaagccttatttcagcctacggtacactggaaggtgtttacgagcatattgatgaaataaaacagcctaagctgaaagcatcgctgattgaatataaggatcaggcgtttttaagccgtaagctgggtactattgtaagaaatctggagctgtgtgcttcgctggaggatctgaaaagaaaagaaataaaccgcaaagagcttttgaatgttttcagaaaactcgaatttgaaagtatcatatcaaaaatgaatcttgcttccgctgaggtgacagaattacctcccgcgccggaagagcttaaaataacccatatttcagcggcagaggatcttaagaaatggattgcttacctgcttaaccagaaaaacatttccgtccttcaactgattgaccgggaggattcatacagttcccgtctttcagggctggctttgtgcaccggggatgaggttttttatatcgagaccgggactgcactccccgagaatttgattgcaacagagctgaaagaactgtggcagaatgaaaatattcacaaaatcggacacaatataaaagaatttataacctggctgctgaaacacgatgttgaactgaacggcctttatttcgacactatgattgccgaatacctgatagattccataagaaacggctatcctatagcaagcctttctcacaaatacctgaatcgcagcgttccgtcgctggacgaacttttgggcaagggaaagggagcaaaaaagtactctgaaattccgcccgaaaggctgaaagattacagcgcttataacgtcaaagccatttttgacatatggccgatgcagaaaaaagttcttcaggaaaaccggcaggaggagctttttaatgacatagagcttcctcttataaccgtacttgccagtatggaataccacggtttcaaagttgacgccgcaaaacttcacgaatacggcgaagttcttctgtcacgcataaaagacctggaaaaggtaatttacatgctggccggtgaagaattcaacatcaattcaacgaagcagcttggtaccatattattcgaaaaactgaagcttcccgttgtaaaaagtacaaagaccggatactccaccgacgtcgaggttcttgaagagctttattacaagcatgatataataccatgcataatagaataccgccagcttacaaaactttacaccacctacgccgaaggtcttgaaaaagtgataaatcctgtaaccggtaaaattcattcaagttttaaccagacggttacggctacaggccgcatcagcagtaccgaaccaaatttacagaatatcccagtcagacacgaaatgggaagggaaatacggaaagcttttattccgtcgtcggaaaacgctgtttttgttgatgccgattattcacagatagagcttcgcgtgcttgcccatataacaggcgatgaagccctgataaatgctttcgttaagggggaagatattcatacggccacggcgtcgctggtatttgacgtagctcccgaagatgtgacgccggaactgcgcagaaaggcaaaagccgtaaatttcggcatagtgtacgggatcagtgattacgggctggcacgggatttgggaattacccggaaggaagcaaagcggtatatagacgactattttgccaaataccccaaagtaaaaacctatgtggatgaaattgtgcgggtcggccaggaacaggggtatgtggaaactctgttccacagaagaagataccttcccgagcttgcatctaaaaattttcaccagtattctttcggaaaaagggttgcaatgaatacgcccatacagggcactgcagccgatattattaaaattgcgatggtgaaggtatacaaggctttgaaagaatccggccttaaatccaggcttatcctccaggtccatgacgaacttgttattgagacttttgaagacgaactggagactgtcaaggaacttgtcaaaaagtgcatggaagaggccgttgaattgagtgtgccgcttgttgtcgacgtttcaatcgggaaaaactggtatgaagcctcctgatatggatcc

SEQ ID NO: 386 - DNA, 2772 bp, Artificial Sequence
  Description of Artificial Sequence: Synthetic Clostridium stercorarium DNA Polymerase R828V
atgaaatacctgctgccgaccgctgctgctggtctgctgctcctcgctgcccagccggcgatggccatggatccaaaaataatccttatagacggaaacagtattttaaaccgcggtttttatgccctgtcggggcgatccatgctgactacgtccacaggtctgtataccaatgcggttttcgcttttgtaaatatattgaacaaatatatcgaagaggaaaaccctgattatattgccgttgctttcgatcttagggcaaaaactttccggcacggtctatatgagggatacaaagcgcagcggaaaggcatgcccgatgaacttgcaatgcagatacccctcgcgaaggaagtactgagggcgatgaatattgccataatagagcatgaaggttatgaagccgacgatataatcggcagcctttcgttaaaggccgaaaaagagaattttgacgtaataatccttacgggggacagggattctttccagctgatcagcgacagggtgaaagttatcctgccttcgacgaaagccggaaaaacagagaccaacgtatatgataaacaggccatcattgacaaatacggagttttaccccatcagcttattgacgttaaaggcttaatgggagattcgtcagataatatacccggcgttccgggagtgggtgagaaaacggcgttaagccttatttcagcctacggtacactggaaggtgtttacgagcatattgatgaaataaaacagcctaagctgaaagcatcgctgattgaatataaggatcaggcgtttttaagccgtaagctgggtactattgtaagaaatctggagctgtgtgcttcgctggaggatctgaaaagaaaagaaataaaccgcaaagagcttttgaatgttttcagaaaactcgaatttgaaagtatcatatcaaaaatgaatcttgcttccgctgaggtgacagaattacctcccgcgccggaagagcttaaaataacccatatttcagcggcagaggatcttaagaaatggattgcttacctgcttaaccagaaaaacatttccgtccttcaactgattgaccgggaggattcatacagttcccgtctttcagggctggctttgtgcaccggggatgaggttttttatatcgagaccgggactgcactccccgagaatttgattgcaacagagctgaaagaactgtggcagaatgaaaatattcacaaaatcggacacaatataaaagaatttataacctggctgctgaaacacgatgttgaactgaacggcctttatttcgacactatgattgccgaatacctgatagattccataagaaacggctatcctatagcaagcctttctcacaaatacctgaatcgcagcgttccgtcgctggacgaacttttgggcaagggaaagggagcaaaaaagtactctgaaattccgcccgaaaggctgaaagattacagcgcttataacgtcaaagccatttttgacatatggccgatgcagaaaaaagttcttcaggaaaaccggcaggaggagctttttaatgacatagagcttcctcttataaccgtacttgccagtatggaataccacggtttcaaagttgacgccgcaaaacttcacgaatacggcgaagttcttctgtcacgcataaaagacctggaaaaggtaatttacatgctggccggtgaagaattcaacatcaattcaacgaagcagcttggtaccatattattcgaaaaactgaagcttcccgttgtaaaaagtacaaagaccggatactccaccgacgtcgaggttcttgaagagctttattacaagcatgatataataccatgcataatagaataccgccagcttacaaaactttacaccacctacgccgaaggtcttgaaaaagtgataaatcctgtaaccggtaaaattcattcaagttttaaccagacggttacggctacaggccgcatcagcagtaccgaaccaaatttacagaatatcccagtcagacacgaaatgggaagggaaatacggaaagcttttattccgtcgtcggaaaacgctgtttttgttgatgccgattattcacagatagagcttcgcgtgcttgcccatataacaggcgatgaagccctgataaatgctttcgttaagggggaagatattcatacggccacggcgtcgctggtatttgacgtagctcccgaagatgtgacgccggaactgcgcagaaaggcaaaagccgtaaatttcggcatagtgtacgggatcagtgattacgggctggcacgggatttgggaattacccggaaggaagcaaagcggtatatagacgactattttgccaaataccccaaagtaaaaacctatgtggatgaaattgtgcgggtcggccaggaacaggggtatgtggaaactctgttccacagaagaagataccttcccgagcttgcatctaaaaattttcaccaggtttctttcggaaaaagggttgcaatgaatacgcccatacagggcactgcagccgatattattaaaattgcgatggtgaaggtatacaaggctttgaaagaatccggccttaaatccaggcttatcctccaggtccatgacgaacttgttattgagacttttgaagacgaactggagactgtcaaggaacttgtcaaaaagtgcatggaagaggccgttgaattgagtgtgccgcttgttgtcgacgtttcaatcgggaaaaactggtatgaagcctcctgatatggatcc

SEQ ID NO: 387 - DNA, 2772 bp, Artificial Sequence
  Description of Artificial Sequence: Synthetic Clostridium stercorarium DNA Polymerase S829A
atgaaatacctgctgccgaccgctgctgctggtctgctgctcctcgctgcccagccggcgatggccatggatccaaaaataatccttatagacggaaacagtattttaaaccgcggtttttatgccctgtcggggcgatccatgctgactacgtccacaggtctgtataccaatgcggttttcgcttttgtaaatatattgaacaaatatatcgaagaggaaaaccctgattatattgccgttgctttcgatcttagggcaaaaactttccggcacggtctatatgagggatacaaagcgcagcggaaaggcatgcccgatgaacttgcaatgcagatacccctcgcgaaggaagtactgagggcgatgaatattgccataatagagcatgaaggttatgaagccgacgatataatcggcagcctttcgttaaaggccgaaaaagagaattttgacgtaataatccttacgggggacagggattctttccagctgatcagcgacagggtgaaagttatcctgccttcgacgaaagccggaaaaacagagaccaacgtatatgataaacaggccatcattgacaaatacggagttttaccccatcagcttattgacgttaaaggcttaatgggagattcgtcagataatatacccggcgttccgggagtgggtgagaaaacggcgttaagccttatttcagcctacggtacactggaaggtgtttacgagcatattgatgaaataaaacagcctaagctgaaagcatcgctgattgaatataaggatcaggcgtttttaagccgtaagctgggtactattgtaagaaatctggagctgtgtgcttcgctggaggatctgaaaagaaaagaaataaaccgcaaagagcttttgaatgttttcagaaaactcgaatttgaaagtatcatatcaaaaatgaatcttgcttccgctgaggtgacagaattacctcccgcgccggaagagcttaaaataacccatatttcagcggcagaggatcttaagaaatggattgcttacctgcttaaccagaaaaacatttccgtccttcaactgattgaccgggaggattcatacagttcccgtctttcagggctggctttgtgcaccggggatgaggttttttatatcgagaccgggactgcactccccgagaatttgattgcaacagagctgaaagaactgtggcagaatgaaaatattcacaaaatcggacacaatataaaagaatttataacctggctgctgaaacacgatgttgaactgaacggcctttatttcgacactatgattgccgaatacctgatagattccataagaaacggctatcctatagcaagcctttctcacaaatacctgaatcgcagcgttccgtcgctggacgaacttttgggcaagggaaagggagcaaaaaagtactctgaaattccgcccgaaaggctgaaagattacagcgcttataacgtcaaagccatttttgacatatggccgatgcagaaaaaagttcttcaggaaaaccggcaggaggagctttttaatgacatagagcttcctcttataaccgtacttgccagtatggaataccacggtttcaaagttgacgccgcaaaacttcacgaatacggcgaagttcttctgtcacgcataaaagacctggaaaaggtaatttacatgctggccggtgaagaattcaacatcaattcaacgaagcagcttggtaccatattattcgaaaaactgaagcttcccgttgtaaaaagtacaaagaccggatactccaccgacgtcgaggttcttgaagagctttattacaagcatgatataataccatgcataatagaataccgccagcttacaaaactttacaccacctacgccgaaggtcttgaaaaagtgataaatcctgtaaccggtaaaattcattcaagttttaaccagacggttacggctacaggccgcatcagcagtaccgaaccaaatttacagaatatcccagtcagacacgaaatgggaagggaaatacggaaagcttttattccgtcgtcggaaaacgctgtttttgttgatgccgattattcacagatagagcttcgcgtgcttgcccatataacaggcgatgaagccctgataaatgctttcgttaagggggaagatattcatacggccacggcgtcgctggtatttgacgtagctcccgaagatgtgacgccggaactgcgcagaaaggcaaaagccgtaaatttcggcatagtgtacgggatcagtgattacgggctggcacgggatttgggaattacccggaaggaagcaaagcggtatatagacgactattttgccaaataccccaaagtaaaaacctatgtggatgaaattgtgcgggtcggccaggaacaggggtatgtggaaactctgttccacagaagaagataccttcccgagcttgcatctaaaaattttcaccagcgtgctttcggaaaaagggttgcaatgaatacgcccatacagggcactgcagccgatattattaaaattgcgatggtgaaggtatacaaggctttgaaagaatccggccttaaatccaggcttatcctccaggtccatgacgaacttgttattgagacttttgaagacgaactggagactgtcaaggaacttgtcaaaaagtgcatggaagaggccgttgaattgagtgtgccgcttgttgtcgacgtttcaatcgggaaaaactggtatgaagcctcctgatatggatcc

SEQ ID NO: 388 - DNA, 2772 bp, Artificial Sequence
  Description of Artificial Sequence: Synthetic Clostridium stercorarium DNA Polymerase S829R
atgaaatacctgctgccgaccgctgctgctggtctgctgctcctcgctgcccagccggcgatggccatggatccaaaaataatccttatagacggaaacagtattttaaaccgcggtttttatgccctgtcggggcgatccatgctgactacgtccacaggtctgtataccaatgcggttttcgcttttgtaaatatattgaacaaatatatcgaagaggaaaaccctgattatattgccgttgctttcgatcttagggcaaaaactttccggcacggtctatatgagggatacaaagcgcagcggaaaggcatgcccgatgaacttgcaatgcagatacccctcgcgaaggaagtactgagggcgatgaatattgccataatagagcatgaaggttatgaagccgacgatataatcggcagcctttcgttaaaggccgaaaaagagaattttgacgtaataatccttacgggggacagggattctttccagctgatcagcgacagggtgaaagttatcctgccttcgacgaaagccggaaaaacagagaccaacgtatatgataaacaggccatcattgacaaatacggagttttaccccatcagcttattgacgttaaaggcttaatgggagattcgtcagataatatacccggcgttccgggagtgggtgagaaaacggcgttaagccttatttcagcctacggtacactggaaggtgtttacgagcatattgatgaaataaaacagcctaagctgaaagcatcgctgattgaatataaggatcaggcgtttttaagccgtaagctgggtactattgtaagaaatctggagctgtgtgcttcgctggaggatctgaaaagaaaagaaataaaccgcaaagagcttttgaatgttttcagaaaactcgaatttgaaagtatcatatcaaaaatgaatcttgcttccgctgaggtgacagaattacctcccgcgccggaagagcttaaaataacccatatttcagcggcagaggatcttaagaaatggattgcttacctgcttaaccagaaaaacatttccgtccttcaactgattgaccgggaggattcatacagttcccgtctttcagggctggctttgtgcaccggggatgaggttttttatatcgagaccgggactgcactccccgagaatttgattgcaacagagctgaaagaactgtggcagaatgaaaatattcacaaaatcggacacaatataaaagaatttataacctggctgctgaaacacgatgttgaactgaacggcctttatttcgacactatgattgccgaatacctgatagattccataagaaacggctatcctatagcaagcctttctcacaaatacctgaatcgcagcgttccgtcgctggacgaacttttgggcaagggaaagggagcaaaaaagtactctgaaattccgcccgaaaggctgaaagattacagcgcttataacgtcaaagccatttttgacatatggccgatgcagaaaaaagttcttcaggaaaaccggcaggaggagctttttaatgacatagagcttcctcttataaccgtacttgccagtatggaataccacggtttcaaagttgacgccgcaaaacttcacgaatacggcgaagttcttctgtcacgcataaaagacctggaaaaggtaatttacatgctggccggtgaagaattcaacatcaattcaacgaagcagcttggtaccatattattcgaaaaactgaagcttcccgttgtaaaaagtacaaagaccggatactccaccgacgtcgaggttcttgaagagctttattacaagcatgatataataccatgcataatagaataccgccagcttacaaaactttacaccacctacgccgaaggtcttgaaaaagtgataaatcctgtaaccggtaaaattcattcaagttttaaccagacggttacggctacaggccgcatcagcagtaccgaaccaaatttacagaatatcccagtcagacacgaaatgggaagggaaatacggaaagcttttattccgtcgtcggaaaacgctgtttttgttgatgccgattattcacagatagagcttcgcgtgcttgcccatataacaggcgatgaagccctgataaatgctttcgttaagggggaagatattcatacggccacggcgtcgctggtatttgacgtagctcccgaagatgtgacgccggaactgcgcagaaaggcaaaagccgtaaatttcggcatagtgtacgggatcagtgattacgggctggcacgggatttgggaattacccggaaggaagcaaagcggtatatagacgactattttgccaaataccccaaagtaaaaacctatgtggatgaaattgtgcgggtcggccaggaacaggggtatgtggaaactctgttccacagaagaagataccttcccgagcttgcatctaaaaattttcaccagcgtcgtttcggaaaaagggttgcaatgaatacgcccatacagggcactgcagccgatattattaaaattgcgatggtgaaggtatacaaggctttgaaagaatccggccttaaatccaggcttatcctccaggtccatgacgaacttgttattgagacttttgaagacgaactggagactgtcaaggaacttgtcaaaaagtgcatggaagaggccgttgaattgagtgtgccgcttgttgtcgacgtttcaatcgggaaaaactggtatgaagcctcctgatatggatcc

SEQ ID NO: 389 - DNA, 2772 bp, Artificial Sequence
  Description of Artificial Sequence: Synthetic Clostridium stercorarium DNA Polymerase S829N
atgaaatacctgctgccgaccgctgctgctggtctgctgctcctcgctgcccagccggcgatggccatggatccaaaaataatccttatagacggaaacagtattttaaaccgcggtttttatgccctgtcggggcgatccatgctgactacgtccacaggtctgtataccaatgcggttttcgcttttgtaaatatattgaacaaatatatcgaagaggaaaaccctgattatattgccgttgctttcgatcttagggcaaaaactttccggcacggtctatatgagggatacaaagcgcagcggaaaggcatgcccgatgaacttgcaatgcagatacccctcgcgaaggaagtactgagggcgatgaatattgccataatagagcatgaaggttatgaagccgacgatataatcggcagcctttcgttaaaggccgaaaaagagaattttgacgtaataatccttacgggggacagggattctttccagctgatcagcgacagggtgaaagttatcctgccttcgacgaaagccggaaaaacagagaccaacgtatatgataaacaggccatcattgacaaatacggagttttaccccatcagcttattgacgttaaaggcttaatgggagattcgtcagataatatacccggcgttccgggagtgggtgagaaaacggcgttaagccttatttcagcctacggtacactggaaggtgtttacgagcatattgatgaaataaaacagcctaagctgaaagcatcgctgattgaatataaggatcaggcgtttttaagccgtaagctgggtactattgtaagaaatctggagctgtgtgcttcgctggaggatctgaaaagaaaagaaataaaccgcaaagagcttttgaatgttttcagaaaactcgaatttgaaagtatcatatcaaaaatgaatcttgcttccgctgaggtgacagaattacctcccgcgccggaagagcttaaaataacccatatttcagcggcagaggatcttaagaaatggattgcttacctgcttaaccagaaaaacatttccgtccttcaactgattgaccgggaggattcatacagttcccgtctttcagggctggctttgtgcaccggggatgaggttttttatatcgagaccgggactgcactccccgagaatttgattgcaacagagctgaaagaactgtggcagaatgaaaatattcacaaaatcggacacaatataaaagaatttataacctggctgctgaaacacgatgttgaactgaacggcctttatttcgacactatgattgccgaatacctgatagattccataagaaacggctatcctatagcaagcctttctcacaaatacctgaatcgcagcgttccgtcgctggacgaacttttgggcaagggaaagggagcaaaaaagtactctgaaattccgcccgaaaggctgaaagattacagcgcttataacgtcaaagccatttttgacatatggccgatgcagaaaaaagttcttcaggaaaaccggcaggaggagctttttaatgacatagagcttcctcttataaccgtacttgccagtatggaataccacggtttcaaagttgacgccgcaaaacttcacgaatacggcgaagttcttctgtcacgcataaaagacctggaaaaggtaatttacatgctggccggtgaagaattcaacatcaattcaacgaagcagcttggtaccatattattcgaaaaactgaagcttcccgttgtaaaaagtacaaagaccggatactccaccgacgtcgaggttcttgaagagctttattacaagcatgatataataccatgcataatagaataccgccagcttacaaaactttacaccacctacgccgaaggtcttgaaaaagtgataaatcctgtaaccggtaaaattcattcaagttttaaccagacggttacggctacaggccgcatcagcagtaccgaaccaaatttacagaatatcccagtcagacacgaaatgggaagggaaatacggaaagcttttattccgtcgtcggaaaacgctgtttttgttgatgccgattattcacagatagagcttcgcgtgcttgcccatataacaggcgatgaagccctgataaatgctttcgttaagggggaagatattcatacggccacggcgtcgctggtatttgacgtagctcccgaagatgtgacgccggaactgcgcagaaaggcaaaagccgtaaatttcggcatagtgtacgggatcagtgattacgggctggcacgggatttgggaattacccggaaggaagcaaagcggtatatagacgactattttgccaaataccccaaagtaaaaacctatgtggatgaaattgtgcgggtcggccaggaacaggggtatgtggaaactctgttccacagaagaagataccttcccgagcttgcatctaaaaattttcaccagcgtaatttcggaaaaagggttgcaatgaatacgcccatacagggcactgcagccgatattattaaaattgcgatggtgaaggtatacaaggctttgaaagaatccggccttaaatccaggcttatcctccaggtccatgacgaacttgttattgagacttttgaagacgaactggagactgtcaaggaacttgtcaaaaagtgcatggaagaggccgttgaattgagtgtgccgcttgttgtcgacgtttcaatcgggaaaaactggtatgaagcctcctgatatggatcc

SEQ ID NO: 390 - DNA, 2772 bp, Artificial Sequence
  Description of Artificial Sequence: Synthetic Clostridium stercorarium DNA Polymerase S829D
atgaaatacctgctgccgaccgctgctgctggtctgctgctcctcgctgcccagccggcgatggccatggatccaaaaataatccttatagacggaaacagtattttaaaccgcggtttttatgccctgtcggggcgatccatgctgactacgtccacaggtctgtataccaatgcggttttcgcttttgtaaatatattgaacaaatatatcgaagaggaaaaccctgattatattgccgttgctttcgatcttagggcaaaaactttccggcacggtctatatgagggatacaaagcgcagcggaaaggcatgcccgatgaacttgcaatgcagatacccctcgcgaaggaagtactgagggcgatgaatattgccataatagagcatgaaggttatgaagccgacgatataatcggcagcctttcgttaaaggccgaaaaagagaattttgacgtaataatccttacgggggacagggattctttccagctgatcagcgacagggtgaaagttatcctgccttcgacgaaagccggaaaaacagagaccaacgtatatgataaacaggccatcattgacaaatacggagttttaccccatcagcttattgacgttaaaggcttaatgggagattcgtcagataatatacccggcgttccgggagtgggtgagaaaacggcgttaagccttatttcagcctacggtacactggaaggtgtttacgagcatattgatgaaataaaacagcctaagctgaaagcatcgctgattgaatataaggatcaggcgtttttaagccgtaagctgggtactattgtaagaaatctggagctgtgtgcttcgctggaggatctgaaaagaaaagaaataaaccgcaaagagcttttgaatgttttcagaaaactcgaatttgaaagtatcatatcaaaaatgaatcttgcttccgctgaggtgacagaattacctcccgcgccggaagagcttaaaataacccatatttcagcggcagaggatcttaagaaatggattgcttacctgcttaaccagaaaaacatttccgtccttcaactgattgaccgggaggattcatacagttcccgtctttcagggctggctttgtgcaccggggatgaggttttttatatcgagaccgggactgcactccccgagaatttgattgcaacagagctgaaagaactgtggcagaatgaaaatattcacaaaatcggacacaatataaaagaatttataacctggctgctgaaacacgatgttgaactgaacggcctttatttcgacactatgattgccgaatacctgatagattccataagaaacggctatcctatagcaagcctttctcacaaatacctgaatcgcagcgttccgtcgctggacgaacttttgggcaagggaaagggagcaaaaaagtactctgaaattccgcccgaaaggctgaaagattacagcgcttataacgtcaaagccatttttgacatatggccgatgcagaaaaaagttcttcaggaaaaccggcaggaggagctttttaatgacatagagcttcctcttataaccgtacttgccagtatggaataccacggtttcaaagttgacgccgcaaaacttcacgaatacggcgaagttcttctgtcacgcataaaagacctggaaaaggtaatttacatgctggccggtgaagaattcaacatcaattcaacgaagcagcttggtaccatattattcgaaaaactgaagcttcccgttgtaaaaagtacaaagaccggatactccaccgacgtcgaggttcttgaagagctttattacaagcatgatataataccatgcataatagaataccgccagcttacaaaactttacaccacctacgccgaaggtcttgaaaaagtgataaatcctgtaaccggtaaaattcattcaagttttaaccagacggttacggctacaggccgcatcagcagtaccgaaccaaatttacagaatatcccagtcagacacgaaatgggaagggaaatacggaaagcttttattccgtcgtcggaaaacgctgtttttgttgatgccgattattcacagatagagcttcgcgtgcttgcccatataacaggcgatgaagccctgataaatgctttcgttaagggggaagatattcatacggccacggcgtcgctggtatttgacgtagctcccgaagatgtgacgccggaactgcgcagaaaggcaaaagccgtaaatttcggcatagtgtacgggatcagtgattacgggctggcacgggatttgggaattacccggaaggaagcaaagcggtatatagacgactattttgccaaataccccaaagtaaaaacctatgtggatgaaattgtgcgggtcggccaggaacaggggtatgtggaaactctgttccacagaagaagataccttcccgagcttgcatctaaaaattttcaccagcgtgatttcggaaaaagggttgcaatgaatacgcccatacagggcactgcagccgatattattaaaattgcgatggtgaaggtatacaaggctttgaaagaatccggccttaaatccaggcttatcctccaggtccatgacgaacttgttattgagacttttgaagacgaactggagactgtcaaggaacttgtcaaaaagtgcatggaagaggccgttgaattgagtgtgccgcttgttgtcgacgtttcaatcgggaaaaactggtatgaagcctcctgatatggatcc

SEQ ID NO: 391 - DNA, 2772 bp, Artificial Sequence
  Description of Artificial Sequence: Synthetic Clostridium stercorarium DNA Polymerase S829C
atgaaatacctgctgccgaccgctgctgctggtctgctgctcctcgctgcccagccggcgatggccatggatccaaaaataatccttatagacggaaacagtattttaaaccgcggtttttatgccctgtcggggcgatccatgctgactacgtccacaggtctgtataccaatgcggttttcgcttttgtaaatatattgaacaaatatatcgaagaggaaaaccctgattatattgccgttgctttcgatcttagggcaaaaactttccggcacggtctatatgagggatacaaagcgcagcggaaaggcatgcccgatgaacttgcaatgcagatacccctcgcgaaggaagtactgagggcgatgaatattgccataatagagcatgaaggttatgaagccgacgatataatcggcagcctttcgttaaaggccgaaaaagagaattttgacgtaataatccttacgggggacagggattctttccagctgatcagcgacagggtgaaagttatcctgccttcgacgaaagccggaaaaacagagaccaacgtatatgataaacaggccatcattgacaaatacggagttttaccccatcagcttattgacgttaaaggcttaatgggagattcgtcagataatatacccggcgttccgggagtgggtgagaaaacggcgttaagccttatttcagcctacggtacactggaaggtgtttacgagcatattgatgaaataaaacagcctaagctgaaagcatcgctgattgaatataaggatcaggcgtttttaagccgtaagctgggtactattgtaagaaatctggagctgtgtgcttcgctggaggatctgaaaagaaaagaaataaaccgcaaagagcttttgaatgttttcagaaaactcgaatttgaaagtatcatatcaaaaatgaatcttgcttccgctgaggtgacagaattacctcccgcgccggaagagcttaaaataacccatatttcagcggcagaggatcttaagaaatggattgcttacctgcttaaccagaaaaacatttccgtccttcaactgattgaccgggaggattcatacagttcccgtctttcagggctggctttgtgcaccggggatgaggttttttatatcgagaccgggactgcactccccgagaatttgattgcaacagagctgaaagaactgtggcagaatgaaaatattcacaaaatcggacacaatataaaagaatttataacctggctgctgaaacacgatgttgaactgaacggcctttatttcgacactatgattgccgaatacctgatagattccataagaaacggctatcctatagcaagcctttctcacaaatacctgaatcgcagcgttccgtcgctggacgaacttttgggcaagggaaagggagcaaaaaagtactctgaaattccgcccgaaaggctgaaagattacagcgcttataacgtcaaagccatttttgacatatggccgatgcagaaaaaagttcttcaggaaaaccggcaggaggagctttttaatgacatagagcttcctcttataaccgtacttgccagtatggaataccacggtttcaaagttgacgccgcaaaacttcacgaatacggcgaagttcttctgtcacgcataaaagacctggaaaaggtaatttacatgctggccggtgaagaattcaacatcaattcaacgaagcagcttggtaccatattattcgaaaaactgaagcttcccgttgtaaaaagtacaaagaccggatactccaccgacgtcgaggttcttgaagagctttattacaagcatgatataataccatgcataatagaataccgccagcttacaaaactttacaccacctacgccgaaggtcttgaaaaagtgataaatcctgtaaccggtaaaattcattcaagttttaaccagacggttacggctacaggccgcatcagcagtaccgaaccaaatttacagaatatcccagtcagacacgaaatgggaagggaaatacggaaagcttttattccgtcgtcggaaaacgctgtttttgttgatgccgattattcacagatagagcttcgcgtgcttgcccatataacaggcgatgaagccctgataaatgctttcgttaagggggaagatattcatacggccacggcgtcgctggtatttgacgtagctcccgaagatgtgacgccggaactgcgcagaaaggcaaaagccgtaaatttcggcatagtgtacgggatcagtgattacgggctggcacgggatttgggaattacccggaaggaagcaaagcggtatatagacgactattttgccaaataccccaaagtaaaaacctatgtggatgaaattgtgcgggtcggccaggaacaggggtatgtggaaactctgttccacagaagaagataccttcccgagcttgcatctaaaaattttcaccagcgttgtttcggaaaaagggttgcaatgaatacgcccatacagggcactgcagccgatattattaaaattgcgatggtgaaggtatacaaggctttgaaagaatccggccttaaatccaggcttatcctccaggtccatgacgaacttgttattgagacttttgaagacgaactggagactgtcaaggaacttgtcaaaaagtgcatggaagaggccgttgaattgagtgtgccgcttgttgtcgacgtttcaatcgggaaaaactggtatgaagcctcctgatatggatcc

SEQ ID NO: 392 - DNA, 2772 bp, Artificial Sequence
  Description of Artificial Sequence: Synthetic Clostridium stercorarium DNA Polymerase S829E
atgaaatacctgctgccgaccgctgctgctggtctgctgctcctcgctgcccagccggcgatggccatggatccaaaaataatccttatagacggaaacagtattttaaaccgcggtttttatgccctgtcggggcgatccatgctgactacgtccacaggtctgtataccaatgcggttttcgcttttgtaaatatattgaacaaatatatcgaagaggaaaaccctgattatattgccgttgctttcgatcttagggcaaaaactttccggcacggtctatatgagggatacaaagcgcagcggaaaggcatgcccgatgaacttgcaatgcagatacccctcgcgaaggaagtactgagggcgatgaatattgccataatagagcatgaaggttatgaagccgacgatataatcggcagcctttcgttaaaggccgaaaaagagaattttgacgtaataatccttacgggggacagggattctttccagctgatcagcgacagggtgaaagttatcctgccttcgacgaaagccggaaaaacagagaccaacgtatatgataaacaggccatcattgacaaatacggagttttaccccatcagcttattgacgttaaaggcttaatgggagattcgtcagataatatacccggcgttccgggagtgggtgagaaaacggcgttaagccttatttcagcctacggtacactggaaggtgtttacgagcatattgatgaaataaaacagcctaagctgaaagcatcgctgattgaatataaggatcaggcgtttttaagccgtaagctgggtactattgtaagaaatctggagctgtgtgcttcgctggaggatctgaaaagaaaagaaataaaccgcaaagagcttttgaatgttttcagaaaactcgaatttgaaagtatcatatcaaaaatgaatcttgcttccgctgaggtgacagaattacctcccgcgccggaagagcttaaaataacccatatttcagcggcagaggatcttaagaaatggattgcttacctgcttaaccagaaaaacatttccgtccttcaactgattgaccgggaggattcatacagttcccgtctttcagggctggctttgtgcaccggggatgaggttttttatatcgagaccgggactgcactccccgagaatttgattgcaacagagctgaaagaactgtggcagaatgaaaatattcacaaaatcggacacaatataaaagaatttataacctggctgctgaaacacgatgttgaactgaacggcctttatttcgacactatgattgccgaatacctgatagattccataagaaacggctatcctatagcaagcctttctcacaaatacctgaatcgcagcgttccgtcgctggacgaacttttgggcaagggaaagggagcaaaaaagtactctgaaattccgcccgaaaggctgaaagattacagcgcttataacgtcaaagccatttttgacatatggccgatgcagaaaaaagttcttcaggaaaaccggcaggaggagctttttaatgacatagagcttcctcttataaccgtacttgccagtatggaataccacggtttcaaagttgacgccgcaaaacttcacgaatacggcgaagttcttctgtcacgcataaaagacctggaaaaggtaatttacatgctggccggtgaagaattcaacatcaattcaacgaagcagcttggtaccatattattcgaaaaactgaagcttcccgttgtaaaaagtacaaagaccggatactccaccgacgtcgaggttcttgaagagctttattacaagcatgatataataccatgcataatagaataccgccagcttacaaaactttacaccacctacgccgaaggtcttgaaaaagtgataaatcctgtaaccggtaaaattcattcaagttttaaccagacggttacggctacaggccgcatcagcagtaccgaaccaaatttacagaatatcccagtcagacacgaaatgggaagggaaatacggaaagcttttattccgtcgtcggaaaacgctgtttttgttgatgccgattattcacagatagagcttcgcgtgcttgcccatataacaggcgatgaagccctgataaatgctttcgttaagggggaagatattcatacggccacggcgtcgctggtatttgacgtagctcccgaagatgtgacgccggaactgcgcagaaaggcaaaagccgtaaatttcggcatagtgtacgggatcagtgattacgggctggcacgggatttgggaattacccggaaggaagcaaagcggtatatagacgactattttgccaaataccccaaagtaaaaacctatgtggatgaaattgtgcgggtcggccaggaacaggggtatgtggaaactctgttccacagaagaagataccttcccgagcttgcatctaaaaattttcaccagcgtgaattcggaaaaagggttgcaatgaatacgcccatacagggcactgcagccgatattattaaaattgcgatggtgaaggtatacaaggctttgaaagaatccggccttaaatccaggcttatcctccaggtccatgacgaacttgttattgagacttttgaagacgaactggagactgtcaaggaacttgtcaaaaagtgcatggaagaggccgttgaattgagtgtgccgcttgttgtcgacgtttcaatcgggaaaaactggtatgaagcctcctgatatggatcc

SEQ ID NO: 393 - DNA, 2772 bp, Artificial Sequence
  Description of Artificial Sequence: Synthetic Clostridium stercorarium DNA Polymerase S829Q
atgaaatacctgctgccgaccgctgctgctggtctgctgctcctcgctgcccagccggcgatggccatggatccaaaaataatccttatagacggaaacagtattttaaaccgcggtttttatgccctgtcggggcgatccatgctgactacgtccacaggtctgtataccaatgcggttttcgcttttgtaaatatattgaacaaatatatcgaagaggaaaaccctgattatattgccgttgctttcgatcttagggcaaaaactttccggcacggtctatatgagggatacaaagcgcagcggaaaggcatgcccgatgaacttgcaatgcagatacccctcgcgaaggaagtactgagggcgatgaatattgccataatagagcatgaaggttatgaagccgacgatataatcggcagcctttcgttaaaggccgaaaaagagaattttgacgtaataatccttacgggggacagggattctttccagctgatcagcgacagggtgaaagttatcctgccttcgacgaaagccggaaaaacagagaccaacgtatatgataaacaggccatcattgacaaatacggagttttaccccatcagcttattgacgttaaaggcttaatgggagattcgtcagataatatacccggcgttccgggagtgggtgagaaaacggcgttaagccttatttcagcctacggtacactggaaggtgtttacgagcatattgatgaaataaaacagcctaagctgaaagcatcgctgattgaatataaggatcaggcgtttttaagccgtaagctgggtactattgtaagaaatctggagctgtgtgcttcgctggaggatctgaaaagaaaagaaataaaccgcaaagagcttttgaatgttttcagaaaactcgaatttgaaagtatcatatcaaaaatgaatcttgcttccgctgaggtgacagaattacctcccgcgccggaagagcttaaaataacccatatttcagcggcagaggatcttaagaaatggattgcttacctgcttaaccagaaaaacatttccgtccttcaactgattgaccgggaggattcatacagttcccgtctttcagggctggctttgtgcaccggggatgaggttttttatatcgagaccgggactgcactccccgagaatttgattgcaacagagctgaaagaactgtggcagaatgaaaatattcacaaaatcggacacaatataaaagaatttataacctggctgctgaaacacgatgttgaactgaacggcctttatttcgacactatgattgccgaatacctgatagattccataagaaacggctatcctatagcaagcctttctcacaaatacctgaatcgcagcgttccgtcgctggacgaacttttgggcaagggaaagggagcaaaaaagtactctgaaattccgcccgaaaggctgaaagattacagcgcttataacgtcaaagccatttttgacatatggccgatgcagaaaaaagttcttcaggaaaaccggcaggaggagctttttaatgacatagagcttcctcttataaccgtacttgccagtatggaataccacggtttcaaagttgacgccgcaaaacttcacgaatacggcgaagttcttctgtcacgcataaaagacctggaaaaggtaatttacatgctggccggtgaagaattcaacatcaattcaacgaagcagcttggtaccatattattcgaaaaactgaagcttcccgttgtaaaaagtacaaagaccggatactccaccgacgtcgaggttcttgaagagctttattacaagcatgatataataccatgcataatagaataccgccagcttacaaaactttacaccacctacgccgaaggtcttgaaaaagtgataaatcctgtaaccggtaaaattcattcaagttttaaccagacggttacggctacaggccgcatcagcagtaccgaaccaaatttacagaatatcccagtcagacacgaaatgggaagggaaatacggaaagcttttattccgtcgtcggaaaacgctgtttttgttgatgccgattattcacagatagagcttcgcgtgcttgcccatataacaggcgatgaagccctgataaatgctttcgttaagggggaagatattcatacggccacggcgtcgctggtatttgacgtagctcccgaagatgtgacgccggaactgcgcagaaaggcaaaagccgtaaatttcggcatagtgtacgggatcagtgattacgggctggcacgggatttgggaattacccggaaggaagcaaagcggtatatagacgactattttgccaaataccccaaagtaaaaacctatgtggatgaaattgtgcgggtcggccaggaacaggggtatgtggaaactctgttccacagaagaagataccttcccgagcttgcatctaaaaattttcaccagcgtcaattcggaaaaagggttgcaatgaatacgcccatacagggcactgcagccgatattattaaaattgcgatggtgaaggtatacaaggctttgaaagaatccggccttaaatccaggcttatcctccaggtccatgacgaacttgttattgagacttttgaagacgaactggagactgtcaaggaacttgtcaaaaagtgcatggaagaggccgttgaattgagtgtgccgcttgttgtcgacgtttcaatcgggaaaaactggtatgaagcctcctgatatggatcc

SEQ ID NO: 394 - DNA, 2772 bp, Artificial Sequence
  Description of Artificial Sequence: Synthetic Clostridium stercorarium DNA Polymerase S829G
atgaaatacctgctgccgaccgctgctgctggtctgctgctcctcgctgcccagccggcgatggccatggatccaaaaataatccttatagacggaaacagtattttaaaccgcggtttttatgccctgtcggggcgatccatgctgactacgtccacaggtctgtataccaatgcggttttcgcttttgtaaatatattgaacaaatatatcgaagaggaaaaccctgattatattgccgttgctttcgatcttagggcaaaaactttccggcacggtctatatgagggatacaaagcgcagcggaaaggcatgcccgatgaacttgcaatgcagatacccctcgcgaaggaagtactgagggcgatgaatattgccataatagagcatgaaggttatgaagccgacgatataatcggcagcctttcgttaaaggccgaaaaagagaattttgacgtaataatccttacgggggacagggattctttccagctgatcagcgacagggtgaaagttatcctgccttcgacgaaagccggaaaaacagagaccaacgtatatgataaacaggccatcattgacaaatacggagttttaccccatcagcttattgacgttaaaggcttaatgggagattcgtcagataatatacccggcgttccgggagtgggtgagaaaacggcgttaagccttatttcagcctacggtacactggaaggtgtttacgagcatattgatgaaataaaacagcctaagctgaaagcatcgctgattgaatataaggatcaggcgtttttaagccgtaagctgggtactattgtaagaaatctggagctgtgtgcttcgctggaggatctgaaaagaaaagaaataaaccgcaaagagcttttgaatgttttcagaaaactcgaatttgaaagtatcatatcaaaaatgaatcttgcttccgctgaggtgacagaattacctcccgcgccggaagagcttaaaataacccatatttcagcggcagaggatcttaagaaatggattgcttacctgcttaaccagaaaaacatttccgtccttcaactgattgaccgggaggattcatacagttcccgtctttcagggctggctttgtgcaccggggatgaggttttttatatcgagaccgggactgcactccccgagaatttgattgcaacagagctgaaagaactgtggcagaatgaaaatattcacaaaatcggacacaatataaaagaatttataacctggctgctgaaacacgatgttgaactgaacggcctttatttcgacactatgattgccgaatacctgatagattccataagaaacggctatcctatagcaagcctttctcacaaatacctgaatcgcagcgttccgtcgctggacgaacttttgggcaagggaaagggagcaaaaaagtactctgaaattccgcccgaaaggctgaaagattacagcgcttataacgtcaaagccatttttgacatatggccgatgcagaaaaaagttcttcaggaaaaccggcaggaggagctttttaatgacatagagcttcctcttataaccgtacttgccagtatggaataccacggtttcaaagttgacgccgcaaaacttcacgaatacggcgaagttcttctgtcacgcataaaagacctggaaaaggtaatttacatgctggccggtgaagaattcaacatcaattcaacgaagcagcttggtaccatattattcgaaaaactgaagcttcccgttgtaaaaagtacaaagaccggatactccaccgacgtcgaggttcttgaagagctttattacaagcatgatataataccatgcataatagaataccgccagcttacaaaactttacaccacctacgccgaaggtcttgaaaaagtgataaatcctgtaaccggtaaaattcattcaagttttaaccagacggttacggctacaggccgcatcagcagtaccgaaccaaatttacagaatatcccagtcagacacgaaatgggaagggaaatacggaaagcttttattccgtcgtcggaaaacgctgtttttgttgatgccgattattcacagatagagcttcgcgtgcttgcccatataacaggcgatgaagccctgataaatgctttcgttaagggggaagatattcatacggccacggcgtcgctggtatttgacgtagctcccgaagatgtgacgccggaactgcgcagaaaggcaaaagccgtaaatttcggcatagtgtacgggatcagtgattacgggctggcacgggatttgggaattacccggaaggaagcaaagcggtatatagacgactattttgccaaataccccaaagtaaaaacctatgtggatgaaattgtgcgggtcggccaggaacaggggtatgtggaaactctgttccacagaagaagataccttcccgagcttgcatctaaaaattttcaccagcgtggtttcggaaaaagggttgcaatgaatacgcccatacagggcactgcagccgatattattaaaattgcgatggtgaaggtatacaaggctttgaaagaatccggccttaaatccaggcttatcctccaggtccatgacgaacttgttattgagacttttgaagacgaactggagactgtcaaggaacttgtcaaaaagtgcatggaagaggccgttgaattgagtgtgccgcttgttgtcgacgtttcaatcgggaaaaactggtatgaagcctcctgatatggatcc

SEQ ID NO: 395 - DNA, 2772 bp, Artificial Sequence
  Description of Artificial Sequence: Synthetic Clostridium stercorarium DNA Polymerase S829H
atgaaatacctgctgccgaccgctgctgctggtctgctgctcctcgctgcccagccggcgatggccatggatccaaaaataatccttatagacggaaacagtattttaaaccgcggtttttatgccctgtcggggcgatccatgctgactacgtccacaggtctgtataccaatgcggttttcgcttttgtaaatatattgaacaaatatatcgaagaggaaaaccctgattatattgccgttgctttcgatcttagggcaaaaactttccggcacggtctatatgagggatacaaagcgcagcggaaaggcatgcccgatgaacttgcaatgcagatacccctcgcgaaggaagtactgagggcgatgaatattgccataatagagcatgaaggttatgaagccgacgatataatcggcagcctttcgttaaaggccgaaaaagagaattttgacgtaataatccttacgggggacagggattctttccagctgatcagcgacagggtgaaagttatcctgccttcgacgaaagccggaaaaacagagaccaacgtatatgataaacaggccatcattgacaaatacggagttttaccccatcagcttattgacgttaaaggcttaatgggagattcgtcagataatatacccggcgttccgggagtgggtgagaaaacggcgttaagccttatttcagcctacggtacactggaaggtgtttacgagcatattgatgaaataaaacagcctaagctgaaagcatcgctgattgaatataaggatcaggcgtttttaagccgtaagctgggtactattgtaagaaatctggagctgtgtgcttcgctggaggatctgaaaagaaaagaaataaaccgcaaagagcttttgaatgttttcagaaaactcgaatttgaaagtatcatatcaaaaatgaatcttgcttccgctgaggtgacagaattacctcccgcgccggaagagcttaaaataacccatatttcagcggcagaggatcttaagaaatggattgcttacctgcttaaccagaaaaacatttccgtccttcaactgattgaccgggaggattcatacagttcccgtctttcagggctggctttgtgcaccggggatgaggttttttatatcgagaccgggactgcactccccgagaatttgattgcaacagagctgaaagaactgtggcagaatgaaaatattcacaaaatcggacacaatataaaagaatttataacctggctgctgaaacacgatgttgaactgaacggcctttatttcgacactatgattgccgaatacctgatagattccataagaaacggctatcctatagcaagcctttctcacaaatacctgaatcgcagcgttccgtcgctggacgaacttttgggcaagggaaagggagcaaaaaagtactctgaaattccgcccgaaaggctgaaagattacagcgcttataacgtcaaagccatttttgacatatggccgatgcagaaaaaagttcttcaggaaaaccggcaggaggagctttttaatgacatagagcttcctcttataaccgtacttgccagtatggaataccacggtttcaaagttgacgccgcaaaacttcacgaatacggcgaagttcttctgtcacgcataaaagacctggaaaaggtaatttacatgctggccggtgaagaattcaacatcaattcaacgaagcagcttggtaccatattattcgaaaaactgaagcttcccgttgtaaaaagtacaaagaccggatactccaccgacgtcgaggttcttgaagagctttattacaagcatgatataataccatgcataatagaataccgccagcttacaaaactttacaccacctacgccgaaggtcttgaaaaagtgataaatcctgtaaccggtaaaattcattcaagttttaaccagacggttacggctacaggccgcatcagcagtaccgaaccaaatttacagaatatcccagtcagacacgaaatgggaagggaaatacggaaagcttttattccgtcgtcggaaaacgctgtttttgttgatgccgattattcacagatagagcttcgcgtgcttgcccatataacaggcgatgaagccctgataaatgctttcgttaagggggaagatattcatacggccacggcgtcgctggtatttgacgtagctcccgaagatgtgacgccggaactgcgcagaaaggcaaaagccgtaaatttcggcatagtgtacgggatcagtgattacgggctggcacgggatttgggaattacccggaaggaagcaaagcggtatatagacgactattttgccaaataccccaaagtaaaaacctatgtggatgaaattgtgcgggtcggccaggaacaggggtatgtggaaactctgttccacagaagaagataccttcccgagcttgcatctaaaaattttcaccagcgtcatttcggaaaaagggttgcaatgaatacgcccatacagggcactgcagccgatattattaaaattgcgatggtgaaggtatacaaggctttgaaagaatccggccttaaatccaggcttatcctccaggtccatgacgaacttgttattgagacttttgaagacgaactggagactgtcaaggaacttgtcaaaaagtgcatggaagaggccgttgaattgagtgtgccgcttgttgtcgacgtttcaatcgggaaaaactggtatgaagcctcctgatatggatcc

SEQ ID NO: 396 - DNA, 2772 bp, Artificial Sequence
  Description of Artificial Sequence: Synthetic Clostridium stercorarium DNA Polymerase S829I
atgaaatacctgctgccgaccgctgctgctggtctgctgctcctcgctgcccagccggcgatggccatggatccaaaaataatccttatagacggaaacagtattttaaaccgcggtttttatgccctgtcggggcgatccatgctgactacgtccacaggtctgtataccaatgcggttttcgcttttgtaaatatattgaacaaatatatcgaagaggaaaaccctgattatattgccgttgctttcgatcttagggcaaaaactttccggcacggtctatatgagggatacaaagcgcagcggaaaggcatgcccgatgaacttgcaatgcagatacccctcgcgaaggaagtactgagggcgatgaatattgccataatagagcatgaaggttatgaagccgacgatataatcggcagcctttcgttaaaggccgaaaaagagaattttgacgtaataatccttacgggggacagggattctttccagctgatcagcgacagggtgaaagttatcctgccttcgacgaaagccggaaaaacagagaccaacgtatatgataaacaggccatcattgacaaatacggagttttaccccatcagcttattgacgttaaaggcttaatgggagattcgtcagataatatacccggcgttccgggagtgggtgagaaaacggcgttaagccttatttcagcctacggtacactggaaggtgtttacgagcatattgatgaaataaaacagcctaagctgaaagcatcgctgattgaatataaggatcaggcgtttttaagccgtaagctgggtactattgtaagaaatctggagctgtgtgcttcgctggaggatctgaaaagaaaagaaataaaccgcaaagagcttttgaatgttttcagaaaactcgaatttgaaagtatcatatcaaaaatgaatcttgcttccgctgaggtgacagaattacctcccgcgccggaagagcttaaaataacccatatttcagcggcagaggatcttaagaaatggattgcttacctgcttaaccagaaaaacatttccgtccttcaactgattgaccgggaggattcatacagttcccgtctttcagggctggctttgtgcaccggggatgaggttttttatatcgagaccgggactgcactccccgagaatttgattgcaacagagctgaaagaactgtggcagaatgaaaatattcacaaaatcggacacaatataaaagaatttataacctggctgctgaaacacgatgttgaactgaacggcctttatttcgacactatgattgccgaatacctgatagattccataagaaacggctatcctatagcaagcctttctcacaaatacctgaatcgcagcgttccgtcgctggacgaacttttgggcaagggaaagggagcaaaaaagtactctgaaattccgcccgaaaggctgaaagattacagcgcttataacgtcaaagccatttttgacatatggccgatgcagaaaaaagttcttcaggaaaaccggcaggaggagctttttaatgacatagagcttcctcttataaccgtacttgccagtatggaataccacggtttcaaagttgacgccgcaaaacttcacgaatacggcgaagttcttctgtcacgcataaaagacctggaaaaggtaatttacatgctggccggtgaagaattcaacatcaattcaacgaagcagcttggtaccatattattcgaaaaactgaagcttcccgttgtaaaaagtacaaagaccggatactccaccgacgtcgaggttcttgaagagctttattacaagcatgatataataccatgcataatagaataccgccagcttacaaaactttacaccacctacgccgaaggtcttgaaaaagtgataaatcctgtaaccggtaaaattcattcaagttttaaccagacggttacggctacaggccgcatcagcagtaccgaaccaaatttacagaatatcccagtcagacacgaaatgggaagggaaatacggaaagcttttattccgtcgtcggaaaacgctgtttttgttgatgccgattattcacagatagagcttcgcgtgcttgcccatataacaggcgatgaagccctgataaatgctttcgttaagggggaagatattcatacggccacggcgtcgctggtatttgacgtagctcccgaagatgtgacgccggaactgcgcagaaaggcaaaagccgtaaatttcggcatagtgtacgggatcagtgattacgggctggcacgggatttgggaattacccggaaggaagcaaagcggtatatagacgactattttgccaaataccccaaagtaaaaacctatgtggatgaaattgtgcgggtcggccaggaacaggggtatgtggaaactctgttccacagaagaagataccttcccgagcttgcatctaaaaattttcaccagcgtattttcggaaaaagggttgcaatgaatacgcccatacagggcactgcagccgatattattaaaattgcgatggtgaaggtatacaaggctttgaaagaatccggccttaaatccaggcttatcctccaggtccatgacgaacttgttattgagacttttgaagacgaactggagactgtcaaggaacttgtcaaaaagtgcatggaagaggccgttgaattgagtgtgccgcttgttgtcgacgtttcaatcgggaaaaactggtatgaagcctcctgatatggatcc

SEQ ID NO: 397 - DNA, 2772 bp, Artificial Sequence
  Description of Artificial Sequence: Synthetic Clostridium stercorarium DNA Polymerase S829L
atgaaatacctgctgccgaccgctgctgctggtctgctgctcctcgctgcccagccggcgatggccatggatccaaaaataatccttatagacggaaacagtattttaaaccgcggtttttatgccctgtcggggcgatccatgctgactacgtccacaggtctgtataccaatgcggttttcgcttttgtaaatatattgaacaaatatatcgaagaggaaaaccctgattatattgccgttgctttcgatcttagggcaaaaactttccggcacggtctatatgagggatacaaagcgcagcggaaaggcatgcccgatgaacttgcaatgcagatacccctcgcgaaggaagtactgagggcgatgaatattgccataatagagcatgaaggttatgaagccgacgatataatcggcagcctttcgttaaaggccgaaaaagagaattttgacgtaataatccttacgggggacagggattctttccagctgatcagcgacagggtgaaagttatcctgccttcgacgaaagccggaaaaacagagaccaacgtatatgataaacaggccatcattgacaaatacggagttttaccccatcagcttattgacgttaaaggcttaatgggagattcgtcagataatatacccggcgttccgggagtgggtgagaaaacggcgttaagccttatttcagcctacggtacactggaaggtgtttacgagcatattgatgaaataaaacagcctaagctgaaagcatcgctgattgaatataaggatcaggcgtttttaagccgtaagctgggtactattgtaagaaatctggagctgtgtgcttcgctggaggatctgaaaagaaaagaaataaaccgcaaagagcttttgaatgttttcagaaaactcgaatttgaaagtatcatatcaaaaatgaatcttgcttccgctgaggtgacagaattacctcccgcgccggaagagcttaaaataacccatatttcagcggcagaggatcttaagaaatggattgcttacctgcttaaccagaaaaacatttccgtccttcaactgattgaccgggaggattcatacagttcccgtctttcagggctggctttgtgcaccggggatgaggttttttatatcgagaccgggactgcactccccgagaatttgattgcaacagagctgaaagaactgtggcagaatgaaaatattcacaaaatcggacacaatataaaagaatttataacctggctgctgaaacacgatgttgaactgaacggcctttatttcgacactatgattgccgaatacctgatagattccataagaaacggctatcctatagcaagcctttctcacaaatacctgaatcgcagcgttccgtcgctggacgaacttttgggcaagggaaagggagcaaaaaagtactctgaaattccgcccgaaaggctgaaagattacagcgcttataacgtcaaagccatttttgacatatggccgatgcagaaaaaagttcttcaggaaaaccggcaggaggagctttttaatgacatagagcttcctcttataaccgtacttgccagtatggaataccacggtttcaaagttgacgccgcaaaacttcacgaatacggcgaagttcttctgtcacgcataaaagacctggaaaaggtaatttacatgctggccggtgaagaattcaacatcaattcaacgaagcagcttggtaccatattattcgaaaaactgaagcttcccgttgtaaaaagtacaaagaccggatactccaccgacgtcgaggttcttgaagagctttattacaagcatgatataataccatgcataatagaataccgccagcttacaaaactttacaccacctacgccgaaggtcttgaaaaagtgataaatcctgtaaccggtaaaattcattcaagttttaaccagacggttacggctacaggccgcatcagcagtaccgaaccaaatttacagaatatcccagtcagacacgaaatgggaagggaaatacggaaagcttttattccgtcgtcggaaaacgctgtttttgttgatgccgattattcacagatagagcttcgcgtgcttgcccatataacaggcgatgaagccctgataaatgctttcgttaagggggaagatattcatacggccacggcgtcgctggtatttgacgtagctcccgaagatgtgacgccggaactgcgcagaaaggcaaaagccgtaaatttcggcatagtgtacgggatcagtgattacgggctggcacgggatttgggaattacccggaaggaagcaaagcggtatatagacgactattttgccaaataccccaaagtaaaaacctatgtggatgaaattgtgcgggtcggccaggaacaggggtatgtggaaactctgttccacagaagaagataccttcccgagcttgcatctaaaaattttcaccagcgtcttttcggaaaaagggttgcaatgaatacgcccatacagggcactgcagccgatattattaaaattgcgatggtgaaggtatacaaggctttgaaagaatccggccttaaatccaggcttatcctccaggtccatgacgaacttgttattgagacttttgaagacgaactggagactgtcaaggaacttgtcaaaaagtgcatggaagaggccgttgaattgagtgtgccgcttgttgtcgacgtttcaatcgggaaaaactggtatgaagcctcctgatatggatcc

SEQ ID NO: 398 - DNA, 2772 bp, Artificial Sequence
  Description of Artificial Sequence: Synthetic Clostridium stercorarium DNA Polymerase S829K
atgaaatacctgctgccgaccgctgctgctggtctgctgctcctcgctgcccagccggcgatggccatggatccaaaaataatccttatagacggaaacagtattttaaaccgcggtttttatgccctgtcggggcgatccatgctgactacgtccacaggtctgtataccaatgcggttttcgcttttgtaaatatattgaacaaatatatcgaagaggaaaaccctgattatattgccgttgctttcgatcttagggcaaaaactttccggcacggtctatatgagggatacaaagcgcagcggaaaggcatgcccgatgaacttgcaatgcagatacccctcgcgaaggaagtactgagggcgatgaatattgccataatagagcatgaaggttatgaagccgacgatataatcggcagcctttcgttaaaggccgaaaaagagaattttgacgtaataatccttacgggggacagggattctttccagctgatcagcgacagggtgaaagttatcctgccttcgacgaaagccggaaaaacagagaccaacgtatatgataaacaggccatcattgacaaatacggagttttaccccatcagcttattgacgttaaaggcttaatgggagattcgtcagataatatacccggcgttccgggagtgggtgagaaaacggcgttaagccttatttcagcctacggtacactggaaggtgtttacgagcatattgatgaaataaaacagcctaagctgaaagcatcgctgattgaatataaggatcaggcgtttttaagccgtaagctgggtactattgtaagaaatctggagctgtgtgcttcgctggaggatctgaaaagaaaagaaataaaccgcaaagagcttttgaatgttttcagaaaactcgaatttgaaagtatcatatcaaaaatgaatcttgcttccgctgaggtgacagaattacctcccgcgccggaagagcttaaaataacccatatttcagcggcagaggatcttaagaaatggattgcttacctgcttaaccagaaaaacatttccgtccttcaactgattgaccgggaggattcatacagttcccgtctttcagggctggctttgtgcaccggggatgaggttttttatatcgagaccgggactgcactccccgagaatttgattgcaacagagctgaaagaactgtggcagaatgaaaatattcacaaaatcggacacaatataaaagaatttataacctggctgctgaaacacgatgttgaactgaacggcctttatttcgacactatgattgccgaatacctgatagattccataagaaacggctatcctatagcaagcctttctcacaaatacctgaatcgcagcgttccgtcgctggacgaacttttgggcaagggaaagggagcaaaaaagtactctgaaattccgcccgaaaggctgaaagattacagcgcttataacgtcaaagccatttttgacatatggccgatgcagaaaaaagttcttcaggaaaaccggcaggaggagctttttaatgacatagagcttcctcttataaccgtacttgccagtatggaataccacggtttcaaagttgacgccgcaaaacttcacgaatacggcgaagttcttctgtcacgcataaaagacctggaaaaggtaatttacatgctggccggtgaagaattcaacatcaattcaacgaagcagcttggtaccatattattcgaaaaactgaagcttcccgttgtaaaaagtacaaagaccggatactccaccgacgtcgaggttcttgaagagctttattacaagcatgatataataccatgcataatagaataccgccagcttacaaaactttacaccacctacgccgaaggtcttgaaaaagtgataaatcctgtaaccggtaaaattcattcaagttttaaccagacggttacggctacaggccgcatcagcagtaccgaaccaaatttacagaatatcccagtcagacacgaaatgggaagggaaatacggaaagcttttattccgtcgtcggaaaacgctgtttttgttgatgccgattattcacagatagagcttcgcgtgcttgcccatataacaggcgatgaagccctgataaatgctttcgttaagggggaagatattcatacggccacggcgtcgctggtatttgacgtagctcccgaagatgtgacgccggaactgcgcagaaaggcaaaagccgtaaatttcggcatagtgtacgggatcagtgattacgggctggcacgggatttgggaattacccggaaggaagcaaagcggtatatagacgactattttgccaaataccccaaagtaaaaacctatgtggatgaaattgtgcgggtcggccaggaacaggggtatgtggaaactctgttccacagaagaagataccttcccgagcttgcatctaaaaattttcaccagcgtaaattcggaaaaagggttgcaatgaatacgcccatacagggcactgcagccgatattattaaaattgcgatggtgaaggtatacaaggctttgaaagaatccggccttaaatccaggcttatcctccaggtccatgacgaacttgttattgagacttttgaagacgaactggagactgtcaaggaacttgtcaaaaagtgcatggaagaggccgttgaattgagtgtgccgcttgttgtcgacgtttcaatcgggaaaaactggtatgaagcctcctgatatggatcc

SEQ ID NO: 399 - DNA, 2772 bp, Artificial Sequence
  Description of Artificial Sequence: Synthetic Clostridium stercorarium DNA Polymerase S829M
atgaaatacctgctgccgaccgctgctgctggtctgctgctcctcgctgcccagccggcgatggccatggatccaaaaataatccttatagacggaaacagtattttaaaccgcggtttttatgccctgtcggggcgatccatgctgactacgtccacaggtctgtataccaatgcggttttcgcttttgtaaatatattgaacaaatatatcgaagaggaaaaccctgattatattgccgttgctttcgatcttagggcaaaaactttccggcacggtctatatgagggatacaaagcgcagcggaaaggcatgcccgatgaacttgcaatgcagatacccctcgcgaaggaagtactgagggcgatgaatattgccataatagagcatgaaggttatgaagccgacgatataatcggcagcctttcgttaaaggccgaaaaagagaattttgacgtaataatccttacgggggacagggattctttccagctgatcagcgacagggtgaaagttatcctgccttcgacgaaagccggaaaaacagagaccaacgtatatgataaacaggccatcattgacaaatacggagttttaccccatcagcttattgacgttaaaggcttaatgggagattcgtcagataatatacccggcgttccgggagtgggtgagaaaacggcgttaagccttatttcagcctacggtacactggaaggtgtttacgagcatattgatgaaataaaacagcctaagctgaaagcatcgctgattgaatataaggatcaggcgtttttaagccgtaagctgggtactattgtaagaaatctggagctgtgtgcttcgctggaggatctgaaaagaaaagaaataaaccgcaaagagcttttgaatgttttcagaaaactcgaatttgaaagtatcatatcaaaaatgaatcttgcttccgctgaggtgacagaattacctcccgcgccggaagagcttaaaataacccatatttcagcggcagaggatcttaagaaatggattgcttacctgcttaaccagaaaaacatttccgtccttcaactgattgaccgggaggattcatacagttcccgtctttcagggctggctttgtgcaccggggatgaggttttttatatcgagaccgggactgcactccccgagaatttgattgcaacagagctgaaagaactgtggcagaatgaaaatattcacaaaatcggacacaatataaaagaatttataacctggctgctgaaacacgatgttgaactgaacggcctttatttcgacactatgattgccgaatacctgatagattccataagaaacggctatcctatagcaagcctttctcacaaatacctgaatcgcagcgttccgtcgctggacgaacttttgggcaagggaaagggagcaaaaaagtactctgaaattccgcccgaaaggctgaaagattacagcgcttataacgtcaaagccatttttgacatatggccgatgcagaaaaaagttcttcaggaaaaccggcaggaggagctttttaatgacatagagcttcctcttataaccgtacttgccagtatggaataccacggtttcaaagttgacgccgcaaaacttcacgaatacggcgaagttcttctgtcacgcataaaagacctggaaaaggtaatttacatgctggccggtgaagaattcaacatcaattcaacgaagcagcttggtaccatattattcgaaaaactgaagcttcccgttgtaaaaagtacaaagaccggatactccaccgacgtcgaggttcttgaagagctttattacaagcatgatataataccatgcataatagaataccgccagcttacaaaactttacaccacctacgccgaaggtcttgaaaaagtgataaatcctgtaaccggtaaaattcattcaagttttaaccagacggttacggctacaggccgcatcagcagtaccgaaccaaatttacagaatatcccagtcagacacgaaatgggaagggaaatacggaaagcttttattccgtcgtcggaaaacgctgtttttgttgatgccgattattcacagatagagcttcgcgtgcttgcccatataacaggcgatgaagccctgataaatgctttcgttaagggggaagatattcatacggccacggcgtcgctggtatttgacgtagctcccgaagatgtgacgccggaactgcgcagaaaggcaaaagccgtaaatttcggcatagtgtacgggatcagtgattacgggctggcacgggatttgggaattacccggaaggaagcaaagcggtatatagacgactattttgccaaataccccaaagtaaaaacctatgtggatgaaattgtgcgggtcggccaggaacaggggtatgtggaaactctgttccacagaagaagataccttcccgagcttgcatctaaaaattttcaccagcgtatgttcggaaaaagggttgcaatgaatacgcccatacagggcactgcagccgatattattaaaattgcgatggtgaaggtatacaaggctttgaaagaatccggccttaaatccaggcttatcctccaggtccatgacgaacttgttattgagacttttgaagacgaactggagactgtcaaggaacttgtcaaaaagtgcatggaagaggccgttgaattgagtgtgccgcttgttgtcgacgtttcaatcgggaaaaactggtatgaagcctcctgatatggatcc

SEQ ID NO: 400 - DNA, 2772 bp, Artificial Sequence
  Description of Artificial Sequence: Synthetic Clostridium stercorarium DNA Polymerase S829F
atgaaatacctgctgccgaccgctgctgctggtctgctgctcctcgctgcccagccggcgatggccatggatccaaaaataatccttatagacggaaacagtattttaaaccgcggtttttatgccctgtcggggcgatccatgctgactacgtccacaggtctgtataccaatgcggttttcgcttttgtaaatatattgaacaaatatatcgaagaggaaaaccctgattatattgccgttgctttcgatcttagggcaaaaactttccggcacggtctatatgagggatacaaagcgcagcggaaaggcatgcccgatgaacttgcaatgcagatacccctcgcgaaggaagtactgagggcgatgaatattgccataatagagcatgaaggttatgaagccgacgatataatcggcagcctttcgttaaaggccgaaaaagagaattttgacgtaataatccttacgggggacagggattctttccagctgatcagcgacagggtgaaagttatcctgccttcgacgaaagccggaaaaacagagaccaacgtatatgataaacaggccatcattgacaaatacggagttttaccccatcagcttattgacgttaaaggcttaatgggagattcgtcagataatatacccggcgttccgggagtgggtgagaaaacggcgttaagccttatttcagcctacggtacactggaaggtgtttacgagcatattgatgaaataaaacagcctaagctgaaagcatcgctgattgaatataaggatcaggcgtttttaagccgtaagctgggtactattgtaagaaatctggagctgtgtgcttcgctggaggatctgaaaagaaaagaaataaaccgcaaagagcttttgaatgttttcagaaaactcgaatttgaaagtatcatatcaaaaatgaatcttgcttccgctgaggtgacagaattacctcccgcgccggaagagcttaaaataacccatatttcagcggcagaggatcttaagaaatggattgcttacctgcttaaccagaaaaacatttccgtccttcaactgattgaccgggaggattcatacagttcccgtctttcagggctggctttgtgcaccggggatgaggttttttatatcgagaccgggactgcactccccgagaatttgattgcaacagagctgaaagaactgtggcagaatgaaaatattcacaaaatcggacacaatataaaagaatttataacctggctgctgaaacacgatgttgaactgaacggcctttatttcgacactatgattgccgaatacctgatagattccataagaaacggctatcctatagcaagcctttctcacaaatacctgaatcgcagcgttccgtcgctggacgaacttttgggcaagggaaagggagcaaaaaagtactctgaaattccgcccgaaaggctgaaagattacagcgcttataacgtcaaagccatttttgacatatggccgatgcagaaaaaagttcttcaggaaaaccggcaggaggagctttttaatgacatagagcttcctcttataaccgtacttgccagtatggaataccacggtttcaaagttgacgccgcaaaacttcacgaatacggcgaagttcttctgtcacgcataaaagacctggaaaaggtaatttacatgctggccggtgaagaattcaacatcaattcaacgaagcagcttggtaccatattattcgaaaaactgaagcttcccgttgtaaaaagtacaaagaccggatactccaccgacgtcgaggttcttgaagagctttattacaagcatgatataataccatgcataatagaataccgccagcttacaaaactttacaccacctacgccgaaggtcttgaaaaagtgataaatcctgtaaccggtaaaattcattcaagttttaaccagacggttacggctacaggccgcatcagcagtaccgaaccaaatttacagaatatcccagtcagacacgaaatgggaagggaaatacggaaagcttttattccgtcgtcggaaaacgctgtttttgttgatgccgattattcacagatagagcttcgcgtgcttgcccatataacaggcgatgaagccctgataaatgctttcgttaagggggaagatattcatacggccacggcgtcgctggtatttgacgtagctcccgaagatgtgacgccggaactgcgcagaaaggcaaaagccgtaaatttcggcatagtgtacgggatcagtgattacgggctggcacgggatttgggaattacccggaaggaagcaaagcggtatatagacgactattttgccaaataccccaaagtaaaaacctatgtggatgaaattgtgcgggtcggccaggaacaggggtatgtggaaactctgttccacagaagaagataccttcccgagcttgcatctaaaaattttcaccagcgttttttcggaaaaagggttgcaatgaatacgcccatacagggcactgcagccgatattattaaaattgcgatggtgaaggtatacaaggctttgaaagaatccggccttaaatccaggcttatcctccaggtccatgacgaacttgttattgagacttttgaagacgaactggagactgtcaaggaacttgtcaaaaagtgcatggaagaggccgttgaattgagtgtgccgcttgttgtcgacgtttcaatcgggaaaaactggtatgaagcctcctgatatggatcc

SEQ ID NO: 401 - DNA, 2772 bp, Artificial Sequence
  Description of Artificial Sequence: Synthetic Clostridium stercorarium DNA Polymerase S829P
atgaaatacctgctgccgaccgctgctgctggtctgctgctcctcgctgcccagccggcgatggccatggatccaaaaataatccttatagacggaaacagtattttaaaccgcggtttttatgccctgtcggggcgatccatgctgactacgtccacaggtctgtataccaatgcggttttcgcttttgtaaatatattgaacaaatatatcgaagaggaaaaccctgattatattgccgttgctttcgatcttagggcaaaaactttccggcacggtctatatgagggatacaaagcgcagcggaaaggcatgcccgatgaacttgcaatgcagatacccctcgcgaaggaagtactgagggcgatgaatattgccataatagagcatgaaggttatgaagccgacgatataatcggcagcctttcgttaaaggccgaaaaagagaattttgacgtaataatccttacgggggacagggattctttccagctgatcagcgacagggtgaaagttatcctgccttcgacgaaagccggaaaaacagagaccaacgtatatgataaacaggccatcattgacaaatacggagttttaccccatcagcttattgacgttaaaggcttaatgggagattcgtcagataatatacccggcgttccgggagtgggtgagaaaacggcgttaagccttatttcagcctacggtacactggaaggtgtttacgagcatattgatgaaataaaacagcctaagctgaaagcatcgctgattgaatataaggatcaggcgtttttaagccgtaagctgggtactattgtaagaaatctggagctgtgtgcttcgctggaggatctgaaaagaaaagaaataaaccgcaaagagcttttgaatgttttcagaaaactcgaatttgaaagtatcatatcaaaaatgaatcttgcttccgctgaggtgacagaattacctcccgcgccggaagagcttaaaataacccatatttcagcggcagaggatcttaagaaatggattgcttacctgcttaaccagaaaaacatttccgtccttcaactgattgaccgggaggattcatacagttcccgtctttcagggctggctttgtgcaccggggatgaggttttttatatcgagaccgggactgcactccccgagaatttgattgcaacagagctgaaagaactgtggcagaatgaaaatattcacaaaatcggacacaatataaaagaatttataacctggctgctgaaacacgatgttgaactgaacggcctttatttcgacactatgattgccgaatacctgatagattccataagaaacggctatcctatagcaagcctttctcacaaatacctgaatcgcagcgttccgtcgctggacgaacttttgggcaagggaaagggagcaaaaaagtactctgaaattccgcccgaaaggctgaaagattacagcgcttataacgtcaaagccatttttgacatatggccgatgcagaaaaaagttcttcaggaaaaccggcaggaggagctttttaatgacatagagcttcctcttataaccgtacttgccagtatggaataccacggtttcaaagttgacgccgcaaaacttcacgaatacggcgaagttcttctgtcacgcataaaagacctggaaaaggtaatttacatgctggccggtgaagaattcaacatcaattcaacgaagcagcttggtaccatattattcgaaaaactgaagcttcccgttgtaaaaagtacaaagaccggatactccaccgacgtcgaggttcttgaagagctttattacaagcatgatataataccatgcataatagaataccgccagcttacaaaactttacaccacctacgccgaaggtcttgaaaaagtgataaatcctgtaaccggtaaaattcattcaagttttaaccagacggttacggctacaggccgcatcagcagtaccgaaccaaatttacagaatatcccagtcagacacgaaatgggaagggaaatacggaaagcttttattccgtcgtcggaaaacgctgtttttgttgatgccgattattcacagatagagcttcgcgtgcttgcccatataacaggcgatgaagccctgataaatgctttcgttaagggggaagatattcatacggccacggcgtcgctggtatttgacgtagctcccgaagatgtgacgccggaactgcgcagaaaggcaaaagccgtaaatttcggcatagtgtacgggatcagtgattacgggctggcacgggatttgggaattacccggaaggaagcaaagcggtatatagacgactattttgccaaataccccaaagtaaaaacctatgtggatgaaattgtgcgggtcggccaggaacaggggtatgtggaaactctgttccacagaagaagataccttcccgagcttgcatctaaaaattttcaccagcgtcctttcggaaaaagggttgcaatgaatacgcccatacagggcactgcagccgatattattaaaattgcgatggtgaaggtatacaaggctttgaaagaatccggccttaaatccaggcttatcctccaggtccatgacgaacttgttattgagacttttgaagacgaactggagactgtcaaggaacttgtcaaaaagtgcatggaagaggccgttgaattgagtgtgccgcttgttgtcgacgtttcaatcgggaaaaactggtatgaagcctcctgatatggatcc

SEQ ID NO: 402 - DNA, 2772 bp, Artificial Sequence
  Description of Artificial Sequence: Synthetic Clostridium stercorarium DNA Polymerase S829T
atgaaatacctgctgccgaccgctgctgctggtctgctgctcctcgctgcccagccggcgatggccatggatccaaaaataatccttatagacggaaacagtattttaaaccgcggtttttatgccctgtcggggcgatccatgctgactacgtccacaggtctgtataccaatgcggttttcgcttttgtaaatatattgaacaaatatatcgaagaggaaaaccctgattatattgccgttgctttcgatcttagggcaaaaactttccggcacggtctatatgagggatacaaagcgcagcggaaaggcatgcccgatgaacttgcaatgcagatacccctcgcgaaggaagtactgagggcgatgaatattgccataatagagcatgaaggttatgaagccgacgatataatcggcagcctttcgttaaaggccgaaaaagagaattttgacgtaataatccttacgggggacagggattctttccagctgatcagcgacagggtgaaagttatcctgccttcgacgaaagccggaaaaacagagaccaacgtatatgataaacaggccatcattgacaaatacggagttttaccccatcagcttattgacgttaaaggcttaatgggagattcgtcagataatatacccggcgttccgggagtgggtgagaaaacggcgttaagccttatttcagcctacggtacactggaaggtgtttacgagcatattgatgaaataaaacagcctaagctgaaagcatcgctgattgaatataaggatcaggcgtttttaagccgtaagctgggtactattgtaagaaatctggagctgtgtgcttcgctggaggatctgaaaagaaaagaaataaaccgcaaagagcttttgaatgttttcagaaaactcgaatttgaaagtatcatatcaaaaatgaatcttgcttccgctgaggtgacagaattacctcccgcgccggaagagcttaaaataacccatatttcagcggcagaggatcttaagaaatggattgcttacctgcttaaccagaaaaacatttccgtccttcaactgattgaccgggaggattcatacagttcccgtctttcagggctggctttgtgcaccggggatgaggttttttatatcgagaccgggactgcactccccgagaatttgattgcaacagagctgaaagaactgtggcagaatgaaaatattcacaaaatcggacacaatataaaagaatttataacctggctgctgaaacacgatgttgaactgaacggcctttatttcgacactatgattgccgaatacctgatagattccataagaaacggctatcctatagcaagcctttctcacaaatacctgaatcgcagcgttccgtcgctggacgaacttttgggcaagggaaagggagcaaaaaagtactctgaaattccgcccgaaaggctgaaagattacagcgcttataacgtcaaagccatttttgacatatggccgatgcagaaaaaagttcttcaggaaaaccggcaggaggagctttttaatgacatagagcttcctcttataaccgtacttgccagtatggaataccacggtttcaaagttgacgccgcaaaacttcacgaatacggcgaagttcttctgtcacgcataaaagacctggaaaaggtaatttacatgctggccggtgaagaattcaacatcaattcaacgaagcagcttggtaccatattattcgaaaaactgaagcttcccgttgtaaaaagtacaaagaccggatactccaccgacgtcgaggttcttgaagagctttattacaagcatgatataataccatgcataatagaataccgccagcttacaaaactttacaccacctacgccgaaggtcttgaaaaagtgataaatcctgtaaccggtaaaattcattcaagttttaaccagacggttacggctacaggccgcatcagcagtaccgaaccaaatttacagaatatcccagtcagacacgaaatgggaagggaaatacggaaagcttttattccgtcgtcggaaaacgctgtttttgttgatgccgattattcacagatagagcttcgcgtgcttgcccatataacaggcgatgaagccctgataaatgctttcgttaagggggaagatattcatacggccacggcgtcgctggtatttgacgtagctcccgaagatgtgacgccggaactgcgcagaaaggcaaaagccgtaaatttcggcatagtgtacgggatcagtgattacgggctggcacgggatttgggaattacccggaaggaagcaaagcggtatatagacgactattttgccaaataccccaaagtaaaaacctatgtggatgaaattgtgcgggtcggccaggaacaggggtatgtggaaactctgttccacagaagaagataccttcccgagcttgcatctaaaaattttcaccagcgtactttcggaaaaagggttgcaatgaatacgcccatacagggcactgcagccgatattattaaaattgcgatggtgaaggtatacaaggctttgaaagaatccggccttaaatccaggcttatcctccaggtccatgacgaacttgttattgagacttttgaagacgaactggagactgtcaaggaacttgtcaaaaagtgcatggaagaggccgttgaattgagtgtgccgcttgttgtcgacgtttcaatcgggaaaaactggtatgaagcctcctgatatggatcc

SEQ ID NO: 403 - DNA, 2772 bp, Artificial Sequence
  Description of Artificial Sequence: Synthetic Clostridium stercorarium DNA Polymerase S829W
atgaaatacctgctgccgaccgctgctgctggtctgctgctcctcgctgcccagccggcgatggccatggatccaaaaataatccttatagacggaaacagtattttaaaccgcggtttttatgccctgtcggggcgatccatgctgactacgtccacaggtctgtataccaatgcggttttcgcttttgtaaatatattgaacaaatatatcgaagaggaaaaccctgattatattgccgttgctttcgatcttagggcaaaaactttccggcacggtctatatgagggatacaaagcgcagcggaaaggcatgcccgatgaacttgcaatgcagatacccctcgcgaaggaagtactgagggcgatgaatattgccataatagagcatgaaggttatgaagccgacgatataatcggcagcctttcgttaaaggccgaaaaagagaattttgacgtaataatccttacgggggacagggattctttccagctgatcagcgacagggtgaaagttatcctgccttcgacgaaagccggaaaaacagagaccaacgtatatgataaacaggccatcattgacaaatacggagttttaccccatcagcttattgacgttaaaggcttaatgggagattcgtcagataatatacccggcgttccgggagtgggtgagaaaacggcgttaagccttatttcagcctacggtacactggaaggtgtttacgagcatattgatgaaataaaacagcctaagctgaaagcatcgctgattgaatataaggatcaggcgtttttaagccgtaagctgggtactattgtaagaaatctggagctgtgtgcttcgctggaggatctgaaaagaaaagaaataaaccgcaaagagcttttgaatgttttcagaaaactcgaatttgaaagtatcatatcaaaaatgaatcttgcttccgctgaggtgacagaattacctcccgcgccggaagagcttaaaataacccatatttcagcggcagaggatcttaagaaatggattgcttacctgcttaaccagaaaaacatttccgtccttcaactgattgaccgggaggattcatacagttcccgtctttcagggctggctttgtgcaccggggatgaggttttttatatcgagaccgggactgcactccccgagaatttgattgcaacagagctgaaagaactgtggcagaatgaaaatattcacaaaatcggacacaatataaaagaatttataacctggctgctgaaacacgatgttgaactgaacggcctttatttcgacactatgattgccgaatacctgatagattccataagaaacggctatcctatagcaagcctttctcacaaatacctgaatcgcagcgttccgtcgctggacgaacttttgggcaagggaaagggagcaaaaaagtactctgaaattccgcccgaaaggctgaaagattacagcgcttataacgtcaaagccatttttgacatatggccgatgcagaaaaaagttcttcaggaaaaccggcaggaggagctttttaatgacatagagcttcctcttataaccgtacttgccagtatggaataccacggtttcaaagttgacgccgcaaaacttcacgaatacggcgaagttcttctgtcacgcataaaagacctggaaaaggtaatttacatgctggccggtgaagaattcaacatcaattcaacgaagcagcttggtaccatattattcgaaaaactgaagcttcccgttgtaaaaagtacaaagaccggatactccaccgacgtcgaggttcttgaagagctttattacaagcatgatataataccatgcataatagaataccgccagcttacaaaactttacaccacctacgccgaaggtcttgaaaaagtgataaatcctgtaaccggtaaaattcattcaagttttaaccagacggttacggctacaggccgcatcagcagtaccgaaccaaatttacagaatatcccagtcagacacgaaatgggaagggaaatacggaaagcttttattccgtcgtcggaaaacgctgtttttgttgatgccgattattcacagatagagcttcgcgtgcttgcccatataacaggcgatgaagccctgataaatgctttcgttaagggggaagatattcatacggccacggcgtcgctggtatttgacgtagctcccgaagatgtgacgccggaactgcgcagaaaggcaaaagccgtaaatttcggcatagtgtacgggatcagtgattacgggctggcacgggatttgggaattacccggaaggaagcaaagcggtatatagacgactattttgccaaataccccaaagtaaaaacctatgtggatgaaattgtgcgggtcggccaggaacaggggtatgtggaaactctgttccacagaagaagataccttcccgagcttgcatctaaaaattttcaccagcgttggttcggaaaaagggttgcaatgaatacgcccatacagggcactgcagccgatattattaaaattgcgatggtgaaggtatacaaggctttgaaagaatccggccttaaatccaggcttatcctccaggtccatgacgaacttgttattgagacttttgaagacgaactggagactgtcaaggaacttgtcaaaaagtgcatggaagaggccgttgaattgagtgtgccgcttgttgtcgacgtttcaatcgggaaaaactggtatgaagcctcctgatatggatcc

SEQ ID NO: 404 - DNA, 2772 bp, Artificial Sequence
  Description of Artificial Sequence: Synthetic Clostridium stercorarium DNA Polymerase S829Y
atgaaatacctgctgccgaccgctgctgctggtctgctgctcctcgctgcccagccggcgatggccatggatccaaaaataatccttatagacggaaacagtattttaaaccgcggtttttatgccctgtcggggcgatccatgctgactacgtccacaggtctgtataccaatgcggttttcgcttttgtaaatatattgaacaaatatatcgaagaggaaaaccctgattatattgccgttgctttcgatcttagggcaaaaactttccggcacggtctatatgagggatacaaagcgcagcggaaaggcatgcccgatgaacttgcaatgcagatacccctcgcgaaggaagtactgagggcgatgaatattgccataatagagcatgaaggttatgaagccgacgatataatcggcagcctttcgttaaaggccgaaaaagagaattttgacgtaataatccttacgggggacagggattctttccagctgatcagcgacagggtgaaagttatcctgccttcgacgaaagccggaaaaacagagaccaacgtatatgataaacaggccatcattgacaaatacggagttttaccccatcagcttattgacgttaaaggcttaatgggagattcgtcagataatatacccggcgttccgggagtgggtgagaaaacggcgttaagccttatttcagcctacggtacactggaaggtgtttacgagcatattgatgaaataaaacagcctaagctgaaagcatcgctgattgaatataaggatcaggcgtttttaagccgtaagctgggtactattgtaagaaatctggagctgtgtgcttcgctggaggatctgaaaagaaaagaaataaaccgcaaagagcttttgaatgttttcagaaaactcgaatttgaaagtatcatatcaaaaatgaatcttgcttccgctgaggtgacagaattacctcccgcgccggaagagcttaaaataacccatatttcagcggcagaggatcttaagaaatggattgcttacctgcttaaccagaaaaacatttccgtccttcaactgattgaccgggaggattcatacagttcccgtctttcagggctggctttgtgcaccggggatgaggttttttatatcgagaccgggactgcactccccgagaatttgattgcaacagagctgaaagaactgtggcagaatgaaaatattcacaaaatcggacacaatataaaagaatttataacctggctgctgaaacacgatgttgaactgaacggcctttatttcgacactatgattgccgaatacctgatagattccataagaaacggctatcctatagcaagcctttctcacaaatacctgaatcgcagcgttccgtcgctggacgaacttttgggcaagggaaagggagcaaaaaagtactctgaaattccgcccgaaaggctgaaagattacagcgcttataacgtcaaagccatttttgacatatggccgatgcagaaaaaagttcttcaggaaaaccggcaggaggagctttttaatgacatagagcttcctcttataaccgtacttgccagtatggaataccacggtttcaaagttgacgccgcaaaacttcacgaatacggcgaagttcttctgtcacgcataaaagacctggaaaaggtaatttacatgctggccggtgaagaattcaacatcaattcaacgaagcagcttggtaccatattattcgaaaaactgaagcttcccgttgtaaaaagtacaaagaccggatactccaccgacgtcgaggttcttgaagagctttattacaagcatgatataataccatgcataatagaataccgccagcttacaaaactttacaccacctacgccgaaggtcttgaaaaagtgataaatcctgtaaccggtaaaattcattcaagttttaaccagacggttacggctacaggccgcatcagcagtaccgaaccaaatttacagaatatcccagtcagacacgaaatgggaagggaaatacggaaagcttttattccgtcgtcggaaaacgctgtttttgttgatgccgattattcacagatagagcttcgcgtgcttgcccatataacaggcgatgaagccctgataaatgctttcgttaagggggaagatattcatacggccacggcgtcgctggtatttgacgtagctcccgaagatgtgacgccggaactgcgcagaaaggcaaaagccgtaaatttcggcatagtgtacgggatcagtgattacgggctggcacgggatttgggaattacccggaaggaagcaaagcggtatatagacgactattttgccaaataccccaaagtaaaaacctatgtggatgaaattgtgcgggtcggccaggaacaggggtatgtggaaactctgttccacagaagaagataccttcccgagcttgcatctaaaaattttcaccagcgttatttcggaaaaagggttgcaatgaatacgcccatacagggcactgcagccgatattattaaaattgcgatggtgaaggtatacaaggctttgaaagaatccggccttaaatccaggcttatcctccaggtccatgacgaacttgttattgagacttttgaagacgaactggagactgtcaaggaacttgtcaaaaagtgcatggaagaggccgttgaattgagtgtgccgcttgttgtcgacgtttcaatcgggaaaaactggtatgaagcctcctgatatggatcc

SEQ ID NO: 405 - DNA, 2772 bp, Artificial Sequence
  Description of Artificial Sequence: Synthetic Clostridium stercorarium DNA Polymerase S829V
atgaaatacctgctgccgaccgctgctgctggtctgctgctcctcgctgcccagccggcgatggccatggatccaaaaataatccttatagacggaaacagtattttaaaccgcggtttttatgccctgtcggggcgatccatgctgactacgtccacaggtctgtataccaatgcggttttcgcttttgtaaatatattgaacaaatatatcgaagaggaaaaccctgattatattgccgttgctttcgatcttagggcaaaaactttccggcacggtctatatgagggatacaaagcgcagcggaaaggcatgcccgatgaacttgcaatgcagatacccctcgcgaaggaagtactgagggcgatgaatattgccataatagagcatgaaggttatgaagccgacgatataatcggcagcctttcgttaaaggccgaaaaagagaattttgacgtaataatccttacgggggacagggattctttccagctgatcagcgacagggtgaaagttatcctgccttcgacgaaagccggaaaaacagagaccaacgtatatgataaacaggccatcattgacaaatacggagttttaccccatcagcttattgacgttaaaggcttaatgggagattcgtcagataatatacccggcgttccgggagtgggtgagaaaacggcgttaagccttatttcagcctacggtacactggaaggtgtttacgagcatattgatgaaataaaacagcctaagctgaaagcatcgctgattgaatataaggatcaggcgtttttaagccgtaagctgggtactattgtaagaaatctggagctgtgtgcttcgctggaggatctgaaaagaaaagaaataaaccgcaaagagcttttgaatgttttcagaaaactcgaatttgaaagtatcatatcaaaaatgaatcttgcttccgctgaggtgacagaattacctcccgcgccggaagagcttaaaataacccatatttcagcggcagaggatcttaagaaatggattgcttacctgcttaaccagaaaaacatttccgtccttcaactgattgaccgggaggattcatacagttcccgtctttcagggctggctttgtgcaccggggatgaggttttttatatcgagaccgggactgcactccccgagaatttgattgcaacagagctgaaagaactgtggcagaatgaaaatattcacaaaatcggacacaatataaaagaatttataacctggctgctgaaacacgatgttgaactgaacggcctttatttcgacactatgattgccgaatacctgatagattccataagaaacggctatcctatagcaagcctttctcacaaatacctgaatcgcagcgttccgtcgctggacgaacttttgggcaagggaaagggagcaaaaaagtactctgaaattccgcccgaaaggctgaaagattacagcgcttataacgtcaaagccatttttgacatatggccgatgcagaaaaaagttcttcaggaaaaccggcaggaggagctttttaatgacatagagcttcctcttataaccgtacttgccagtatggaataccacggtttcaaagttgacgccgcaaaacttcacgaatacggcgaagttcttctgtcacgcataaaagacctggaaaaggtaatttacatgctggccggtgaagaattcaacatcaattcaacgaagcagcttggtaccatattattcgaaaaactgaagcttcccgttgtaaaaagtacaaagaccggatactccaccgacgtcgaggttcttgaagagctttattacaagcatgatataataccatgcataatagaataccgccagcttacaaaactttacaccacctacgccgaaggtcttgaaaaagtgataaatcctgtaaccggtaaaattcattcaagttttaaccagacggttacggctacaggccgcatcagcagtaccgaaccaaatttacagaatatcccagtcagacacgaaatgggaagggaaatacggaaagcttttattccgtcgtcggaaaacgctgtttttgttgatgccgattattcacagatagagcttcgcgtgcttgcccatataacaggcgatgaagccctgataaatgctttcgttaagggggaagatattcatacggccacggcgtcgctggtatttgacgtagctcccgaagatgtgacgccggaactgcgcagaaaggcaaaagccgtaaatttcggcatagtgtacgggatcagtgattacgggctggcacgggatttgggaattacccggaaggaagcaaagcggtatatagacgactattttgccaaataccccaaagtaaaaacctatgtggatgaaattgtgcgggtcggccaggaacaggggtatgtggaaactctgttccacagaagaagataccttcccgagcttgcatctaaaaattttcaccagcgtgttttcggaaaaagggttgcaatgaatacgcccatacagggcactgcagccgatattattaaaattgcgatggtgaaggtatacaaggctttgaaagaatccggccttaaatccaggcttatcctccaggtccatgacgaacttgttattgagacttttgaagacgaactggagactgtcaaggaacttgtcaaaaagtgcatggaagaggccgttgaattgagtgtgccgcttgttgtcgacgtttcaatcgggaaaaactggtatgaagcctcctgatatggatcc

SEQ ID NO: 406 - DNA, 2772 bp, Artificial Sequence
  Description of Artificial Sequence: Synthetic Clostridium stercorarium DNA Polymerase F830A
atgaaatacctgctgccgaccgctgctgctggtctgctgctcctcgctgcccagccggcgatggccatggatccaaaaataatccttatagacggaaacagtattttaaaccgcggtttttatgccctgtcggggcgatccatgctgactacgtccacaggtctgtataccaatgcggttttcgcttttgtaaatatattgaacaaatatatcgaagaggaaaaccctgattatattgccgttgctttcgatcttagggcaaaaactttccggcacggtctatatgagggatacaaagcgcagcggaaaggcatgcccgatgaacttgcaatgcagatacccctcgcgaaggaagtactgagggcgatgaatattgccataatagagcatgaaggttatgaagccgacgatataatcggcagcctttcgttaaaggccgaaaaagagaattttgacgtaataatccttacgggggacagggattctttccagctgatcagcgacagggtgaaagttatcctgccttcgacgaaagccggaaaaacagagaccaacgtatatgataaacaggccatcattgacaaatacggagttttaccccatcagcttattgacgttaaaggcttaatgggagattcgtcagataatatacccggcgttccgggagtgggtgagaaaacggcgttaagccttatttcagcctacggtacactggaaggtgtttacgagcatattgatgaaataaaacagcctaagctgaaagcatcgctgattgaatataaggatcaggcgtttttaagccgtaagctgggtactattgtaagaaatctggagctgtgtgcttcgctggaggatctgaaaagaaaagaaataaaccgcaaagagcttttgaatgttttcagaaaactcgaatttgaaagtatcatatcaaaaatgaatcttgcttccgctgaggtgacagaattacctcccgcgccggaagagcttaaaataacccatatttcagcggcagaggatcttaagaaatggattgcttacctgcttaaccagaaaaacatttccgtccttcaactgattgaccgggaggattcatacagttcccgtctttcagggctggctttgtgcaccggggatgaggttttttatatcgagaccgggactgcactccccgagaatttgattgcaacagagctgaaagaactgtggcagaatgaaaatattcacaaaatcggacacaatataaaagaatttataacctggctgctgaaacacgatgttgaactgaacggcctttatttcgacactatgattgccgaatacctgatagattccataagaaacggctatcctatagcaagcctttctcacaaatacctgaatcgcagcgttccgtcgctggacgaacttttgggcaagggaaagggagcaaaaaagtactctgaaattccgcccgaaaggctgaaagattacagcgcttataacgtcaaagccatttttgacatatggccgatgcagaaaaaagttcttcaggaaaaccggcaggaggagctttttaatgacatagagcttcctcttataaccgtacttgccagtatggaataccacggtttcaaagttgacgccgcaaaacttcacgaatacggcgaagttcttctgtcacgcataaaagacctggaaaaggtaatttacatgctggccggtgaagaattcaacatcaattcaacgaagcagcttggtaccatattattcgaaaaactgaagcttcccgttgtaaaaagtacaaagaccggatactccaccgacgtcgaggttcttgaagagctttattacaagcatgatataataccatgcataatagaataccgccagcttacaaaactttacaccacctacgccgaaggtcttgaaaaagtgataaatcctgtaaccggtaaaattcattcaagttttaaccagacggttacggctacaggccgcatcagcagtaccgaaccaaatttacagaatatcccagtcagacacgaaatgggaagggaaatacggaaagcttttattccgtcgtcggaaaacgctgtttttgttgatgccgattattcacagatagagcttcgcgtgcttgcccatataacaggcgatgaagccctgataaatgctttcgttaagggggaagatattcatacggccacggcgtcgctggtatttgacgtagctcccgaagatgtgacgccggaactgcgcagaaaggcaaaagccgtaaatttcggcatagtgtacgggatcagtgattacgggctggcacgggatttgggaattacccggaaggaagcaaagcggtatatagacgactattttgccaaataccccaaagtaaaaacctatgtggatgaaattgtgcgggtcggccaggaacaggggtatgtggaaactctgttccacagaagaagataccttcccgagcttgcatctaaaaattttcaccagcgttctgctggaaaaagggttgcaatgaatacgcccatacagggcactgcagccgatattattaaaattgcgatggtgaaggtatacaaggctttgaaagaatccggccttaaatccaggcttatcctccaggtccatgacgaacttgttattgagacttttgaagacgaactggagactgtcaaggaacttgtcaaaaagtgcatggaagaggccgttgaattgagtgtgccgcttgttgtcgacgtttcaatcgggaaaaactggtatgaagcctcctgatatggatcc

SEQ ID NO: 407 - DNA, 2772 bp, Artificial Sequence
  Description of Artificial Sequence: Synthetic Clostridium stercorarium DNA Polymerase F830R
atgaaatacctgctgccgaccgctgctgctggtctgctgctcctcgctgcccagccggcgatggccatggatccaaaaataatccttatagacggaaacagtattttaaaccgcggtttttatgccctgtcggggcgatccatgctgactacgtccacaggtctgtataccaatgcggttttcgcttttgtaaatatattgaacaaatatatcgaagaggaaaaccctgattatattgccgttgctttcgatcttagggcaaaaactttccggcacggtctatatgagggatacaaagcgcagcggaaaggcatgcccgatgaacttgcaatgcagatacccctcgcgaaggaagtactgagggcgatgaatattgccataatagagcatgaaggttatgaagccgacgatataatcggcagcctttcgttaaaggccgaaaaagagaattttgacgtaataatccttacgggggacagggattctttccagctgatcagcgacagggtgaaagttatcctgccttcgacgaaagccggaaaaacagagaccaacgtatatgataaacaggccatcattgacaaatacggagttttaccccatcagcttattgacgttaaaggcttaatgggagattcgtcagataatatacccggcgttccgggagtgggtgagaaaacggcgttaagccttatttcagcctacggtacactggaaggtgtttacgagcatattgatgaaataaaacagcctaagctgaaagcatcgctgattgaatataaggatcaggcgtttttaagccgtaagctgggtactattgtaagaaatctggagctgtgtgcttcgctggaggatctgaaaagaaaagaaataaaccgcaaagagcttttgaatgttttcagaaaactcgaatttgaaagtatcatatcaaaaatgaatcttgcttccgctgaggtgacagaattacctcccgcgccggaagagcttaaaataacccatatttcagcggcagaggatcttaagaaatggattgcttacctgcttaaccagaaaaacatttccgtccttcaactgattgaccgggaggattcatacagttcccgtctttcagggctggctttgtgcaccggggatgaggttttttatatcgagaccgggactgcactccccgagaatttgattgcaacagagctgaaagaactgtggcagaatgaaaatattcacaaaatcggacacaatataaaagaatttataacctggctgctgaaacacgatgttgaactgaacggcctttatttcgacactatgattgccgaatacctgatagattccataagaaacggctatcctatagcaagcctttctcacaaatacctgaatcgcagcgttccgtcgctggacgaacttttgggcaagggaaagggagcaaaaaagtactctgaaattccgcccgaaaggctgaaagattacagcgcttataacgtcaaagccatttttgacatatggccgatgcagaaaaaagttcttcaggaaaaccggcaggaggagctttttaatgacatagagcttcctcttataaccgtacttgccagtatggaataccacggtttcaaagttgacgccgcaaaacttcacgaatacggcgaagttcttctgtcacgcataaaagacctggaaaaggtaatttacatgctggccggtgaagaattcaacatcaattcaacgaagcagcttggtaccatattattcgaaaaactgaagcttcccgttgtaaaaagtacaaagaccggatactccaccgacgtcgaggttcttgaagagctttattacaagcatgatataataccatgcataatagaataccgccagcttacaaaactttacaccacctacgccgaaggtcttgaaaaagtgataaatcctgtaaccggtaaaattcattcaagttttaaccagacggttacggctacaggccgcatcagcagtaccgaaccaaatttacagaatatcccagtcagacacgaaatgggaagggaaatacggaaagcttttattccgtcgtcggaaaacgctgtttttgttgatgccgattattcacagatagagcttcgcgtgcttgcccatataacaggcgatgaagccctgataaatgctttcgttaagggggaagatattcatacggccacggcgtcgctggtatttgacgtagctcccgaagatgtgacgccggaactgcgcagaaaggcaaaagccgtaaatttcggcatagtgtacgggatcagtgattacgggctggcacgggatttgggaattacccggaaggaagcaaagcggtatatagacgactattttgccaaataccccaaagtaaaaacctatgtggatgaaattgtgcgggtcggccaggaacaggggtatgtggaaactctgttccacagaagaagataccttcccgagcttgcatctaaaaattttcaccagcgttctcgtggaaaaagggttgcaatgaatacgcccatacagggcactgcagccgatattattaaaattgcgatggtgaaggtatacaaggctttgaaagaatccggccttaaatccaggcttatcctccaggtccatgacgaacttgttattgagacttttgaagacgaactggagactgtcaaggaacttgtcaaaaagtgcatggaagaggccgttgaattgagtgtgccgcttgttgtcgacgtttcaatcgggaaaaactggtatgaagcctcctgatatggatcc

SEQ ID NO: 408 - DNA, 2772 bp, Artificial Sequence
  Description of Artificial Sequence: Synthetic Clostridium stercorarium DNA Polymerase F830N
atgaaatacctgctgccgaccgctgctgctggtctgctgctcctcgctgcccagccggcgatggccatggatccaaaaataatccttatagacggaaacagtattttaaaccgcggtttttatgccctgtcggggcgatccatgctgactacgtccacaggtctgtataccaatgcggttttcgcttttgtaaatatattgaacaaatatatcgaagaggaaaaccctgattatattgccgttgctttcgatcttagggcaaaaactttccggcacggtctatatgagggatacaaagcgcagcggaaaggcatgcccgatgaacttgcaatgcagatacccctcgcgaaggaagtactgagggcgatgaatattgccataatagagcatgaaggttatgaagccgacgatataatcggcagcctttcgttaaaggccgaaaaagagaattttgacgtaataatccttacgggggacagggattctttccagctgatcagcgacagggtgaaagttatcctgccttcgacgaaagccggaaaaacagagaccaacgtatatgataaacaggccatcattgacaaatacggagttttaccccatcagcttattgacgttaaaggcttaatgggagattcgtcagataatatacccggcgttccgggagtgggtgagaaaacggcgttaagccttatttcagcctacggtacactggaaggtgtttacgagcatattgatgaaataaaacagcctaagctgaaagcatcgctgattgaatataaggatcaggcgtttttaagccgtaagctgggtactattgtaagaaatctggagctgtgtgcttcgctggaggatctgaaaagaaaagaaataaaccgcaaagagcttttgaatgttttcagaaaactcgaatttgaaagtatcatatcaaaaatgaatcttgcttccgctgaggtgacagaattacctcccgcgccggaagagcttaaaataacccatatttcagcggcagaggatcttaagaaatggattgcttacctgcttaaccagaaaaacatttccgtccttcaactgattgaccgggaggattcatacagttcccgtctttcagggctggctttgtgcaccggggatgaggttttttatatcgagaccgggactgcactccccgagaatttgattgcaacagagctgaaagaactgtggcagaatgaaaatattcacaaaatcggacacaatataaaagaatttataacctggctgctgaaacacgatgttgaactgaacggcctttatttcgacactatgattgccgaatacctgatagattccataagaaacggctatcctatagcaagcctttctcacaaatacctgaatcgcagcgttccgtcgctggacgaacttttgggcaagggaaagggagcaaaaaagtactctgaaattccgcccgaaaggctgaaagattacagcgcttataacgtcaaagccatttttgacatatggccgatgcagaaaaaagttcttcaggaaaaccggcaggaggagctttttaatgacatagagcttcctcttataaccgtacttgccagtatggaataccacggtttcaaagttgacgccgcaaaacttcacgaatacggcgaagttcttctgtcacgcataaaagacctggaaaaggtaatttacatgctggccggtgaagaattcaacatcaattcaacgaagcagcttggtaccatattattcgaaaaactgaagcttcccgttgtaaaaagtacaaagaccggatactccaccgacgtcgaggttcttgaagagctttattacaagcatgatataataccatgcataatagaataccgccagcttacaaaactttacaccacctacgccgaaggtcttgaaaaagtgataaatcctgtaaccggtaaaattcattcaagttttaaccagacggttacggctacaggccgcatcagcagtaccgaaccaaatttacagaatatcccagtcagacacgaaatgggaagggaaatacggaaagcttttattccgtcgtcggaaaacgctgtttttgttgatgccgattattcacagatagagcttcgcgtgcttgcccatataacaggcgatgaagccctgataaatgctttcgttaagggggaagatattcatacggccacggcgtcgctggtatttgacgtagctcccgaagatgtgacgccggaactgcgcagaaaggcaaaagccgtaaatttcggcatagtgtacgggatcagtgattacgggctggcacgggatttgggaattacccggaaggaagcaaagcggtatatagacgactattttgccaaataccccaaagtaaaaacctatgtggatgaaattgtgcgggtcggccaggaacaggggtatgtggaaactctgttccacagaagaagataccttcccgagcttgcatctaaaaattttcaccagcgttctaatggaaaaagggttgcaatgaatacgcccatacagggcactgcagccgatattattaaaattgcgatggtgaaggtatacaaggctttgaaagaatccggccttaaatccaggcttatcctccaggtccatgacgaacttgttattgagacttttgaagacgaactggagactgtcaaggaacttgtcaaaaagtgcatggaagaggccgttgaattgagtgtgccgcttgttgtcgacgtttcaatcgggaaaaactggtatgaagcctcctgatatggatcc

SEQ ID NO: 409 - DNA, 2772 bp, Artificial Sequence
  Description of Artificial Sequence: Synthetic Clostridium stercorarium DNA Polymerase F830D
atgaaatacctgctgccgaccgctgctgctggtctgctgctcctcgctgcccagccggcgatggccatggatccaaaaataatccttatagacggaaacagtattttaaaccgcggtttttatgccctgtcggggcgatccatgctgactacgtccacaggtctgtataccaatgcggttttcgcttttgtaaatatattgaacaaatatatcgaagaggaaaaccctgattatattgccgttgctttcgatcttagggcaaaaactttccggcacggtctatatgagggatacaaagcgcagcggaaaggcatgcccgatgaacttgcaatgcagatacccctcgcgaaggaagtactgagggcgatgaatattgccataatagagcatgaaggttatgaagccgacgatataatcggcagcctttcgttaaaggccgaaaaagagaattttgacgtaataatccttacgggggacagggattctttccagctgatcagcgacagggtgaaagttatcctgccttcgacgaaagccggaaaaacagagaccaacgtatatgataaacaggccatcattgacaaatacggagttttaccccatcagcttattgacgttaaaggcttaatgggagattcgtcagataatatacccggcgttccgggagtgggtgagaaaacggcgttaagccttatttcagcctacggtacactggaaggtgtttacgagcatattgatgaaataaaacagcctaagctgaaagcatcgctgattgaatataaggatcaggcgtttttaagccgtaagctgggtactattgtaagaaatctggagctgtgtgcttcgctggaggatctgaaaagaaaagaaataaaccgcaaagagcttttgaatgttttcagaaaactcgaatttgaaagtatcatatcaaaaatgaatcttgcttccgctgaggtgacagaattacctcccgcgccggaagagcttaaaataacccatatttcagcggcagaggatcttaagaaatggattgcttacctgcttaaccagaaaaacatttccgtccttcaactgattgaccgggaggattcatacagttcccgtctttcagggctggctttgtgcaccggggatgaggttttttatatcgagaccgggactgcactccccgagaatttgattgcaacagagctgaaagaactgtggcagaatgaaaatattcacaaaatcggacacaatataaaagaatttataacctggctgctgaaacacgatgttgaactgaacggcctttatttcgacactatgattgccgaatacctgatagattccataagaaacggctatcctatagcaagcctttctcacaaatacctgaatcgcagcgttccgtcgctggacgaacttttgggcaagggaaagggagcaaaaaagtactctgaaattccgcccgaaaggctgaaagattacagcgcttataacgtcaaagccatttttgacatatggccgatgcagaaaaaagttcttcaggaaaaccggcaggaggagctttttaatgacatagagcttcctcttataaccgtacttgccagtatggaataccacggtttcaaagttgacgccgcaaaacttcacgaatacggcgaagttcttctgtcacgcataaaagacctggaaaaggtaatttacatgctggccggtgaagaattcaacatcaattcaacgaagcagcttggtaccatattattcgaaaaactgaagcttcccgttgtaaaaagtacaaagaccggatactccaccgacgtcgaggttcttgaagagctttattacaagcatgatataataccatgcataatagaataccgccagcttacaaaactttacaccacctacgccgaaggtcttgaaaaagtgataaatcctgtaaccggtaaaattcattcaagttttaaccagacggttacggctacaggccgcatcagcagtaccgaaccaaatttacagaatatcccagtcagacacgaaatgggaagggaaatacggaaagcttttattccgtcgtcggaaaacgctgtttttgttgatgccgattattcacagatagagcttcgcgtgcttgcccatataacaggcgatgaagccctgataaatgctttcgttaagggggaagatattcatacggccacggcgtcgctggtatttgacgtagctcccgaagatgtgacgccggaactgcgcagaaaggcaaaagccgtaaatttcggcatagtgtacgggatcagtgattacgggctggcacgggatttgggaattacccggaaggaagcaaagcggtatatagacgactattttgccaaataccccaaagtaaaaacctatgtggatgaaattgtgcgggtcggccaggaacaggggtatgtggaaactctgttccacagaagaagataccttcccgagcttgcatctaaaaattttcaccagcgttctgatggaaaaagggttgcaatgaatacgcccatacagggcactgcagccgatattattaaaattgcgatggtgaaggtatacaaggctttgaaagaatccggccttaaatccaggcttatcctccaggtccatgacgaacttgttattgagacttttgaagacgaactggagactgtcaaggaacttgtcaaaaagtgcatggaagaggccgttgaattgagtgtgccgcttgttgtcgacgtttcaatcgggaaaaactggtatgaagcctcctgatatggatcc

SEQ ID NO: 410 - DNA, 2772 bp, Artificial Sequence
  Description of Artificial Sequence: Synthetic Clostridium stercorarium DNA Polymerase F830C
atgaaatacctgctgccgaccgctgctgctggtctgctgctcctcgctgcccagccggcgatggccatggatccaaaaataatccttatagacggaaacagtattttaaaccgcggtttttatgccctgtcggggcgatccatgctgactacgtccacaggtctgtataccaatgcggttttcgcttttgtaaatatattgaacaaatatatcgaagaggaaaaccctgattatattgccgttgctttcgatcttagggcaaaaactttccggcacggtctatatgagggatacaaagcgcagcggaaaggcatgcccgatgaacttgcaatgcagatacccctcgcgaaggaagtactgagggcgatgaatattgccataatagagcatgaaggttatgaagccgacgatataatcggcagcctttcgttaaaggccgaaaaagagaattttgacgtaataatccttacgggggacagggattctttccagctgatcagcgacagggtgaaagttatcctgccttcgacgaaagccggaaaaacagagaccaacgtatatgataaacaggccatcattgacaaatacggagttttaccccatcagcttattgacgttaaaggcttaatgggagattcgtcagataatatacccggcgttccgggagtgggtgagaaaacggcgttaagccttatttcagcctacggtacactggaaggtgtttacgagcatattgatgaaataaaacagcctaagctgaaagcatcgctgattgaatataaggatcaggcgtttttaagccgtaagctgggtactattgtaagaaatctggagctgtgtgcttcgctggaggatctgaaaagaaaagaaataaaccgcaaagagcttttgaatgttttcagaaaactcgaatttgaaagtatcatatcaaaaatgaatcttgcttccgctgaggtgacagaattacctcccgcgccggaagagcttaaaataacccatatttcagcggcagaggatcttaagaaatggattgcttacctgcttaaccagaaaaacatttccgtccttcaactgattgaccgggaggattcatacagttcccgtctttcagggctggctttgtgcaccggggatgaggttttttatatcgagaccgggactgcactccccgagaatttgattgcaacagagctgaaagaactgtggcagaatgaaaatattcacaaaatcggacacaatataaaagaatttataacctggctgctgaaacacgatgttgaactgaacggcctttatttcgacactatgattgccgaatacctgatagattccataagaaacggctatcctatagcaagcctttctcacaaatacctgaatcgcagcgttccgtcgctggacgaacttttgggcaagggaaagggagcaaaaaagtactctgaaattccgcccgaaaggctgaaagattacagcgcttataacgtcaaagccatttttgacatatggccgatgcagaaaaaagttcttcaggaaaaccggcaggaggagctttttaatgacatagagcttcctcttataaccgtacttgccagtatggaataccacggtttcaaagttgacgccgcaaaacttcacgaatacggcgaagttcttctgtcacgcataaaagacctggaaaaggtaatttacatgctggccggtgaagaattcaacatcaattcaacgaagcagcttggtaccatattattcgaaaaactgaagcttcccgttgtaaaaagtacaaagaccggatactccaccgacgtcgaggttcttgaagagctttattacaagcatgatataataccatgcataatagaataccgccagcttacaaaactttacaccacctacgccgaaggtcttgaaaaagtgataaatcctgtaaccggtaaaattcattcaagttttaaccagacggttacggctacaggccgcatcagcagtaccgaaccaaatttacagaatatcccagtcagacacgaaatgggaagggaaatacggaaagcttttattccgtcgtcggaaaacgctgtttttgttgatgccgattattcacagatagagcttcgcgtgcttgcccatataacaggcgatgaagccctgataaatgctttcgttaagggggaagatattcatacggccacggcgtcgctggtatttgacgtagctcccgaagatgtgacgccggaactgcgcagaaaggcaaaagccgtaaatttcggcatagtgtacgggatcagtgattacgggctggcacgggatttgggaattacccggaaggaagcaaagcggtatatagacgactattttgccaaataccccaaagtaaaaacctatgtggatgaaattgtgcgggtcggccaggaacaggggtatgtggaaactctgttccacagaagaagataccttcccgagcttgcatctaaaaattttcaccagcgttcttgtggaaaaagggttgcaatgaatacgcccatacagggcactgcagccgatattattaaaattgcgatggtgaaggtatacaaggctttgaaagaatccggccttaaatccaggcttatcctccaggtccatgacgaacttgttattgagacttttgaagacgaactggagactgtcaaggaacttgtcaaaaagtgcatggaagaggccgttgaattgagtgtgccgcttgttgtcgacgtttcaatcgggaaaaactggtatgaagcctcctgatatggatcc

SEQ ID NO: 411 - DNA, 2772 bp, Artificial Sequence
  Description of Artificial Sequence: Synthetic Clostridium stercorarium DNA Polymerase F830E
atgaaatacctgctgccgaccgctgctgctggtctgctgctcctcgctgcccagccggcgatggccatggatccaaaaataatccttatagacggaaacagtattttaaaccgcggtttttatgccctgtcggggcgatccatgctgactacgtccacaggtctgtataccaatgcggttttcgcttttgtaaatatattgaacaaatatatcgaagaggaaaaccctgattatattgccgttgctttcgatcttagggcaaaaactttccggcacggtctatatgagggatacaaagcgcagcggaaaggcatgcccgatgaacttgcaatgcagatacccctcgcgaaggaagtactgagggcgatgaatattgccataatagagcatgaaggttatgaagccgacgatataatcggcagcctttcgttaaaggccgaaaaagagaattttgacgtaataatccttacgggggacagggattctttccagctgatcagcgacagggtgaaagttatcctgccttcgacgaaagccggaaaaacagagaccaacgtatatgataaacaggccatcattgacaaatacggagttttaccccatcagcttattgacgttaaaggcttaatgggagattcgtcagataatatacccggcgttccgggagtgggtgagaaaacggcgttaagccttatttcagcctacggtacactggaaggtgtttacgagcatattgatgaaataaaacagcctaagctgaaagcatcgctgattgaatataaggatcaggcgtttttaagccgtaagctgggtactattgtaagaaatctggagctgtgtgcttcgctggaggatctgaaaagaaaagaaataaaccgcaaagagcttttgaatgttttcagaaaactcgaatttgaaagtatcatatcaaaaatgaatcttgcttccgctgaggtgacagaattacctcccgcgccggaagagcttaaaataacccatatttcagcggcagaggatcttaagaaatggattgcttacctgcttaaccagaaaaacatttccgtccttcaactgattgaccgggaggattcatacagttcccgtctttcagggctggctttgtgcaccggggatgaggttttttatatcgagaccgggactgcactccccgagaatttgattgcaacagagctgaaagaactgtggcagaatgaaaatattcacaaaatcggacacaatataaaagaatttataacctggctgctgaaacacgatgttgaactgaacggcctttatttcgacactatgattgccgaatacctgatagattccataagaaacggctatcctatagcaagcctttctcacaaatacctgaatcgcagcgttccgtcgctggacgaacttttgggcaagggaaagggagcaaaaaagtactctgaaattccgcccgaaaggctgaaagattacagcgcttataacgtcaaagccatttttgacatatggccgatgcagaaaaaagttcttcaggaaaaccggcaggaggagctttttaatgacatagagcttcctcttataaccgtacttgccagtatggaataccacggtttcaaagttgacgccgcaaaacttcacgaatacggcgaagttcttctgtcacgcataaaagacctggaaaaggtaatttacatgctggccggtgaagaattcaacatcaattcaacgaagcagcttggtaccatattattcgaaaaactgaagcttcccgttgtaaaaagtacaaagaccggatactccaccgacgtcgaggttcttgaagagctttattacaagcatgatataataccatgcataatagaataccgccagcttacaaaactttacaccacctacgccgaaggtcttgaaaaagtgataaatcctgtaaccggtaaaattcattcaagttttaaccagacggttacggctacaggccgcatcagcagtaccgaaccaaatttacagaatatcccagtcagacacgaaatgggaagggaaatacggaaagcttttattccgtcgtcggaaaacgctgtttttgttgatgccgattattcacagatagagcttcgcgtgcttgcccatataacaggcgatgaagccctgataaatgctttcgttaagggggaagatattcatacggccacggcgtcgctggtatttgacgtagctcccgaagatgtgacgccggaactgcgcagaaaggcaaaagccgtaaatttcggcatagtgtacgggatcagtgattacgggctggcacgggatttgggaattacccggaaggaagcaaagcggtatatagacgactattttgccaaataccccaaagtaaaaacctatgtggatgaaattgtgcgggtcggccaggaacaggggtatgtggaaactctgttccacagaagaagataccttcccgagcttgcatctaaaaattttcaccagcgttctgaaggaaaaagggttgcaatgaatacgcccatacagggcactgcagccgatattattaaaattgcgatggtgaaggtatacaaggctttgaaagaatccggccttaaatccaggcttatcctccaggtccatgacgaacttgttattgagacttttgaagacgaactggagactgtcaaggaacttgtcaaaaagtgcatggaagaggccgttgaattgagtgtgccgcttgttgtcgacgtttcaatcgggaaaaactggtatgaagcctcctgatatggatcc

SEQ ID NO: 412 - DNA, 2772 bp, Artificial Sequence
  Description of Artificial Sequence: Synthetic Clostridium stercorarium DNA Polymerase F830Q
atgaaatacctgctgccgaccgctgctgctggtctgctgctcctcgctgcccagccggcgatggccatggatccaaaaataatccttatagacggaaacagtattttaaaccgcggtttttatgccctgtcggggcgatccatgctgactacgtccacaggtctgtataccaatgcggttttcgcttttgtaaatatattgaacaaatatatcgaagaggaaaaccctgattatattgccgttgctttcgatcttagggcaaaaactttccggcacggtctatatgagggatacaaagcgcagcggaaaggcatgcccgatgaacttgcaatgcagatacccctcgcgaaggaagtactgagggcgatgaatattgccataatagagcatgaaggttatgaagccgacgatataatcggcagcctttcgttaaaggccgaaaaagagaattttgacgtaataatccttacgggggacagggattctttccagctgatcagcgacagggtgaaagttatcctgccttcgacgaaagccggaaaaacagagaccaacgtatatgataaacaggccatcattgacaaatacggagttttaccccatcagcttattgacgttaaaggcttaatgggagattcgtcagataatatacccggcgttccgggagtgggtgagaaaacggcgttaagccttatttcagcctacggtacactggaaggtgtttacgagcatattgatgaaataaaacagcctaagctgaaagcatcgctgattgaatataaggatcaggcgtttttaagccgtaagctgggtactattgtaagaaatctggagctgtgtgcttcgctggaggatctgaaaagaaaagaaataaaccgcaaagagcttttgaatgttttcagaaaactcgaatttgaaagtatcatatcaaaaatgaatcttgcttccgctgaggtgacagaattacctcccgcgccggaagagcttaaaataacccatatttcagcggcagaggatcttaagaaatggattgcttacctgcttaaccagaaaaacatttccgtccttcaactgattgaccgggaggattcatacagttcccgtctttcagggctggctttgtgcaccggggatgaggttttttatatcgagaccgggactgcactccccgagaatttgattgcaacagagctgaaagaactgtggcagaatgaaaatattcacaaaatcggacacaatataaaagaatttataacctggctgctgaaacacgatgttgaactgaacggcctttatttcgacactatgattgccgaatacctgatagattccataagaaacggctatcctatagcaagcctttctcacaaatacctgaatcgcagcgttccgtcgctggacgaacttttgggcaagggaaagggagcaaaaaagtactctgaaattccgcccgaaaggctgaaagattacagcgcttataacgtcaaagccatttttgacatatggccgatgcagaaaaaagttcttcaggaaaaccggcaggaggagctttttaatgacatagagcttcctcttataaccgtacttgccagtatggaataccacggtttcaaagttgacgccgcaaaacttcacgaatacggcgaagttcttctgtcacgcataaaagacctggaaaaggtaatttacatgctggccggtgaagaattcaacatcaattcaacgaagcagcttggtaccatattattcgaaaaactgaagcttcccgttgtaaaaagtacaaagaccggatactccaccgacgtcgaggttcttgaagagctttattacaagcatgatataataccatgcataatagaataccgccagcttacaaaactttacaccacctacgccgaaggtcttgaaaaagtgataaatcctgtaaccggtaaaattcattcaagttttaaccagacggttacggctacaggccgcatcagcagtaccgaaccaaatttacagaatatcccagtcagacacgaaatgggaagggaaatacggaaagcttttattccgtcgtcggaaaacgctgtttttgttgatgccgattattcacagatagagcttcgcgtgcttgcccatataacaggcgatgaagccctgataaatgctttcgttaagggggaagatattcatacggccacggcgtcgctggtatttgacgtagctcccgaagatgtgacgccggaactgcgcagaaaggcaaaagccgtaaatttcggcatagtgtacgggatcagtgattacgggctggcacgggatttgggaattacccggaaggaagcaaagcggtatatagacgactattttgccaaataccccaaagtaaaaacctatgtggatgaaattgtgcgggtcggccaggaacaggggtatgtggaaactctgttccacagaagaagataccttcccgagcttgcatctaaaaattttcaccagcgttctcaaggaaaaagggttgcaatgaatacgcccatacagggcactgcagccgatattattaaaattgcgatggtgaaggtatacaaggctttgaaagaatccggccttaaatccaggcttatcctccaggtccatgacgaacttgttattgagacttttgaagacgaactggagactgtcaaggaacttgtcaaaaagtgcatggaagaggccgttgaattgagtgtgccgcttgttgtcgacgtttcaatcgggaaaaactggtatgaagcctcctgatatggatcc

SEQ ID NO: 413 - DNA, 2772 bp, Artificial Sequence
  Description of Artificial Sequence: Synthetic Clostridium stercorarium DNA Polymerase F830G
atgaaatacctgctgccgaccgctgctgctggtctgctgctcctcgctgcccagccggcgatggccatggatccaaaaataatccttatagacggaaacagtattttaaaccgcggtttttatgccctgtcggggcgatccatgctgactacgtccacaggtctgtataccaatgcggttttcgcttttgtaaatatattgaacaaatatatcgaagaggaaaaccctgattatattgccgttgctttcgatcttagggcaaaaactttccggcacggtctatatgagggatacaaagcgcagcggaaaggcatgcccgatgaacttgcaatgcagatacccctcgcgaaggaagtactgagggcgatgaatattgccataatagagcatgaaggttatgaagccgacgatataatcggcagcctttcgttaaaggccgaaaaagagaattttgacgtaataatccttacgggggacagggattctttccagctgatcagcgacagggtgaaagttatcctgccttcgacgaaagccggaaaaacagagaccaacgtatatgataaacaggccatcattgacaaatacggagttttaccccatcagcttattgacgttaaaggcttaatgggagattcgtcagataatatacccggcgttccgggagtgggtgagaaaacggcgttaagccttatttcagcctacggtacactggaaggtgtttacgagcatattgatgaaataaaacagcctaagctgaaagcatcgctgattgaatataaggatcaggcgtttttaagccgtaagctgggtactattgtaagaaatctggagctgtgtgcttcgctggaggatctgaaaagaaaagaaataaaccgcaaagagcttttgaatgttttcagaaaactcgaatttgaaagtatcatatcaaaaatgaatcttgcttccgctgaggtgacagaattacctcccgcgccggaagagcttaaaataacccatatttcagcggcagaggatcttaagaaatggattgcttacctgcttaaccagaaaaacatttccgtccttcaactgattgaccgggaggattcatacagttcccgtctttcagggctggctttgtgcaccggggatgaggttttttatatcgagaccgggactgcactccccgagaatttgattgcaacagagctgaaagaactgtggcagaatgaaaatattcacaaaatcggacacaatataaaagaatttataacctggctgctgaaacacgatgttgaactgaacggcctttatttcgacactatgattgccgaatacctgatagattccataagaaacggctatcctatagcaagcctttctcacaaatacctgaatcgcagcgttccgtcgctggacgaacttttgggcaagggaaagggagcaaaaaagtactctgaaattccgcccgaaaggctgaaagattacagcgcttataacgtcaaagccatttttgacatatggccgatgcagaaaaaagttcttcaggaaaaccggcaggaggagctttttaatgacatagagcttcctcttataaccgtacttgccagtatggaataccacggtttcaaagttgacgccgcaaaacttcacgaatacggcgaagttcttctgtcacgcataaaagacctggaaaaggtaatttacatgctggccggtgaagaattcaacatcaattcaacgaagcagcttggtaccatattattcgaaaaactgaagcttcccgttgtaaaaagtacaaagaccggatactccaccgacgtcgaggttcttgaagagctttattacaagcatgatataataccatgcataatagaataccgccagcttacaaaactttacaccacctacgccgaaggtcttgaaaaagtgataaatcctgtaaccggtaaaattcattcaagttttaaccagacggttacggctacaggccgcatcagcagtaccgaaccaaatttacagaatatcccagtcagacacgaaatgggaagggaaatacggaaagcttttattccgtcgtcggaaaacgctgtttttgttgatgccgattattcacagatagagcttcgcgtgcttgcccatataacaggcgatgaagccctgataaatgctttcgttaagggggaagatattcatacggccacggcgtcgctggtatttgacgtagctcccgaagatgtgacgccggaactgcgcagaaaggcaaaagccgtaaatttcggcatagtgtacgggatcagtgattacgggctggcacgggatttgggaattacccggaaggaagcaaagcggtatatagacgactattttgccaaataccccaaagtaaaaacctatgtggatgaaattgtgcgggtcggccaggaacaggggtatgtggaaactctgttccacagaagaagataccttcccgagcttgcatctaaaaattttcaccagcgttctggtggaaaaagggttgcaatgaatacgcccatacagggcactgcagccgatattattaaaattgcgatggtgaaggtatacaaggctttgaaagaatccggccttaaatccaggcttatcctccaggtccatgacgaacttgttattgagacttttgaagacgaactggagactgtcaaggaacttgtcaaaaagtgcatggaagaggccgttgaattgagtgtgccgcttgttgtcgacgtttcaatcgggaaaaactggtatgaagcctcctgatatggatcc

SEQ ID NO: 414 - DNA, 2772 bp, Artificial Sequence
  Description of Artificial Sequence: Synthetic Clostridium stercorarium DNA Polymerase F830H
atgaaatacctgctgccgaccgctgctgctggtctgctgctcctcgctgcccagccggcgatggccatggatccaaaaataatccttatagacggaaacagtattttaaaccgcggtttttatgccctgtcggggcgatccatgctgactacgtccacaggtctgtataccaatgcggttttcgcttttgtaaatatattgaacaaatatatcgaagaggaaaaccctgattatattgccgttgctttcgatcttagggcaaaaactttccggcacggtctatatgagggatacaaagcgcagcggaaaggcatgcccgatgaacttgcaatgcagatacccctcgcgaaggaagtactgagggcgatgaatattgccataatagagcatgaaggttatgaagccgacgatataatcggcagcctttcgttaaaggccgaaaaagagaattttgacgtaataatccttacgggggacagggattctttccagctgatcagcgacagggtgaaagttatcctgccttcgacgaaagccggaaaaacagagaccaacgtatatgataaacaggccatcattgacaaatacggagttttaccccatcagcttattgacgttaaaggcttaatgggagattcgtcagataatatacccggcgttccgggagtgggtgagaaaacggcgttaagccttatttcagcctacggtacactggaaggtgtttacgagcatattgatgaaataaaacagcctaagctgaaagcatcgctgattgaatataaggatcaggcgtttttaagccgtaagctgggtactattgtaagaaatctggagctgtgtgcttcgctggaggatctgaaaagaaaagaaataaaccgcaaagagcttttgaatgttttcagaaaactcgaatttgaaagtatcatatcaaaaatgaatcttgcttccgctgaggtgacagaattacctcccgcgccggaagagcttaaaataacccatatttcagcggcagaggatcttaagaaatggattgcttacctgcttaaccagaaaaacatttccgtccttcaactgattgaccgggaggattcatacagttcccgtctttcagggctggctttgtgcaccggggatgaggttttttatatcgagaccgggactgcactccccgagaatttgattgcaacagagctgaaagaactgtggcagaatgaaaatattcacaaaatcggacacaatataaaagaatttataacctggctgctgaaacacgatgttgaactgaacggcctttatttcgacactatgattgccgaatacctgatagattccataagaaacggctatcctatagcaagcctttctcacaaatacctgaatcgcagcgttccgtcgctggacgaacttttgggcaagggaaagggagcaaaaaagtactctgaaattccgcccgaaaggctgaaagattacagcgcttataacgtcaaagccatttttgacatatggccgatgcagaaaaaagttcttcaggaaaaccggcaggaggagctttttaatgacatagagcttcctcttataaccgtacttgccagtatggaataccacggtttcaaagttgacgccgcaaaacttcacgaatacggcgaagttcttctgtcacgcataaaagacctggaaaaggtaatttacatgctggccggtgaagaattcaacatcaattcaacgaagcagcttggtaccatattattcgaaaaactgaagcttcccgttgtaaaaagtacaaagaccggatactccaccgacgtcgaggttcttgaagagctttattacaagcatgatataataccatgcataatagaataccgccagcttacaaaactttacaccacctacgccgaaggtcttgaaaaagtgataaatcctgtaaccggtaaaattcattcaagttttaaccagacggttacggctacaggccgcatcagcagtaccgaaccaaatttacagaatatcccagtcagacacgaaatgggaagggaaatacggaaagcttttattccgtcgtcggaaaacgctgtttttgttgatgccgattattcacagatagagcttcgcgtgcttgcccatataacaggcgatgaagccctgataaatgctttcgttaagggggaagatattcatacggccacggcgtcgctggtatttgacgtagctcccgaagatgtgacgccggaactgcgcagaaaggcaaaagccgtaaatttcggcatagtgtacgggatcagtgattacgggctggcacgggatttgggaattacccggaaggaagcaaagcggtatatagacgactattttgccaaataccccaaagtaaaaacctatgtggatgaaattgtgcgggtcggccaggaacaggggtatgtggaaactctgttccacagaagaagataccttcccgagcttgcatctaaaaattttcaccagcgttctcatggaaaaagggttgcaatgaatacgcccatacagggcactgcagccgatattattaaaattgcgatggtgaaggtatacaaggctttgaaagaatccggccttaaatccaggcttatcctccaggtccatgacgaacttgttattgagacttttgaagacgaactggagactgtcaaggaacttgtcaaaaagtgcatggaagaggccgttgaattgagtgtgccgcttgttgtcgacgtttcaatcgggaaaaactggtatgaagcctcctgatatggatcc

SEQ ID NO: 415 - DNA, 2772 bp, Artificial Sequence
  Description of Artificial Sequence: Synthetic Clostridium stercorarium DNA Polymerase F830I
atgaaatacctgctgccgaccgctgctgctggtctgctgctcctcgctgcccagccggcgatggccatggatccaaaaataatccttatagacggaaacagtattttaaaccgcggtttttatgccctgtcggggcgatccatgctgactacgtccacaggtctgtataccaatgcggttttcgcttttgtaaatatattgaacaaatatatcgaagaggaaaaccctgattatattgccgttgctttcgatcttagggcaaaaactttccggcacggtctatatgagggatacaaagcgcagcggaaaggcatgcccgatgaacttgcaatgcagatacccctcgcgaaggaagtactgagggcgatgaatattgccataatagagcatgaaggttatgaagccgacgatataatcggcagcctttcgttaaaggccgaaaaagagaattttgacgtaataatccttacgggggacagggattctttccagctgatcagcgacagggtgaaagttatcctgccttcgacgaaagccggaaaaacagagaccaacgtatatgataaacaggccatcattgacaaatacggagttttaccccatcagcttattgacgttaaaggcttaatgggagattcgtcagataatatacccggcgttccgggagtgggtgagaaaacggcgttaagccttatttcagcctacggtacactggaaggtgtttacgagcatattgatgaaataaaacagcctaagctgaaagcatcgctgattgaatataaggatcaggcgtttttaagccgtaagctgggtactattgtaagaaatctggagctgtgtgcttcgctggaggatctgaaaagaaaagaaataaaccgcaaagagcttttgaatgttttcagaaaactcgaatttgaaagtatcatatcaaaaatgaatcttgcttccgctgaggtgacagaattacctcccgcgccggaagagcttaaaataacccatatttcagcggcagaggatcttaagaaatggattgcttacctgcttaaccagaaaaacatttccgtccttcaactgattgaccgggaggattcatacagttcccgtctttcagggctggctttgtgcaccggggatgaggttttttatatcgagaccgggactgcactccccgagaatttgattgcaacagagctgaaagaactgtggcagaatgaaaatattcacaaaatcggacacaatataaaagaatttataacctggctgctgaaacacgatgttgaactgaacggcctttatttcgacactatgattgccgaatacctgatagattccataagaaacggctatcctatagcaagcctttctcacaaatacctgaatcgcagcgttccgtcgctggacgaacttttgggcaagggaaagggagcaaaaaagtactctgaaattccgcccgaaaggctgaaagattacagcgcttataacgtcaaagccatttttgacatatggccgatgcagaaaaaagttcttcaggaaaaccggcaggaggagctttttaatgacatagagcttcctcttataaccgtacttgccagtatggaataccacggtttcaaagttgacgccgcaaaacttcacgaatacggcgaagttcttctgtcacgcataaaagacctggaaaaggtaatttacatgctggccggtgaagaattcaacatcaattcaacgaagcagcttggtaccatattattcgaaaaactgaagcttcccgttgtaaaaagtacaaagaccggatactccaccgacgtcgaggttcttgaagagctttattacaagcatgatataataccatgcataatagaataccgccagcttacaaaactttacaccacctacgccgaaggtcttgaaaaagtgataaatcctgtaaccggtaaaattcattcaagttttaaccagacggttacggctacaggccgcatcagcagtaccgaaccaaatttacagaatatcccagtcagacacgaaatgggaagggaaatacggaaagcttttattccgtcgtcggaaaacgctgtttttgttgatgccgattattcacagatagagcttcgcgtgcttgcccatataacaggcgatgaagccctgataaatgctttcgttaagggggaagatattcatacggccacggcgtcgctggtatttgacgtagctcccgaagatgtgacgccggaactgcgcagaaaggcaaaagccgtaaatttcggcatagtgtacgggatcagtgattacgggctggcacgggatttgggaattacccggaaggaagcaaagcggtatatagacgactattttgccaaataccccaaagtaaaaacctatgtggatgaaattgtgcgggtcggccaggaacaggggtatgtggaaactctgttccacagaagaagataccttcccgagcttgcatctaaaaattttcaccagcgttctattggaaaaagggttgcaatgaatacgcccatacagggcactgcagccgatattattaaaattgcgatggtgaaggtatacaaggctttgaaagaatccggccttaaatccaggcttatcctccaggtccatgacgaacttgttattgagacttttgaagacgaactggagactgtcaaggaacttgtcaaaaagtgcatggaagaggccgttgaattgagtgtgccgcttgttgtcgacgtttcaatcgggaaaaactggtatgaagcctcctgatatggatcc

SEQ ID NO: 416 - DNA, 2772 bp, Artificial Sequence
  Description of Artificial Sequence: Synthetic Clostridium stercorarium DNA Polymerase F830L
atgaaatacctgctgccgaccgctgctgctggtctgctgctcctcgctgcccagccggcgatggccatggatccaaaaataatccttatagacggaaacagtattttaaaccgcggtttttatgccctgtcggggcgatccatgctgactacgtccacaggtctgtataccaatgcggttttcgcttttgtaaatatattgaacaaatatatcgaagaggaaaaccctgattatattgccgttgctttcgatcttagggcaaaaactttccggcacggtctatatgagggatacaaagcgcagcggaaaggcatgcccgatgaacttgcaatgcagatacccctcgcgaaggaagtactgagggcgatgaatattgccataatagagcatgaaggttatgaagccgacgatataatcggcagcctttcgttaaaggccgaaaaagagaattttgacgtaataatccttacgggggacagggattctttccagctgatcagcgacagggtgaaagttatcctgccttcgacgaaagccggaaaaacagagaccaacgtatatgataaacaggccatcattgacaaatacggagttttaccccatcagcttattgacgttaaaggcttaatgggagattcgtcagataatatacccggcgttccgggagtgggtgagaaaacggcgttaagccttatttcagcctacggtacactggaaggtgtttacgagcatattgatgaaataaaacagcctaagctgaaagcatcgctgattgaatataaggatcaggcgtttttaagccgtaagctgggtactattgtaagaaatctggagctgtgtgcttcgctggaggatctgaaaagaaaagaaataaaccgcaaagagcttttgaatgttttcagaaaactcgaatttgaaagtatcatatcaaaaatgaatcttgcttccgctgaggtgacagaattacctcccgcgccggaagagcttaaaataacccatatttcagcggcagaggatcttaagaaatggattgcttacctgcttaaccagaaaaacatttccgtccttcaactgattgaccgggaggattcatacagttcccgtctttcagggctggctttgtgcaccggggatgaggttttttatatcgagaccgggactgcactccccgagaatttgattgcaacagagctgaaagaactgtggcagaatgaaaatattcacaaaatcggacacaatataaaagaatttataacctggctgctgaaacacgatgttgaactgaacggcctttatttcgacactatgattgccgaatacctgatagattccataagaaacggctatcctatagcaagcctttctcacaaatacctgaatcgcagcgttccgtcgctggacgaacttttgggcaagggaaagggagcaaaaaagtactctgaaattccgcccgaaaggctgaaagattacagcgcttataacgtcaaagccatttttgacatatggccgatgcagaaaaaagttcttcaggaaaaccggcaggaggagctttttaatgacatagagcttcctcttataaccgtacttgccagtatggaataccacggtttcaaagttgacgccgcaaaacttcacgaatacggcgaagttcttctgtcacgcataaaagacctggaaaaggtaatttacatgctggccggtgaagaattcaacatcaattcaacgaagcagcttggtaccatattattcgaaaaactgaagcttcccgttgtaaaaagtacaaagaccggatactccaccgacgtcgaggttcttgaagagctttattacaagcatgatataataccatgcataatagaataccgccagcttacaaaactttacaccacctacgccgaaggtcttgaaaaagtgataaatcctgtaaccggtaaaattcattcaagttttaaccagacggttacggctacaggccgcatcagcagtaccgaaccaaatttacagaatatcccagtcagacacgaaatgggaagggaaatacggaaagcttttattccgtcgtcggaaaacgctgtttttgttgatgccgattattcacagatagagcttcgcgtgcttgcccatataacaggcgatgaagccctgataaatgctttcgttaagggggaagatattcatacggccacggcgtcgctggtatttgacgtagctcccgaagatgtgacgccggaactgcgcagaaaggcaaaagccgtaaatttcggcatagtgtacgggatcagtgattacgggctggcacgggatttgggaattacccggaaggaagcaaagcggtatatagacgactattttgccaaataccccaaagtaaaaacctatgtggatgaaattgtgcgggtcggccaggaacaggggtatgtggaaactctgttccacagaagaagataccttcccgagcttgcatctaaaaattttcaccagcgttctcttggaaaaagggttgcaatgaatacgcccatacagggcactgcagccgatattattaaaattgcgatggtgaaggtatacaaggctttgaaagaatccggccttaaatccaggcttatcctccaggtccatgacgaacttgttattgagacttttgaagacgaactggagactgtcaaggaacttgtcaaaaagtgcatggaagaggccgttgaattgagtgtgccgcttgttgtcgacgtttcaatcgggaaaaactggtatgaagcctcctgatatggatcc

SEQ ID NO: 417 - DNA, 2772 bp, Artificial Sequence
  Description of Artificial Sequence: Synthetic Clostridium stercorarium DNA Polymerase F830K
atgaaatacctgctgccgaccgctgctgctggtctgctgctcctcgctgcccagccggcgatggccatggatccaaaaataatccttatagacggaaacagtattttaaaccgcggtttttatgccctgtcggggcgatccatgctgactacgtccacaggtctgtataccaatgcggttttcgcttttgtaaatatattgaacaaatatatcgaagaggaaaaccctgattatattgccgttgctttcgatcttagggcaaaaactttccggcacggtctatatgagggatacaaagcgcagcggaaaggcatgcccgatgaacttgcaatgcagatacccctcgcgaaggaagtactgagggcgatgaatattgccataatagagcatgaaggttatgaagccgacgatataatcggcagcctttcgttaaaggccgaaaaagagaattttgacgtaataatccttacgggggacagggattctttccagctgatcagcgacagggtgaaagttatcctgccttcgacgaaagccggaaaaacagagaccaacgtatatgataaacaggccatcattgacaaatacggagttttaccccatcagcttattgacgttaaaggcttaatgggagattcgtcagataatatacccggcgttccgggagtgggtgagaaaacggcgttaagccttatttcagcctacggtacactggaaggtgtttacgagcatattgatgaaataaaacagcctaagctgaaagcatcgctgattgaatataaggatcaggcgtttttaagccgtaagctgggtactattgtaagaaatctggagctgtgtgcttcgctggaggatctgaaaagaaaagaaataaaccgcaaagagcttttgaatgttttcagaaaactcgaatttgaaagtatcatatcaaaaatgaatcttgcttccgctgaggtgacagaattacctcccgcgccggaagagcttaaaataacccatatttcagcggcagaggatcttaagaaatggattgcttacctgcttaaccagaaaaacatttccgtccttcaactgattgaccgggaggattcatacagttcccgtctttcagggctggctttgtgcaccggggatgaggttttttatatcgagaccgggactgcactccccgagaatttgattgcaacagagctgaaagaactgtggcagaatgaaaatattcacaaaatcggacacaatataaaagaatttataacctggctgctgaaacacgatgttgaactgaacggcctttatttcgacactatgattgccgaatacctgatagattccataagaaacggctatcctatagcaagcctttctcacaaatacctgaatcgcagcgttccgtcgctggacgaacttttgggcaagggaaagggagcaaaaaagtactctgaaattccgcccgaaaggctgaaagattacagcgcttataacgtcaaagccatttttgacatatggccgatgcagaaaaaagttcttcaggaaaaccggcaggaggagctttttaatgacatagagcttcctcttataaccgtacttgccagtatggaataccacggtttcaaagttgacgccgcaaaacttcacgaatacggcgaagttcttctgtcacgcataaaagacctggaaaaggtaatttacatgctggccggtgaagaattcaacatcaattcaacgaagcagcttggtaccatattattcgaaaaactgaagcttcccgttgtaaaaagtacaaagaccggatactccaccgacgtcgaggttcttgaagagctttattacaagcatgatataataccatgcataatagaataccgccagcttacaaaactttacaccacctacgccgaaggtcttgaaaaagtgataaatcctgtaaccggtaaaattcattcaagttttaaccagacggttacggctacaggccgcatcagcagtaccgaaccaaatttacagaatatcccagtcagacacgaaatgggaagggaaatacggaaagcttttattccgtcgtcggaaaacgctgtttttgttgatgccgattattcacagatagagcttcgcgtgcttgcccatataacaggcgatgaagccctgataaatgctttcgttaagggggaagatattcatacggccacggcgtcgctggtatttgacgtagctcccgaagatgtgacgccggaactgcgcagaaaggcaaaagccgtaaatttcggcatagtgtacgggatcagtgattacgggctggcacgggatttgggaattacccggaaggaagcaaagcggtatatagacgactattttgccaaataccccaaagtaaaaacctatgtggatgaaattgtgcgggtcggccaggaacaggggtatgtggaaactctgttccacagaagaagataccttcccgagcttgcatctaaaaattttcaccagcgttctaaaggaaaaagggttgcaatgaatacgcccatacagggcactgcagccgatattattaaaattgcgatggtgaaggtatacaaggctttgaaagaatccggccttaaatccaggcttatcctccaggtccatgacgaacttgttattgagacttttgaagacgaactggagactgtcaaggaacttgtcaaaaagtgcatggaagaggccgttgaattgagtgtgccgcttgttgtcgacgtttcaatcgggaaaaactggtatgaagcctcctgatatggatcc

SEQ ID NO: 418 - DNA, 2772 bp, Artificial Sequence
  Description of Artificial Sequence: Synthetic Clostridium stercorarium DNA Polymerase F830M
atgaaatacctgctgccgaccgctgctgctggtctgctgctcctcgctgcccagccggcgatggccatggatccaaaaataatccttatagacggaaacagtattttaaaccgcggtttttatgccctgtcggggcgatccatgctgactacgtccacaggtctgtataccaatgcggttttcgcttttgtaaatatattgaacaaatatatcgaagaggaaaaccctgattatattgccgttgctttcgatcttagggcaaaaactttccggcacggtctatatgagggatacaaagcgcagcggaaaggcatgcccgatgaacttgcaatgcagatacccctcgcgaaggaagtactgagggcgatgaatattgccataatagagcatgaaggttatgaagccgacgatataatcggcagcctttcgttaaaggccgaaaaagagaattttgacgtaataatccttacgggggacagggattctttccagctgatcagcgacagggtgaaagttatcctgccttcgacgaaagccggaaaaacagagaccaacgtatatgataaacaggccatcattgacaaatacggagttttaccccatcagcttattgacgttaaaggcttaatgggagattcgtcagataatatacccggcgttccgggagtgggtgagaaaacggcgttaagccttatttcagcctacggtacactggaaggtgtttacgagcatattgatgaaataaaacagcctaagctgaaagcatcgctgattgaatataaggatcaggcgtttttaagccgtaagctgggtactattgtaagaaatctggagctgtgtgcttcgctggaggatctgaaaagaaaagaaataaaccgcaaagagcttttgaatgttttcagaaaactcgaatttgaaagtatcatatcaaaaatgaatcttgcttccgctgaggtgacagaattacctcccgcgccggaagagcttaaaataacccatatttcagcggcagaggatcttaagaaatggattgcttacctgcttaaccagaaaaacatttccgtccttcaactgattgaccgggaggattcatacagttcccgtctttcagggctggctttgtgcaccggggatgaggttttttatatcgagaccgggactgcactccccgagaatttgattgcaacagagctgaaagaactgtggcagaatgaaaatattcacaaaatcggacacaatataaaagaatttataacctggctgctgaaacacgatgttgaactgaacggcctttatttcgacactatgattgccgaatacctgatagattccataagaaacggctatcctatagcaagcctttctcacaaatacctgaatcgcagcgttccgtcgctggacgaacttttgggcaagggaaagggagcaaaaaagtactctgaaattccgcccgaaaggctgaaagattacagcgcttataacgtcaaagccatttttgacatatggccgatgcagaaaaaagttcttcaggaaaaccggcaggaggagctttttaatgacatagagcttcctcttataaccgtacttgccagtatggaataccacggtttcaaagttgacgccgcaaaacttcacgaatacggcgaagttcttctgtcacgcataaaagacctggaaaaggtaatttacatgctggccggtgaagaattcaacatcaattcaacgaagcagcttggtaccatattattcgaaaaactgaagcttcccgttgtaaaaagtacaaagaccggatactccaccgacgtcgaggttcttgaagagctttattacaagcatgatataataccatgcataatagaataccgccagcttacaaaactttacaccacctacgccgaaggtcttgaaaaagtgataaatcctgtaaccggtaaaattcattcaagttttaaccagacggttacggctacaggccgcatcagcagtaccgaaccaaatttacagaatatcccagtcagacacgaaatgggaagggaaatacggaaagcttttattccgtcgtcggaaaacgctgtttttgttgatgccgattattcacagatagagcttcgcgtgcttgcccatataacaggcgatgaagccctgataaatgctttcgttaagggggaagatattcatacggccacggcgtcgctggtatttgacgtagctcccgaagatgtgacgccggaactgcgcagaaaggcaaaagccgtaaatttcggcatagtgtacgggatcagtgattacgggctggcacgggatttgggaattacccggaaggaagcaaagcggtatatagacgactattttgccaaataccccaaagtaaaaacctatgtggatgaaattgtgcgggtcggccaggaacaggggtatgtggaaactctgttccacagaagaagataccttcccgagcttgcatctaaaaattttcaccagcgttctatgggaaaaagggttgcaatgaatacgcccatacagggcactgcagccgatattattaaaattgcgatggtgaaggtatacaaggctttgaaagaatccggccttaaatccaggcttatcctccaggtccatgacgaacttgttattgagacttttgaagacgaactggagactgtcaaggaacttgtcaaaaagtgcatggaagaggccgttgaattgagtgtgccgcttgttgtcgacgtttcaatcgggaaaaactggtatgaagcctcctgatatggatcc

SEQ ID NO: 419 - DNA, 2772 bp, Artificial Sequence
  Description of Artificial Sequence: Synthetic Clostridium stercorarium DNA Polymerase F830P
atgaaatacctgctgccgaccgctgctgctggtctgctgctcctcgctgcccagccggcgatggccatggatccaaaaataatccttatagacggaaacagtattttaaaccgcggtttttatgccctgtcggggcgatccatgctgactacgtccacaggtctgtataccaatgcggttttcgcttttgtaaatatattgaacaaatatatcgaagaggaaaaccctgattatattgccgttgctttcgatcttagggcaaaaactttccggcacggtctatatgagggatacaaagcgcagcggaaaggcatgcccgatgaacttgcaatgcagatacccctcgcgaaggaagtactgagggcgatgaatattgccataatagagcatgaaggttatgaagccgacgatataatcggcagcctttcgttaaaggccgaaaaagagaattttgacgtaataatccttacgggggacagggattctttccagctgatcagcgacagggtgaaagttatcctgccttcgacgaaagccggaaaaacagagaccaacgtatatgataaacaggccatcattgacaaatacggagttttaccccatcagcttattgacgttaaaggcttaatgggagattcgtcagataatatacccggcgttccgggagtgggtgagaaaacggcgttaagccttatttcagcctacggtacactggaaggtgtttacgagcatattgatgaaataaaacagcctaagctgaaagcatcgctgattgaatataaggatcaggcgtttttaagccgtaagctgggtactattgtaagaaatctggagctgtgtgcttcgctggaggatctgaaaagaaaagaaataaaccgcaaagagcttttgaatgttttcagaaaactcgaatttgaaagtatcatatcaaaaatgaatcttgcttccgctgaggtgacagaattacctcccgcgccggaagagcttaaaataacccatatttcagcggcagaggatcttaagaaatggattgcttacctgcttaaccagaaaaacatttccgtccttcaactgattgaccgggaggattcatacagttcccgtctttcagggctggctttgtgcaccggggatgaggttttttatatcgagaccgggactgcactccccgagaatttgattgcaacagagctgaaagaactgtggcagaatgaaaatattcacaaaatcggacacaatataaaagaatttataacctggctgctgaaacacgatgttgaactgaacggcctttatttcgacactatgattgccgaatacctgatagattccataagaaacggctatcctatagcaagcctttctcacaaatacctgaatcgcagcgttccgtcgctggacgaacttttgggcaagggaaagggagcaaaaaagtactctgaaattccgcccgaaaggctgaaagattacagcgcttataacgtcaaagccatttttgacatatggccgatgcagaaaaaagttcttcaggaaaaccggcaggaggagctttttaatgacatagagcttcctcttataaccgtacttgccagtatggaataccacggtttcaaagttgacgccgcaaaacttcacgaatacggcgaagttcttctgtcacgcataaaagacctggaaaaggtaatttacatgctggccggtgaagaattcaacatcaattcaacgaagcagcttggtaccatattattcgaaaaactgaagcttcccgttgtaaaaagtacaaagaccggatactccaccgacgtcgaggttcttgaagagctttattacaagcatgatataataccatgcataatagaataccgccagcttacaaaactttacaccacctacgccgaaggtcttgaaaaagtgataaatcctgtaaccggtaaaattcattcaagttttaaccagacggttacggctacaggccgcatcagcagtaccgaaccaaatttacagaatatcccagtcagacacgaaatgggaagggaaatacggaaagcttttattccgtcgtcggaaaacgctgtttttgttgatgccgattattcacagatagagcttcgcgtgcttgcccatataacaggcgatgaagccctgataaatgctttcgttaagggggaagatattcatacggccacggcgtcgctggtatttgacgtagctcccgaagatgtgacgccggaactgcgcagaaaggcaaaagccgtaaatttcggcatagtgtacgggatcagtgattacgggctggcacgggatttgggaattacccggaaggaagcaaagcggtatatagacgactattttgccaaataccccaaagtaaaaacctatgtggatgaaattgtgcgggtcggccaggaacaggggtatgtggaaactctgttccacagaagaagataccttcccgagcttgcatctaaaaattttcaccagcgttctcctggaaaaagggttgcaatgaatacgcccatacagggcactgcagccgatattattaaaattgcgatggtgaaggtatacaaggctttgaaagaatccggccttaaatccaggcttatcctccaggtccatgacgaacttgttattgagacttttgaagacgaactggagactgtcaaggaacttgtcaaaaagtgcatggaagaggccgttgaattgagtgtgccgcttgttgtcgacgtttcaatcgggaaaaactggtatgaagcctcctgatatggatcc

SEQ ID NO: 420 - DNA, 2772 bp, Artificial Sequence
  Description of Artificial Sequence: Synthetic Clostridium stercorarium DNA Polymerase F830S
atgaaatacctgctgccgaccgctgctgctggtctgctgctcctcgctgcccagccggcgatggccatggatccaaaaataatccttatagacggaaacagtattttaaaccgcggtttttatgccctgtcggggcgatccatgctgactacgtccacaggtctgtataccaatgcggttttcgcttttgtaaatatattgaacaaatatatcgaagaggaaaaccctgattatattgccgttgctttcgatcttagggcaaaaactttccggcacggtctatatgagggatacaaagcgcagcggaaaggcatgcccgatgaacttgcaatgcagatacccctcgcgaaggaagtactgagggcgatgaatattgccataatagagcatgaaggttatgaagccgacgatataatcggcagcctttcgttaaaggccgaaaaagagaattttgacgtaataatccttacgggggacagggattctttccagctgatcagcgacagggtgaaagttatcctgccttcgacgaaagccggaaaaacagagaccaacgtatatgataaacaggccatcattgacaaatacggagttttaccccatcagcttattgacgttaaaggcttaatgggagattcgtcagataatatacccggcgttccgggagtgggtgagaaaacggcgttaagccttatttcagcctacggtacactggaaggtgtttacgagcatattgatgaaataaaacagcctaagctgaaagcatcgctgattgaatataaggatcaggcgtttttaagccgtaagctgggtactattgtaagaaatctggagctgtgtgcttcgctggaggatctgaaaagaaaagaaataaaccgcaaagagcttttgaatgttttcagaaaactcgaatttgaaagtatcatatcaaaaatgaatcttgcttccgctgaggtgacagaattacctcccgcgccggaagagcttaaaataacccatatttcagcggcagaggatcttaagaaatggattgcttacctgcttaaccagaaaaacatttccgtccttcaactgattgaccgggaggattcatacagttcccgtctttcagggctggctttgtgcaccggggatgaggttttttatatcgagaccgggactgcactccccgagaatttgattgcaacagagctgaaagaactgtggcagaatgaaaatattcacaaaatcggacacaatataaaagaatttataacctggctgctgaaacacgatgttgaactgaacggcctttatttcgacactatgattgccgaatacctgatagattccataagaaacggctatcctatagcaagcctttctcacaaatacctgaatcgcagcgttccgtcgctggacgaacttttgggcaagggaaagggagcaaaaaagtactctgaaattccgcccgaaaggctgaaagattacagcgcttataacgtcaaagccatttttgacatatggccgatgcagaaaaaagttcttcaggaaaaccggcaggaggagctttttaatgacatagagcttcctcttataaccgtacttgccagtatggaataccacggtttcaaagttgacgccgcaaaacttcacgaatacggcgaagttcttctgtcacgcataaaagacctggaaaaggtaatttacatgctggccggtgaagaattcaacatcaattcaacgaagcagcttggtaccatattattcgaaaaactgaagcttcccgttgtaaaaagtacaaagaccggatactccaccgacgtcgaggttcttgaagagctttattacaagcatgatataataccatgcataatagaataccgccagcttacaaaactttacaccacctacgccgaaggtcttgaaaaagtgataaatcctgtaaccggtaaaattcattcaagttttaaccagacggttacggctacaggccgcatcagcagtaccgaaccaaatttacagaatatcccagtcagacacgaaatgggaagggaaatacggaaagcttttattccgtcgtcggaaaacgctgtttttgttgatgccgattattcacagatagagcttcgcgtgcttgcccatataacaggcgatgaagccctgataaatgctttcgttaagggggaagatattcatacggccacggcgtcgctggtatttgacgtagctcccgaagatgtgacgccggaactgcgcagaaaggcaaaagccgtaaatttcggcatagtgtacgggatcagtgattacgggctggcacgggatttgggaattacccggaaggaagcaaagcggtatatagacgactattttgccaaataccccaaagtaaaaacctatgtggatgaaattgtgcgggtcggccaggaacaggggtatgtggaaactctgttccacagaagaagataccttcccgagcttgcatctaaaaattttcaccagcgttcttctggaaaaagggttgcaatgaatacgcccatacagggcactgcagccgatattattaaaattgcgatggtgaaggtatacaaggctttgaaagaatccggccttaaatccaggcttatcctccaggtccatgacgaacttgttattgagacttttgaagacgaactggagactgtcaaggaacttgtcaaaaagtgcatggaagaggccgttgaattgagtgtgccgcttgttgtcgacgtttcaatcgggaaaaactggtatgaagcctcctgatatggatcc

SEQ ID NO: 421 - DNA, 2772 bp, Artificial Sequence
  Description of Artificial Sequence: Synthetic Clostridium stercorarium DNA Polymerase F830T
atgaaatacctgctgccgaccgctgctgctggtctgctgctcctcgctgcccagccggcgatggccatggatccaaaaataatccttatagacggaaacagtattttaaaccgcggtttttatgccctgtcggggcgatccatgctgactacgtccacaggtctgtataccaatgcggttttcgcttttgtaaatatattgaacaaatatatcgaagaggaaaaccctgattatattgccgttgctttcgatcttagggcaaaaactttccggcacggtctatatgagggatacaaagcgcagcggaaaggcatgcccgatgaacttgcaatgcagatacccctcgcgaaggaagtactgagggcgatgaatattgccataatagagcatgaaggttatgaagccgacgatataatcggcagcctttcgttaaaggccgaaaaagagaattttgacgtaataatccttacgggggacagggattctttccagctgatcagcgacagggtgaaagttatcctgccttcgacgaaagccggaaaaacagagaccaacgtatatgataaacaggccatcattgacaaatacggagttttaccccatcagcttattgacgttaaaggcttaatgggagattcgtcagataatatacccggcgttccgggagtgggtgagaaaacggcgttaagccttatttcagcctacggtacactggaaggtgtttacgagcatattgatgaaataaaacagcctaagctgaaagcatcgctgattgaatataaggatcaggcgtttttaagccgtaagctgggtactattgtaagaaatctggagctgtgtgcttcgctggaggatctgaaaagaaaagaaataaaccgcaaagagcttttgaatgttttcagaaaactcgaatttgaaagtatcatatcaaaaatgaatcttgcttccgctgaggtgacagaattacctcccgcgccggaagagcttaaaataacccatatttcagcggcagaggatcttaagaaatggattgcttacctgcttaaccagaaaaacatttccgtccttcaactgattgaccgggaggattcatacagttcccgtctttcagggctggctttgtgcaccggggatgaggttttttatatcgagaccgggactgcactccccgagaatttgattgcaacagagctgaaagaactgtggcagaatgaaaatattcacaaaatcggacacaatataaaagaatttataacctggctgctgaaacacgatgttgaactgaacggcctttatttcgacactatgattgccgaatacctgatagattccataagaaacggctatcctatagcaagcctttctcacaaatacctgaatcgcagcgttccgtcgctggacgaacttttgggcaagggaaagggagcaaaaaagtactctgaaattccgcccgaaaggctgaaagattacagcgcttataacgtcaaagccatttttgacatatggccgatgcagaaaaaagttcttcaggaaaaccggcaggaggagctttttaatgacatagagcttcctcttataaccgtacttgccagtatggaataccacggtttcaaagttgacgccgcaaaacttcacgaatacggcgaagttcttctgtcacgcataaaagacctggaaaaggtaatttacatgctggccggtgaagaattcaacatcaattcaacgaagcagcttggtaccatattattcgaaaaactgaagcttcccgttgtaaaaagtacaaagaccggatactccaccgacgtcgaggttcttgaagagctttattacaagcatgatataataccatgcataatagaataccgccagcttacaaaactttacaccacctacgccgaaggtcttgaaaaagtgataaatcctgtaaccggtaaaattcattcaagttttaaccagacggttacggctacaggccgcatcagcagtaccgaaccaaatttacagaatatcccagtcagacacgaaatgggaagggaaatacggaaagcttttattccgtcgtcggaaaacgctgtttttgttgatgccgattattcacagatagagcttcgcgtgcttgcccatataacaggcgatgaagccctgataaatgctttcgttaagggggaagatattcatacggccacggcgtcgctggtatttgacgtagctcccgaagatgtgacgccggaactgcgcagaaaggcaaaagccgtaaatttcggcatagtgtacgggatcagtgattacgggctggcacgggatttgggaattacccggaaggaagcaaagcggtatatagacgactattttgccaaataccccaaagtaaaaacctatgtggatgaaattgtgcgggtcggccaggaacaggggtatgtggaaactctgttccacagaagaagataccttcccgagcttgcatctaaaaattttcaccagcgttctactggaaaaagggttgcaatgaatacgcccatacagggcactgcagccgatattattaaaattgcgatggtgaaggtatacaaggctttgaaagaatccggccttaaatccaggcttatcctccaggtccatgacgaacttgttattgagacttttgaagacgaactggagactgtcaaggaacttgtcaaaaagtgcatggaagaggccgttgaattgagtgtgccgcttgttgtcgacgtttcaatcgggaaaaactggtatgaagcctcctgatatggatcc

SEQ ID NO: 422 - DNA, 2772 bp, Artificial Sequence
  Description of Artificial Sequence: Synthetic Clostridium stercorarium DNA Polymerase F830W
atgaaatacctgctgccgaccgctgctgctggtctgctgctcctcgctgcccagccggcgatggccatggatccaaaaataatccttatagacggaaacagtattttaaaccgcggtttttatgccctgtcggggcgatccatgctgactacgtccacaggtctgtataccaatgcggttttcgcttttgtaaatatattgaacaaatatatcgaagaggaaaaccctgattatattgccgttgctttcgatcttagggcaaaaactttccggcacggtctatatgagggatacaaagcgcagcggaaaggcatgcccgatgaacttgcaatgcagatacccctcgcgaaggaagtactgagggcgatgaatattgccataatagagcatgaaggttatgaagccgacgatataatcggcagcctttcgttaaaggccgaaaaagagaattttgacgtaataatccttacgggggacagggattctttccagctgatcagcgacagggtgaaagttatcctgccttcgacgaaagccggaaaaacagagaccaacgtatatgataaacaggccatcattgacaaatacggagttttaccccatcagcttattgacgttaaaggcttaatgggagattcgtcagataatatacccggcgttccgggagtgggtgagaaaacggcgttaagccttatttcagcctacggtacactggaaggtgtttacgagcatattgatgaaataaaacagcctaagctgaaagcatcgctgattgaatataaggatcaggcgtttttaagccgtaagctgggtactattgtaagaaatctggagctgtgtgcttcgctggaggatctgaaaagaaaagaaataaaccgcaaagagcttttgaatgttttcagaaaactcgaatttgaaagtatcatatcaaaaatgaatcttgcttccgctgaggtgacagaattacctcccgcgccggaagagcttaaaataacccatatttcagcggcagaggatcttaagaaatggattgcttacctgcttaaccagaaaaacatttccgtccttcaactgattgaccgggaggattcatacagttcccgtctttcagggctggctttgtgcaccggggatgaggttttttatatcgagaccgggactgcactccccgagaatttgattgcaacagagctgaaagaactgtggcagaatgaaaatattcacaaaatcggacacaatataaaagaatttataacctggctgctgaaacacgatgttgaactgaacggcctttatttcgacactatgattgccgaatacctgatagattccataagaaacggctatcctatagcaagcctttctcacaaatacctgaatcgcagcgttccgtcgctggacgaacttttgggcaagggaaagggagcaaaaaagtactctgaaattccgcccgaaaggctgaaagattacagcgcttataacgtcaaagccatttttgacatatggccgatgcagaaaaaagttcttcaggaaaaccggcaggaggagctttttaatgacatagagcttcctcttataaccgtacttgccagtatggaataccacggtttcaaagttgacgccgcaaaacttcacgaatacggcgaagttcttctgtcacgcataaaagacctggaaaaggtaatttacatgctggccggtgaagaattcaacatcaattcaacgaagcagcttggtaccatattattcgaaaaactgaagcttcccgttgtaaaaagtacaaagaccggatactccaccgacgtcgaggttcttgaagagctttattacaagcatgatataataccatgcataatagaataccgccagcttacaaaactttacaccacctacgccgaaggtcttgaaaaagtgataaatcctgtaaccggtaaaattcattcaagttttaaccagacggttacggctacaggccgcatcagcagtaccgaaccaaatttacagaatatcccagtcagacacgaaatgggaagggaaatacggaaagcttttattccgtcgtcggaaaacgctgtttttgttgatgccgattattcacagatagagcttcgcgtgcttgcccatataacaggcgatgaagccctgataaatgctttcgttaagggggaagatattcatacggccacggcgtcgctggtatttgacgtagctcccgaagatgtgacgccggaactgcgcagaaaggcaaaagccgtaaatttcggcatagtgtacgggatcagtgattacgggctggcacgggatttgggaattacccggaaggaagcaaagcggtatatagacgactattttgccaaataccccaaagtaaaaacctatgtggatgaaattgtgcgggtcggccaggaacaggggtatgtggaaactctgttccacagaagaagataccttcccgagcttgcatctaaaaattttcaccagcgttcttggggaaaaagggttgcaatgaatacgcccatacagggcactgcagccgatattattaaaattgcgatggtgaaggtatacaaggctttgaaagaatccggccttaaatccaggcttatcctccaggtccatgacgaacttgttattgagacttttgaagacgaactggagactgtcaaggaacttgtcaaaaagtgcatggaagaggccgttgaattgagtgtgccgcttgttgtcgacgtttcaatcgggaaaaactggtatgaagcctcctgatatggatcc

SEQ ID NO: 423 - DNA, 2772 bp, Artificial Sequence
  Description of Artificial Sequence: Synthetic Clostridium stercorarium DNA Polymerase F830Y
atgaaatacctgctgccgaccgctgctgctggtctgctgctcctcgctgcccagccggcgatggccatggatccaaaaataatccttatagacggaaacagtattttaaaccgcggtttttatgccctgtcggggcgatccatgctgactacgtccacaggtctgtataccaatgcggttttcgcttttgtaaatatattgaacaaatatatcgaagaggaaaaccctgattatattgccgttgctttcgatcttagggcaaaaactttccggcacggtctatatgagggatacaaagcgcagcggaaaggcatgcccgatgaacttgcaatgcagatacccctcgcgaaggaagtactgagggcgatgaatattgccataatagagcatgaaggttatgaagccgacgatataatcggcagcctttcgttaaaggccgaaaaagagaattttgacgtaataatccttacgggggacagggattctttccagctgatcagcgacagggtgaaagttatcctgccttcgacgaaagccggaaaaacagagaccaacgtatatgataaacaggccatcattgacaaatacggagttttaccccatcagcttattgacgttaaaggcttaatgggagattcgtcagataatatacccggcgttccgggagtgggtgagaaaacggcgttaagccttatttcagcctacggtacactggaaggtgtttacgagcatattgatgaaataaaacagcctaagctgaaagcatcgctgattgaatataaggatcaggcgtttttaagccgtaagctgggtactattgtaagaaatctggagctgtgtgcttcgctggaggatctgaaaagaaaagaaataaaccgcaaagagcttttgaatgttttcagaaaactcgaatttgaaagtatcatatcaaaaatgaatcttgcttccgctgaggtgacagaattacctcccgcgccggaagagcttaaaataacccatatttcagcggcagaggatcttaagaaatggattgcttacctgcttaaccagaaaaacatttccgtccttcaactgattgaccgggaggattcatacagttcccgtctttcagggctggctttgtgcaccggggatgaggttttttatatcgagaccgggactgcactccccgagaatttgattgcaacagagctgaaagaactgtggcagaatgaaaatattcacaaaatcggacacaatataaaagaatttataacctggctgctgaaacacgatgttgaactgaacggcctttatttcgacactatgattgccgaatacctgatagattccataagaaacggctatcctatagcaagcctttctcacaaatacctgaatcgcagcgttccgtcgctggacgaacttttgggcaagggaaagggagcaaaaaagtactctgaaattccgcccgaaaggctgaaagattacagcgcttataacgtcaaagccatttttgacatatggccgatgcagaaaaaagttcttcaggaaaaccggcaggaggagctttttaatgacatagagcttcctcttataaccgtacttgccagtatggaataccacggtttcaaagttgacgccgcaaaacttcacgaatacggcgaagttcttctgtcacgcataaaagacctggaaaaggtaatttacatgctggccggtgaagaattcaacatcaattcaacgaagcagcttggtaccatattattcgaaaaactgaagcttcccgttgtaaaaagtacaaagaccggatactccaccgacgtcgaggttcttgaagagctttattacaagcatgatataataccatgcataatagaataccgccagcttacaaaactttacaccacctacgccgaaggtcttgaaaaagtgataaatcctgtaaccggtaaaattcattcaagttttaaccagacggttacggctacaggccgcatcagcagtaccgaaccaaatttacagaatatcccagtcagacacgaaatgggaagggaaatacggaaagcttttattccgtcgtcggaaaacgctgtttttgttgatgccgattattcacagatagagcttcgcgtgcttgcccatataacaggcgatgaagccctgataaatgctttcgttaagggggaagatattcatacggccacggcgtcgctggtatttgacgtagctcccgaagatgtgacgccggaactgcgcagaaaggcaaaagccgtaaatttcggcatagtgtacgggatcagtgattacgggctggcacgggatttgggaattacccggaaggaagcaaagcggtatatagacgactattttgccaaataccccaaagtaaaaacctatgtggatgaaattgtgcgggtcggccaggaacaggggtatgtggaaactctgttccacagaagaagataccttcccgagcttgcatctaaaaattttcaccagcgttcttatggaaaaagggttgcaatgaatacgcccatacagggcactgcagccgatattattaaaattgcgatggtgaaggtatacaaggctttgaaagaatccggccttaaatccaggcttatcctccaggtccatgacgaacttgttattgagacttttgaagacgaactggagactgtcaaggaacttgtcaaaaagtgcatggaagaggccgttgaattgagtgtgccgcttgttgtcgacgtttcaatcgggaaaaactggtatgaagcctcctgatatggatcc

SEQ ID NO: 424 - DNA, 2772 bp, Artificial Sequence
  Description of Artificial Sequence: Synthetic Clostridium stercorarium DNA Polymerase F830V
atgaaatacctgctgccgaccgctgctgctggtctgctgctcctcgctgcccagccggcgatggccatggatccaaaaataatccttatagacggaaacagtattttaaaccgcggtttttatgccctgtcggggcgatccatgctgactacgtccacaggtctgtataccaatgcggttttcgcttttgtaaatatattgaacaaatatatcgaagaggaaaaccctgattatattgccgttgctttcgatcttagggcaaaaactttccggcacggtctatatgagggatacaaagcgcagcggaaaggcatgcccgatgaacttgcaatgcagatacccctcgcgaaggaagtactgagggcgatgaatattgccataatagagcatgaaggttatgaagccgacgatataatcggcagcctttcgttaaaggccgaaaaagagaattttgacgtaataatccttacgggggacagggattctttccagctgatcagcgacagggtgaaagttatcctgccttcgacgaaagccggaaaaacagagaccaacgtatatgataaacaggccatcattgacaaatacggagttttaccccatcagcttattgacgttaaaggcttaatgggagattcgtcagataatatacccggcgttccgggagtgggtgagaaaacggcgttaagccttatttcagcctacggtacactggaaggtgtttacgagcatattgatgaaataaaacagcctaagctgaaagcatcgctgattgaatataaggatcaggcgtttttaagccgtaagctgggtactattgtaagaaatctggagctgtgtgcttcgctggaggatctgaaaagaaaagaaataaaccgcaaagagcttttgaatgttttcagaaaactcgaatttgaaagtatcatatcaaaaatgaatcttgcttccgctgaggtgacagaattacctcccgcgccggaagagcttaaaataacccatatttcagcggcagaggatcttaagaaatggattgcttacctgcttaaccagaaaaacatttccgtccttcaactgattgaccgggaggattcatacagttcccgtctttcagggctggctttgtgcaccggggatgaggttttttatatcgagaccgggactgcactccccgagaatttgattgcaacagagctgaaagaactgtggcagaatgaaaatattcacaaaatcggacacaatataaaagaatttataacctggctgctgaaacacgatgttgaactgaacggcctttatttcgacactatgattgccgaatacctgatagattccataagaaacggctatcctatagcaagcctttctcacaaatacctgaatcgcagcgttccgtcgctggacgaacttttgggcaagggaaagggagcaaaaaagtactctgaaattccgcccgaaaggctgaaagattacagcgcttataacgtcaaagccatttttgacatatggccgatgcagaaaaaagttcttcaggaaaaccggcaggaggagctttttaatgacatagagcttcctcttataaccgtacttgccagtatggaataccacggtttcaaagttgacgccgcaaaacttcacgaatacggcgaagttcttctgtcacgcataaaagacctggaaaaggtaatttacatgctggccggtgaagaattcaacatcaattcaacgaagcagcttggtaccatattattcgaaaaactgaagcttcccgttgtaaaaagtacaaagaccggatactccaccgacgtcgaggttcttgaagagctttattacaagcatgatataataccatgcataatagaataccgccagcttacaaaactttacaccacctacgccgaaggtcttgaaaaagtgataaatcctgtaaccggtaaaattcattcaagttttaaccagacggttacggctacaggccgcatcagcagtaccgaaccaaatttacagaatatcccagtcagacacgaaatgggaagggaaatacggaaagcttttattccgtcgtcggaaaacgctgtttttgttgatgccgattattcacagatagagcttcgcgtgcttgcccatataacaggcgatgaagccctgataaatgctttcgttaagggggaagatattcatacggccacggcgtcgctggtatttgacgtagctcccgaagatgtgacgccggaactgcgcagaaaggcaaaagccgtaaatttcggcatagtgtacgggatcagtgattacgggctggcacgggatttgggaattacccggaaggaagcaaagcggtatatagacgactattttgccaaataccccaaagtaaaaacctatgtggatgaaattgtgcgggtcggccaggaacaggggtatgtggaaactctgttccacagaagaagataccttcccgagcttgcatctaaaaattttcaccagcgttctgttggaaaaagggttgcaatgaatacgcccatacagggcactgcagccgatattattaaaattgcgatggtgaaggtatacaaggctttgaaagaatccggccttaaatccaggcttatcctccaggtccatgacgaacttgttattgagacttttgaagacgaactggagactgtcaaggaacttgtcaaaaagtgcatggaagaggccgttgaattgagtgtgccgcttgttgtcgacgtttcaatcgggaaaaactggtatgaagcctcctgatatggatcc

SEQ ID NO: 425 - DNA, 2772 bp, Artificial Sequence
  Description of Artificial Sequence: Synthetic Clostridium stercorarium DNA Polymerase G831A
atgaaatacctgctgccgaccgctgctgctggtctgctgctcctcgctgcccagccggcgatggccatggatccaaaaataatccttatagacggaaacagtattttaaaccgcggtttttatgccctgtcggggcgatccatgctgactacgtccacaggtctgtataccaatgcggttttcgcttttgtaaatatattgaacaaatatatcgaagaggaaaaccctgattatattgccgttgctttcgatcttagggcaaaaactttccggcacggtctatatgagggatacaaagcgcagcggaaaggcatgcccgatgaacttgcaatgcagatacccctcgcgaaggaagtactgagggcgatgaatattgccataatagagcatgaaggttatgaagccgacgatataatcggcagcctttcgttaaaggccgaaaaagagaattttgacgtaataatccttacgggggacagggattctttccagctgatcagcgacagggtgaaagttatcctgccttcgacgaaagccggaaaaacagagaccaacgtatatgataaacaggccatcattgacaaatacggagttttaccccatcagcttattgacgttaaaggcttaatgggagattcgtcagataatatacccggcgttccgggagtgggtgagaaaacggcgttaagccttatttcagcctacggtacactggaaggtgtttacgagcatattgatgaaataaaacagcctaagctgaaagcatcgctgattgaatataaggatcaggcgtttttaagccgtaagctgggtactattgtaagaaatctggagctgtgtgcttcgctggaggatctgaaaagaaaagaaataaaccgcaaagagcttttgaatgttttcagaaaactcgaatttgaaagtatcatatcaaaaatgaatcttgcttccgctgaggtgacagaattacctcccgcgccggaagagcttaaaataacccatatttcagcggcagaggatcttaagaaatggattgcttacctgcttaaccagaaaaacatttccgtccttcaactgattgaccgggaggattcatacagttcccgtctttcagggctggctttgtgcaccggggatgaggttttttatatcgagaccgggactgcactccccgagaatttgattgcaacagagctgaaagaactgtggcagaatgaaaatattcacaaaatcggacacaatataaaagaatttataacctggctgctgaaacacgatgttgaactgaacggcctttatttcgacactatgattgccgaatacctgatagattccataagaaacggctatcctatagcaagcctttctcacaaatacctgaatcgcagcgttccgtcgctggacgaacttttgggcaagggaaagggagcaaaaaagtactctgaaattccgcccgaaaggctgaaagattacagcgcttataacgtcaaagccatttttgacatatggccgatgcagaaaaaagttcttcaggaaaaccggcaggaggagctttttaatgacatagagcttcctcttataaccgtacttgccagtatggaataccacggtttcaaagttgacgccgcaaaacttcacgaatacggcgaagttcttctgtcacgcataaaagacctggaaaaggtaatttacatgctggccggtgaagaattcaacatcaattcaacgaagcagcttggtaccatattattcgaaaaactgaagcttcccgttgtaaaaagtacaaagaccggatactccaccgacgtcgaggttcttgaagagctttattacaagcatgatataataccatgcataatagaataccgccagcttacaaaactttacaccacctacgccgaaggtcttgaaaaagtgataaatcctgtaaccggtaaaattcattcaagttttaaccagacggttacggctacaggccgcatcagcagtaccgaaccaaatttacagaatatcccagtcagacacgaaatgggaagggaaatacggaaagcttttattccgtcgtcggaaaacgctgtttttgttgatgccgattattcacagatagagcttcgcgtgcttgcccatataacaggcgatgaagccctgataaatgctttcgttaagggggaagatattcatacggccacggcgtcgctggtatttgacgtagctcccgaagatgtgacgccggaactgcgcagaaaggcaaaagccgtaaatttcggcatagtgtacgggatcagtgattacgggctggcacgggatttgggaattacccggaaggaagcaaagcggtatatagacgactattttgccaaataccccaaagtaaaaacctatgtggatgaaattgtgcgggtcggccaggaacaggggtatgtggaaactctgttccacagaagaagataccttcccgagcttgcatctaaaaattttcaccagcgttctttcgctaaaagggttgcaatgaatacgcccatacagggcactgcagccgatattattaaaattgcgatggtgaaggtatacaaggctttgaaagaatccggccttaaatccaggcttatcctccaggtccatgacgaacttgttattgagacttttgaagacgaactggagactgtcaaggaacttgtcaaaaagtgcatggaagaggccgttgaattgagtgtgccgcttgttgtcgacgtttcaatcgggaaaaactggtatgaagcctcctgatatggatcc

SEQ ID NO: 426 - DNA, 2772 bp, Artificial Sequence
  Description of Artificial Sequence: Synthetic Clostridium stercorarium DNA Polymerase G831R
atgaaatacctgctgccgaccgctgctgctggtctgctgctcctcgctgcccagccggcgatggccatggatccaaaaataatccttatagacggaaacagtattttaaaccgcggtttttatgccctgtcggggcgatccatgctgactacgtccacaggtctgtataccaatgcggttttcgcttttgtaaatatattgaacaaatatatcgaagaggaaaaccctgattatattgccgttgctttcgatcttagggcaaaaactttccggcacggtctatatgagggatacaaagcgcagcggaaaggcatgcccgatgaacttgcaatgcagatacccctcgcgaaggaagtactgagggcgatgaatattgccataatagagcatgaaggttatgaagccgacgatataatcggcagcctttcgttaaaggccgaaaaagagaattttgacgtaataatccttacgggggacagggattctttccagctgatcagcgacagggtgaaagttatcctgccttcgacgaaagccggaaaaacagagaccaacgtatatgataaacaggccatcattgacaaatacggagttttaccccatcagcttattgacgttaaaggcttaatgggagattcgtcagataatatacccggcgttccgggagtgggtgagaaaacggcgttaagccttatttcagcctacggtacactggaaggtgtttacgagcatattgatgaaataaaacagcctaagctgaaagcatcgctgattgaatataaggatcaggcgtttttaagccgtaagctgggtactattgtaagaaatctggagctgtgtgcttcgctggaggatctgaaaagaaaagaaataaaccgcaaagagcttttgaatgttttcagaaaactcgaatttgaaagtatcatatcaaaaatgaatcttgcttccgctgaggtgacagaattacctcccgcgccggaagagcttaaaataacccatatttcagcggcagaggatcttaagaaatggattgcttacctgcttaaccagaaaaacatttccgtccttcaactgattgaccgggaggattcatacagttcccgtctttcagggctggctttgtgcaccggggatgaggttttttatatcgagaccgggactgcactccccgagaatttgattgcaacagagctgaaagaactgtggcagaatgaaaatattcacaaaatcggacacaatataaaagaatttataacctggctgctgaaacacgatgttgaactgaacggcctttatttcgacactatgattgccgaatacctgatagattccataagaaacggctatcctatagcaagcctttctcacaaatacctgaatcgcagcgttccgtcgctggacgaacttttgggcaagggaaagggagcaaaaaagtactctgaaattccgcccgaaaggctgaaagattacagcgcttataacgtcaaagccatttttgacatatggccgatgcagaaaaaagttcttcaggaaaaccggcaggaggagctttttaatgacatagagcttcctcttataaccgtacttgccagtatggaataccacggtttcaaagttgacgccgcaaaacttcacgaatacggcgaagttcttctgtcacgcataaaagacctggaaaaggtaatttacatgctggccggtgaagaattcaacatcaattcaacgaagcagcttggtaccatattattcgaaaaactgaagcttcccgttgtaaaaagtacaaagaccggatactccaccgacgtcgaggttcttgaagagctttattacaagcatgatataataccatgcataatagaataccgccagcttacaaaactttacaccacctacgccgaaggtcttgaaaaagtgataaatcctgtaaccggtaaaattcattcaagttttaaccagacggttacggctacaggccgcatcagcagtaccgaaccaaatttacagaatatcccagtcagacacgaaatgggaagggaaatacggaaagcttttattccgtcgtcggaaaacgctgtttttgttgatgccgattattcacagatagagcttcgcgtgcttgcccatataacaggcgatgaagccctgataaatgctttcgttaagggggaagatattcatacggccacggcgtcgctggtatttgacgtagctcccgaagatgtgacgccggaactgcgcagaaaggcaaaagccgtaaatttcggcatagtgtacgggatcagtgattacgggctggcacgggatttgggaattacccggaaggaagcaaagcggtatatagacgactattttgccaaataccccaaagtaaaaacctatgtggatgaaattgtgcgggtcggccaggaacaggggtatgtggaaactctgttccacagaagaagataccttcccgagcttgcatctaaaaattttcaccagcgttctttccgtaaaagggttgcaatgaatacgcccatacagggcactgcagccgatattattaaaattgcgatggtgaaggtatacaaggctttgaaagaatccggccttaaatccaggcttatcctccaggtccatgacgaacttgttattgagacttttgaagacgaactggagactgtcaaggaacttgtcaaaaagtgcatggaagaggccgttgaattgagtgtgccgcttgttgtcgacgtttcaatcgggaaaaactggtatgaagcctcctgatatggatcc

SEQ ID NO: 427 - DNA, 2772 bp, Artificial Sequence
  Description of Artificial Sequence: Synthetic Clostridium stercorarium DNA Polymerase G831N
atgaaatacctgctgccgaccgctgctgctggtctgctgctcctcgctgcccagccggcgatggccatggatccaaaaataatccttatagacggaaacagtattttaaaccgcggtttttatgccctgtcggggcgatccatgctgactacgtccacaggtctgtataccaatgcggttttcgcttttgtaaatatattgaacaaatatatcgaagaggaaaaccctgattatattgccgttgctttcgatcttagggcaaaaactttccggcacggtctatatgagggatacaaagcgcagcggaaaggcatgcccgatgaacttgcaatgcagatacccctcgcgaaggaagtactgagggcgatgaatattgccataatagagcatgaaggttatgaagccgacgatataatcggcagcctttcgttaaaggccgaaaaagagaattttgacgtaataatccttacgggggacagggattctttccagctgatcagcgacagggtgaaagttatcctgccttcgacgaaagccggaaaaacagagaccaacgtatatgataaacaggccatcattgacaaatacggagttttaccccatcagcttattgacgttaaaggcttaatgggagattcgtcagataatatacccggcgttccgggagtgggtgagaaaacggcgttaagccttatttcagcctacggtacactggaaggtgtttacgagcatattgatgaaataaaacagcctaagctgaaagcatcgctgattgaatataaggatcaggcgtttttaagccgtaagctgggtactattgtaagaaatctggagctgtgtgcttcgctggaggatctgaaaagaaaagaaataaaccgcaaagagcttttgaatgttttcagaaaactcgaatttgaaagtatcatatcaaaaatgaatcttgcttccgctgaggtgacagaattacctcccgcgccggaagagcttaaaataacccatatttcagcggcagaggatcttaagaaatggattgcttacctgcttaaccagaaaaacatttccgtccttcaactgattgaccgggaggattcatacagttcccgtctttcagggctggctttgtgcaccggggatgaggttttttatatcgagaccgggactgcactccccgagaatttgattgcaacagagctgaaagaactgtggcagaatgaaaatattcacaaaatcggacacaatataaaagaatttataacctggctgctgaaacacgatgttgaactgaacggcctttatttcgacactatgattgccgaatacctgatagattccataagaaacggctatcctatagcaagcctttctcacaaatacctgaatcgcagcgttccgtcgctggacgaacttttgggcaagggaaagggagcaaaaaagtactctgaaattccgcccgaaaggctgaaagattacagcgcttataacgtcaaagccatttttgacatatggccgatgcagaaaaaagttcttcaggaaaaccggcaggaggagctttttaatgacatagagcttcctcttataaccgtacttgccagtatggaataccacggtttcaaagttgacgccgcaaaacttcacgaatacggcgaagttcttctgtcacgcataaaagacctggaaaaggtaatttacatgctggccggtgaagaattcaacatcaattcaacgaagcagcttggtaccatattattcgaaaaactgaagcttcccgttgtaaaaagtacaaagaccggatactccaccgacgtcgaggttcttgaagagctttattacaagcatgatataataccatgcataatagaataccgccagcttacaaaactttacaccacctacgccgaaggtcttgaaaaagtgataaatcctgtaaccggtaaaattcattcaagttttaaccagacggttacggctacaggccgcatcagcagtaccgaaccaaatttacagaatatcccagtcagacacgaaatgggaagggaaatacggaaagcttttattccgtcgtcggaaaacgctgtttttgttgatgccgattattcacagatagagcttcgcgtgcttgcccatataacaggcgatgaagccctgataaatgctttcgttaagggggaagatattcatacggccacggcgtcgctggtatttgacgtagctcccgaagatgtgacgccggaactgcgcagaaaggcaaaagccgtaaatttcggcatagtgtacgggatcagtgattacgggctggcacgggatttgggaattacccggaaggaagcaaagcggtatatagacgactattttgccaaataccccaaagtaaaaacctatgtggatgaaattgtgcgggtcggccaggaacaggggtatgtggaaactctgttccacagaagaagataccttcccgagcttgcatctaaaaattttcaccagcgttctttcaataaaagggttgcaatgaatacgcccatacagggcactgcagccgatattattaaaattgcgatggtgaaggtatacaaggctttgaaagaatccggccttaaatccaggcttatcctccaggtccatgacgaacttgttattgagacttttgaagacgaactggagactgtcaaggaacttgtcaaaaagtgcatggaagaggccgttgaattgagtgtgccgcttgttgtcgacgtttcaatcgggaaaaactggtatgaagcctcctgatatggatcc

SEQ ID NO: 428 - DNA, 2772 bp, Artificial Sequence
  Description of Artificial Sequence: Synthetic Clostridium stercorarium DNA Polymerase G831D
atgaaatacctgctgccgaccgctgctgctggtctgctgctcctcgctgcccagccggcgatggccatggatccaaaaataatccttatagacggaaacagtattttaaaccgcggtttttatgccctgtcggggcgatccatgctgactacgtccacaggtctgtataccaatgcggttttcgcttttgtaaatatattgaacaaatatatcgaagaggaaaaccctgattatattgccgttgctttcgatcttagggcaaaaactttccggcacggtctatatgagggatacaaagcgcagcggaaaggcatgcccgatgaacttgcaatgcagatacccctcgcgaaggaagtactgagggcgatgaatattgccataatagagcatgaaggttatgaagccgacgatataatcggcagcctttcgttaaaggccgaaaaagagaattttgacgtaataatccttacgggggacagggattctttccagctgatcagcgacagggtgaaagttatcctgccttcgacgaaagccggaaaaacagagaccaacgtatatgataaacaggccatcattgacaaatacggagttttaccccatcagcttattgacgttaaaggcttaatgggagattcgtcagataatatacccggcgttccgggagtgggtgagaaaacggcgttaagccttatttcagcctacggtacactggaaggtgtttacgagcatattgatgaaataaaacagcctaagctgaaagcatcgctgattgaatataaggatcaggcgtttttaagccgtaagctgggtactattgtaagaaatctggagctgtgtgcttcgctggaggatctgaaaagaaaagaaataaaccgcaaagagcttttgaatgttttcagaaaactcgaatttgaaagtatcatatcaaaaatgaatcttgcttccgctgaggtgacagaattacctcccgcgccggaagagcttaaaataacccatatttcagcggcagaggatcttaagaaatggattgcttacctgcttaaccagaaaaacatttccgtccttcaactgattgaccgggaggattcatacagttcccgtctttcagggctggctttgtgcaccggggatgaggttttttatatcgagaccgggactgcactccccgagaatttgattgcaacagagctgaaagaactgtggcagaatgaaaatattcacaaaatcggacacaatataaaagaatttataacctggctgctgaaacacgatgttgaactgaacggcctttatttcgacactatgattgccgaatacctgatagattccataagaaacggctatcctatagcaagcctttctcacaaatacctgaatcgcagcgttccgtcgctggacgaacttttgggcaagggaaagggagcaaaaaagtactctgaaattccgcccgaaaggctgaaagattacagcgcttataacgtcaaagccatttttgacatatggccgatgcagaaaaaagttcttcaggaaaaccggcaggaggagctttttaatgacatagagcttcctcttataaccgtacttgccagtatggaataccacggtttcaaagttgacgccgcaaaacttcacgaatacggcgaagttcttctgtcacgcataaaagacctggaaaaggtaatttacatgctggccggtgaagaattcaacatcaattcaacgaagcagcttggtaccatattattcgaaaaactgaagcttcccgttgtaaaaagtacaaagaccggatactccaccgacgtcgaggttcttgaagagctttattacaagcatgatataataccatgcataatagaataccgccagcttacaaaactttacaccacctacgccgaaggtcttgaaaaagtgataaatcctgtaaccggtaaaattcattcaagttttaaccagacggttacggctacaggccgcatcagcagtaccgaaccaaatttacagaatatcccagtcagacacgaaatgggaagggaaatacggaaagcttttattccgtcgtcggaaaacgctgtttttgttgatgccgattattcacagatagagcttcgcgtgcttgcccatataacaggcgatgaagccctgataaatgctttcgttaagggggaagatattcatacggccacggcgtcgctggtatttgacgtagctcccgaagatgtgacgccggaactgcgcagaaaggcaaaagccgtaaatttcggcatagtgtacgggatcagtgattacgggctggcacgggatttgggaattacccggaaggaagcaaagcggtatatagacgactattttgccaaataccccaaagtaaaaacctatgtggatgaaattgtgcgggtcggccaggaacaggggtatgtggaaactctgttccacagaagaagataccttcccgagcttgcatctaaaaattttcaccagcgttctttcgataaaagggttgcaatgaatacgcccatacagggcactgcagccgatattattaaaattgcgatggtgaaggtatacaaggctttgaaagaatccggccttaaatccaggcttatcctccaggtccatgacgaacttgttattgagacttttgaagacgaactggagactgtcaaggaacttgtcaaaaagtgcatggaagaggccgttgaattgagtgtgccgcttgttgtcgacgtttcaatcgggaaaaactggtatgaagcctcctgatatggatcc

SEQ ID NO: 429 - DNA, 2774 bp, Artificial Sequence
  Description of Artificial Sequence: Synthetic Clostridium stercorarium DNA Polymerase G831C
gcatgaaatacctgctgccgaccgctgctgctggtctgctgctcctcgctgcccagccggcgatggccatggatccaaaaataatccttatagacggaaacagtattttaaaccgcggtttttatgccctgtcggggcgatccatgctgactacgtccacaggtctgtataccaatgcggttttcgcttttgtaaatatattgaacaaatatatcgaagaggaaaaccctgattatattgccgttgctttcgatcttagggcaaaaactttccggcacggtctatatgagggatacaaagcgcagcggaaaggcatgcccgatgaacttgcaatgcagatacccctcgcgaaggaagtactgagggcgatgaatattgccataatagagcatgaaggttatgaagccgacgatataatcggcagcctttcgttaaaggccgaaaaagagaattttgacgtaataatccttacgggggacagggattctttccagctgatcagcgacagggtgaaagttatcctgccttcgacgaaagccggaaaaacagagaccaacgtatatgataaacaggccatcattgacaaatacggagttttaccccatcagcttattgacgttaaaggcttaatgggagattcgtcagataatatacccggcgttccgggagtgggtgagaaaacggcgttaagccttatttcagcctacggtacactggaaggtgtttacgagcatattgatgaaataaaacagcctaagctgaaagcatcgctgattgaatataaggatcaggcgtttttaagccgtaagctgggtactattgtaagaaatctggagctgtgtgcttcgctggaggatctgaaaagaaaagaaataaaccgcaaagagcttttgaatgttttcagaaaactcgaatttgaaagtatcatatcaaaaatgaatcttgcttccgctgaggtgacagaattacctcccgcgccggaagagcttaaaataacccatatttcagcggcagaggatcttaagaaatggattgcttacctgcttaaccagaaaaacatttccgtccttcaactgattgaccgggaggattcatacagttcccgtctttcagggctggctttgtgcaccggggatgaggttttttatatcgagaccgggactgcactccccgagaatttgattgcaacagagctgaaagaactgtggcagaatgaaaatattcacaaaatcggacacaatataaaagaatttataacctggctgctgaaacacgatgttgaactgaacggcctttatttcgacactatgattgccgaatacctgatagattccataagaaacggctatcctatagcaagcctttctcacaaatacctgaatcgcagcgttccgtcgctggacgaacttttgggcaagggaaagggagcaaaaaagtactctgaaattccgcccgaaaggctgaaagattacagcgcttataacgtcaaagccatttttgacatatggccgatgcagaaaaaagttcttcaggaaaaccggcaggaggagctttttaatgacatagagcttcctcttataaccgtacttgccagtatggaataccacggtttcaaagttgacgccgcaaaacttcacgaatacggcgaagttcttctgtcacgcataaaagacctggaaaaggtaatttacatgctggccggtgaagaattcaacatcaattcaacgaagcagcttggtaccatattattcgaaaaactgaagcttcccgttgtaaaaagtacaaagaccggatactccaccgacgtcgaggttcttgaagagctttattacaagcatgatataataccatgcataatagaataccgccagcttacaaaactttacaccacctacgccgaaggtcttgaaaaagtgataaatcctgtaaccggtaaaattcattcaagttttaaccagacggttacggctacaggccgcatcagcagtaccgaaccaaatttacagaatatcccagtcagacacgaaatgggaagggaaatacggaaagcttttattccgtcgtcggaaaacgctgtttttgttgatgccgattattcacagatagagcttcgcgtgcttgcccatataacaggcgatgaagccctgataaatgctttcgttaagggggaagatattcatacggccacggcgtcgctggtatttgacgtagctcccgaagatgtgacgccggaactgcgcagaaaggcaaaagccgtaaatttcggcatagtgtacgggatcagtgattacgggctggcacgggatttgggaattacccggaaggaagcaaagcggtatatagacgactattttgccaaataccccaaagtaaaaacctatgtggatgaaattgtgcgggtcggccaggaacaggggtatgtggaaactctgttccacagaagaagataccttcccgagcttgcatctaaaaattttcaccagcgttctttctgtaaaagggttgcaatgaatacgcccatacagggcactgcagccgatattattaaaattgcgatggtgaaggtatacaaggctttgaaagaatccggccttaaatccaggcttatcctccaggtccatgacgaacttgttattgagacttttgaagacgaactggagactgtcaaggaacttgtcaaaaagtgcatggaagaggccgttgaattgagtgtgccgcttgttgtcgacgtttcaatcgggaaaaactggtatgaagcctcctgatatggatcc

SEQ ID NO: 430 - DNA, 2772 bp, Artificial Sequence
  Description of Artificial Sequence: Synthetic Clostridium stercorarium DNA Polymerase G831E
atgaaatacctgctgccgaccgctgctgctggtctgctgctcctcgctgcccagccggcgatggccatggatccaaaaataatccttatagacggaaacagtattttaaaccgcggtttttatgccctgtcggggcgatccatgctgactacgtccacaggtctgtataccaatgcggttttcgcttttgtaaatatattgaacaaatatatcgaagaggaaaaccctgattatattgccgttgctttcgatcttagggcaaaaactttccggcacggtctatatgagggatacaaagcgcagcggaaaggcatgcccgatgaacttgcaatgcagatacccctcgcgaaggaagtactgagggcgatgaatattgccataatagagcatgaaggttatgaagccgacgatataatcggcagcctttcgttaaaggccgaaaaagagaattttgacgtaataatccttacgggggacagggattctttccagctgatcagcgacagggtgaaagttatcctgccttcgacgaaagccggaaaaacagagaccaacgtatatgataaacaggccatcattgacaaatacggagttttaccccatcagcttattgacgttaaaggcttaatgggagattcgtcagataatatacccggcgttccgggagtgggtgagaaaacggcgttaagccttatttcagcctacggtacactggaaggtgtttacgagcatattgatgaaataaaacagcctaagctgaaagcatcgctgattgaatataaggatcaggcgtttttaagccgtaagctgggtactattgtaagaaatctggagctgtgtgcttcgctggaggatctgaaaagaaaagaaataaaccgcaaagagcttttgaatgttttcagaaaactcgaatttgaaagtatcatatcaaaaatgaatcttgcttccgctgaggtgacagaattacctcccgcgccggaagagcttaaaataacccatatttcagcggcagaggatcttaagaaatggattgcttacctgcttaaccagaaaaacatttccgtccttcaactgattgaccgggaggattcatacagttcccgtctttcagggctggctttgtgcaccggggatgaggttttttatatcgagaccgggactgcactccccgagaatttgattgcaacagagctgaaagaactgtggcagaatgaaaatattcacaaaatcggacacaatataaaagaatttataacctggctgctgaaacacgatgttgaactgaacggcctttatttcgacactatgattgccgaatacctgatagattccataagaaacggctatcctatagcaagcctttctcacaaatacctgaatcgcagcgttccgtcgctggacgaacttttgggcaagggaaagggagcaaaaaagtactctgaaattccgcccgaaaggctgaaagattacagcgcttataacgtcaaagccatttttgacatatggccgatgcagaaaaaagttcttcaggaaaaccggcaggaggagctttttaatgacatagagcttcctcttataaccgtacttgccagtatggaataccacggtttcaaagttgacgccgcaaaacttcacgaatacggcgaagttcttctgtcacgcataaaagacctggaaaaggtaatttacatgctggccggtgaagaattcaacatcaattcaacgaagcagcttggtaccatattattcgaaaaactgaagcttcccgttgtaaaaagtacaaagaccggatactccaccgacgtcgaggttcttgaagagctttattacaagcatgatataataccatgcataatagaataccgccagcttacaaaactttacaccacctacgccgaaggtcttgaaaaagtgataaatcctgtaaccggtaaaattcattcaagttttaaccagacggttacggctacaggccgcatcagcagtaccgaaccaaatttacagaatatcccagtcagacacgaaatgggaagggaaatacggaaagcttttattccgtcgtcggaaaacgctgtttttgttgatgccgattattcacagatagagcttcgcgtgcttgcccatataacaggcgatgaagccctgataaatgctttcgttaagggggaagatattcatacggccacggcgtcgctggtatttgacgtagctcccgaagatgtgacgccggaactgcgcagaaaggcaaaagccgtaaatttcggcatagtgtacgggatcagtgattacgggctggcacgggatttgggaattacccggaaggaagcaaagcggtatatagacgactattttgccaaataccccaaagtaaaaacctatgtggatgaaattgtgcgggtcggccaggaacaggggtatgtggaaactctgttccacagaagaagataccttcccgagcttgcatctaaaaattttcaccagcgttctttcgaaaaaagggttgcaatgaatacgcccatacagggcactgcagccgatattattaaaattgcgatggtgaaggtatacaaggctttgaaagaatccggccttaaatccaggcttatcctccaggtccatgacgaacttgttattgagacttttgaagacgaactggagactgtcaaggaacttgtcaaaaagtgcatggaagaggccgttgaattgagtgtgccgcttgttgtcgacgtttcaatcgggaaaaactggtatgaagcctcctgatatggatcc

SEQ ID NO: 431 - DNA, 2772 bp, Artificial Sequence
  Description of Artificial Sequence: Synthetic Clostridium stercorarium DNA Polymerase G831Q
atgaaatacctgctgccgaccgctgctgctggtctgctgctcctcgctgcccagccggcgatggccatggatccaaaaataatccttatagacggaaacagtattttaaaccgcggtttttatgccctgtcggggcgatccatgctgactacgtccacaggtctgtataccaatgcggttttcgcttttgtaaatatattgaacaaatatatcgaagaggaaaaccctgattatattgccgttgctttcgatcttagggcaaaaactttccggcacggtctatatgagggatacaaagcgcagcggaaaggcatgcccgatgaacttgcaatgcagatacccctcgcgaaggaagtactgagggcgatgaatattgccataatagagcatgaaggttatgaagccgacgatataatcggcagcctttcgttaaaggccgaaaaagagaattttgacgtaataatccttacgggggacagggattctttccagctgatcagcgacagggtgaaagttatcctgccttcgacgaaagccggaaaaacagagaccaacgtatatgataaacaggccatcattgacaaatacggagttttaccccatcagcttattgacgttaaaggcttaatgggagattcgtcagataatatacccggcgttccgggagtgggtgagaaaacggcgttaagccttatttcagcctacggtacactggaaggtgtttacgagcatattgatgaaataaaacagcctaagctgaaagcatcgctgattgaatataaggatcaggcgtttttaagccgtaagctgggtactattgtaagaaatctggagctgtgtgcttcgctggaggatctgaaaagaaaagaaataaaccgcaaagagcttttgaatgttttcagaaaactcgaatttgaaagtatcatatcaaaaatgaatcttgcttccgctgaggtgacagaattacctcccgcgccggaagagcttaaaataacccatatttcagcggcagaggatcttaagaaatggattgcttacctgcttaaccagaaaaacatttccgtccttcaactgattgaccgggaggattcatacagttcccgtctttcagggctggctttgtgcaccggggatgaggttttttatatcgagaccgggactgcactccccgagaatttgattgcaacagagctgaaagaactgtggcagaatgaaaatattcacaaaatcggacacaatataaaagaatttataacctggctgctgaaacacgatgttgaactgaacggcctttatttcgacactatgattgccgaatacctgatagattccataagaaacggctatcctatagcaagcctttctcacaaatacctgaatcgcagcgttccgtcgctggacgaacttttgggcaagggaaagggagcaaaaaagtactctgaaattccgcccgaaaggctgaaagattacagcgcttataacgtcaaagccatttttgacatatggccgatgcagaaaaaagttcttcaggaaaaccggcaggaggagctttttaatgacatagagcttcctcttataaccgtacttgccagtatggaataccacggtttcaaagttgacgccgcaaaacttcacgaatacggcgaagttcttctgtcacgcataaaagacctggaaaaggtaatttacatgctggccggtgaagaattcaacatcaattcaacgaagcagcttggtaccatattattcgaaaaactgaagcttcccgttgtaaaaagtacaaagaccggatactccaccgacgtcgaggttcttgaagagctttattacaagcatgatataataccatgcataatagaataccgccagcttacaaaactttacaccacctacgccgaaggtcttgaaaaagtgataaatcctgtaaccggtaaaattcattcaagttttaaccagacggttacggctacaggccgcatcagcagtaccgaaccaaatttacagaatatcccagtcagacacgaaatgggaagggaaatacggaaagcttttattccgtcgtcggaaaacgctgtttttgttgatgccgattattcacagatagagcttcgcgtgcttgcccatataacaggcgatgaagccctgataaatgctttcgttaagggggaagatattcatacggccacggcgtcgctggtatttgacgtagctcccgaagatgtgacgccggaactgcgcagaaaggcaaaagccgtaaatttcggcatagtgtacgggatcagtgattacgggctggcacgggatttgggaattacccggaaggaagcaaagcggtatatagacgactattttgccaaataccccaaagtaaaaacctatgtggatgaaattgtgcgggtcggccaggaacaggggtatgtggaaactctgttccacagaagaagataccttcccgagcttgcatctaaaaattttcaccagcgttctttccaaaaaagggttgcaatgaatacgcccatacagggcactgcagccgatattattaaaattgcgatggtgaaggtatacaaggctttgaaagaatccggccttaaatccaggcttatcctccaggtccatgacgaacttgttattgagacttttgaagacgaactggagactgtcaaggaacttgtcaaaaagtgcatggaagaggccgttgaattgagtgtgccgcttgttgtcgacgtttcaatcgggaaaaactggtatgaagcctcctgatatggatcc

SEQ ID NO: 432 - DNA, 2772 bp, Artificial Sequence
  Description of Artificial Sequence: Synthetic Clostridium stercorarium DNA Polymerase G831H
atgaaatacctgctgccgaccgctgctgctggtctgctgctcctcgctgcccagccggcgatggccatggatccaaaaataatccttatagacggaaacagtattttaaaccgcggtttttatgccctgtcggggcgatccatgctgactacgtccacaggtctgtataccaatgcggttttcgcttttgtaaatatattgaacaaatatatcgaagaggaaaaccctgattatattgccgttgctttcgatcttagggcaaaaactttccggcacggtctatatgagggatacaaagcgcagcggaaaggcatgcccgatgaacttgcaatgcagatacccctcgcgaaggaagtactgagggcgatgaatattgccataatagagcatgaaggttatgaagccgacgatataatcggcagcctttcgttaaaggccgaaaaagagaattttgacgtaataatccttacgggggacagggattctttccagctgatcagcgacagggtgaaagttatcctgccttcgacgaaagccggaaaaacagagaccaacgtatatgataaacaggccatcattgacaaatacggagttttaccccatcagcttattgacgttaaaggcttaatgggagattcgtcagataatatacccggcgttccgggagtgggtgagaaaacggcgttaagccttatttcagcctacggtacactggaaggtgtttacgagcatattgatgaaataaaacagcctaagctgaaagcatcgctgattgaatataaggatcaggcgtttttaagccgtaagctgggtactattgtaagaaatctggagctgtgtgcttcgctggaggatctgaaaagaaaagaaataaaccgcaaagagcttttgaatgttttcagaaaactcgaatttgaaagtatcatatcaaaaatgaatcttgcttccgctgaggtgacagaattacctcccgcgccggaagagcttaaaataacccatatttcagcggcagaggatcttaagaaatggattgcttacctgcttaaccagaaaaacatttccgtccttcaactgattgaccgggaggattcatacagttcccgtctttcagggctggctttgtgcaccggggatgaggttttttatatcgagaccgggactgcactccccgagaatttgattgcaacagagctgaaagaactgtggcagaatgaaaatattcacaaaatcggacacaatataaaagaatttataacctggctgctgaaacacgatgttgaactgaacggcctttatttcgacactatgattgccgaatacctgatagattccataagaaacggctatcctatagcaagcctttctcacaaatacctgaatcgcagcgttccgtcgctggacgaacttttgggcaagggaaagggagcaaaaaagtactctgaaattccgcccgaaaggctgaaagattacagcgcttataacgtcaaagccatttttgacatatggccgatgcagaaaaaagttcttcaggaaaaccggcaggaggagctttttaatgacatagagcttcctcttataaccgtacttgccagtatggaataccacggtttcaaagttgacgccgcaaaacttcacgaatacggcgaagttcttctgtcacgcataaaagacctggaaaaggtaatttacatgctggccggtgaagaattcaacatcaattcaacgaagcagcttggtaccatattattcgaaaaactgaagcttcccgttgtaaaaagtacaaagaccggatactccaccgacgtcgaggttcttgaagagctttattacaagcatgatataataccatgcataatagaataccgccagcttacaaaactttacaccacctacgccgaaggtcttgaaaaagtgataaatcctgtaaccggtaaaattcattcaagttttaaccagacggttacggctacaggccgcatcagcagtaccgaaccaaatttacagaatatcccagtcagacacgaaatgggaagggaaatacggaaagcttttattccgtcgtcggaaaacgctgtttttgttgatgccgattattcacagatagagcttcgcgtgcttgcccatataacaggcgatgaagccctgataaatgctttcgttaagggggaagatattcatacggccacggcgtcgctggtatttgacgtagctcccgaagatgtgacgccggaactgcgcagaaaggcaaaagccgtaaatttcggcatagtgtacgggatcagtgattacgggctggcacgggatttgggaattacccggaaggaagcaaagcggtatatagacgactattttgccaaataccccaaagtaaaaacctatgtggatgaaattgtgcgggtcggccaggaacaggggtatgtggaaactctgttccacagaagaagataccttcccgagcttgcatctaaaaattttcaccagcgttctttccataaaagggttgcaatgaatacgcccatacagggcactgcagccgatattattaaaattgcgatggtgaaggtatacaaggctttgaaagaatccggccttaaatccaggcttatcctccaggtccatgacgaacttgttattgagacttttgaagacgaactggagactgtcaaggaacttgtcaaaaagtgcatggaagaggccgttgaattgagtgtgccgcttgttgtcgacgtttcaatcgggaaaaactggtatgaagcctcctgatatggatcc

SEQ ID NO: 433 - DNA, 2772 bp, Artificial Sequence
  Description of Artificial Sequence: Synthetic Clostridium stercorarium DNA Polymerase G831I
atgaaatacctgctgccgaccgctgctgctggtctgctgctcctcgctgcccagccggcgatggccatggatccaaaaataatccttatagacggaaacagtattttaaaccgcggtttttatgccctgtcggggcgatccatgctgactacgtccacaggtctgtataccaatgcggttttcgcttttgtaaatatattgaacaaatatatcgaagaggaaaaccctgattatattgccgttgctttcgatcttagggcaaaaactttccggcacggtctatatgagggatacaaagcgcagcggaaaggcatgcccgatgaacttgcaatgcagatacccctcgcgaaggaagtactgagggcgatgaatattgccataatagagcatgaaggttatgaagccgacgatataatcggcagcctttcgttaaaggccgaaaaagagaattttgacgtaataatccttacgggggacagggattctttccagctgatcagcgacagggtgaaagttatcctgccttcgacgaaagccggaaaaacagagaccaacgtatatgataaacaggccatcattgacaaatacggagttttaccccatcagcttattgacgttaaaggcttaatgggagattcgtcagataatatacccggcgttccgggagtgggtgagaaaacggcgttaagccttatttcagcctacggtacactggaaggtgtttacgagcatattgatgaaataaaacagcctaagctgaaagcatcgctgattgaatataaggatcaggcgtttttaagccgtaagctgggtactattgtaagaaatctggagctgtgtgcttcgctggaggatctgaaaagaaaagaaataaaccgcaaagagcttttgaatgttttcagaaaactcgaatttgaaagtatcatatcaaaaatgaatcttgcttccgctgaggtgacagaattacctcccgcgccggaagagcttaaaataacccatatttcagcggcagaggatcttaagaaatggattgcttacctgcttaaccagaaaaacatttccgtccttcaactgattgaccgggaggattcatacagttcccgtctttcagggctggctttgtgcaccggggatgaggttttttatatcgagaccgggactgcactccccgagaatttgattgcaacagagctgaaagaactgtggcagaatgaaaatattcacaaaatcggacacaatataaaagaatttataacctggctgctgaaacacgatgttgaactgaacggcctttatttcgacactatgattgccgaatacctgatagattccataagaaacggctatcctatagcaagcctttctcacaaatacctgaatcgcagcgttccgtcgctggacgaacttttgggcaagggaaagggagcaaaaaagtactctgaaattccgcccgaaaggctgaaagattacagcgcttataacgtcaaagccatttttgacatatggccgatgcagaaaaaagttcttcaggaaaaccggcaggaggagctttttaatgacatagagcttcctcttataaccgtacttgccagtatggaataccacggtttcaaagttgacgccgcaaaacttcacgaatacggcgaagttcttctgtcacgcataaaagacctggaaaaggtaatttacatgctggccggtgaagaattcaacatcaattcaacgaagcagcttggtaccatattattcgaaaaactgaagcttcccgttgtaaaaagtacaaagaccggatactccaccgacgtcgaggttcttgaagagctttattacaagcatgatataataccatgcataatagaataccgccagcttacaaaactttacaccacctacgccgaaggtcttgaaaaagtgataaatcctgtaaccggtaaaattcattcaagttttaaccagacggttacggctacaggccgcatcagcagtaccgaaccaaatttacagaatatcccagtcagacacgaaatgggaagggaaatacggaaagcttttattccgtcgtcggaaaacgctgtttttgttgatgccgattattcacagatagagcttcgcgtgcttgcccatataacaggcgatgaagccctgataaatgctttcgttaagggggaagatattcatacggccacggcgtcgctggtatttgacgtagctcccgaagatgtgacgccggaactgcgcagaaaggcaaaagccgtaaatttcggcatagtgtacgggatcagtgattacgggctggcacgggatttgggaattacccggaaggaagcaaagcggtatatagacgactattttgccaaataccccaaagtaaaaacctatgtggatgaaattgtgcgggtcggccaggaacaggggtatgtggaaactctgttccacagaagaagataccttcccgagcttgcatctaaaaattttcaccagcgttctttcattaaaagggttgcaatgaatacgcccatacagggcactgcagccgatattattaaaattgcgatggtgaaggtatacaaggctttgaaagaatccggccttaaatccaggcttatcctccaggtccatgacgaacttgttattgagacttttgaagacgaactggagactgtcaaggaacttgtcaaaaagtgcatggaagaggccgttgaattgagtgtgccgcttgttgtcgacgtttcaatcgggaaaaactggtatgaagcctcctgatatggatcc

SEQ ID NO: 434 - DNA, 2772 bp, Artificial Sequence
  Description of Artificial Sequence: Synthetic Clostridium stercorarium DNA Polymerase G831L
atgaaatacctgctgccgaccgctgctgctggtctgctgctcctcgctgcccagccggcgatggccatggatccaaaaataatccttatagacggaaacagtattttaaaccgcggtttttatgccctgtcggggcgatccatgctgactacgtccacaggtctgtataccaatgcggttttcgcttttgtaaatatattgaacaaatatatcgaagaggaaaaccctgattatattgccgttgctttcgatcttagggcaaaaactttccggcacggtctatatgagggatacaaagcgcagcggaaaggcatgcccgatgaacttgcaatgcagatacccctcgcgaaggaagtactgagggcgatgaatattgccataatagagcatgaaggttatgaagccgacgatataatcggcagcctttcgttaaaggccgaaaaagagaattttgacgtaataatccttacgggggacagggattctttccagctgatcagcgacagggtgaaagttatcctgccttcgacgaaagccggaaaaacagagaccaacgtatatgataaacaggccatcattgacaaatacggagttttaccccatcagcttattgacgttaaaggcttaatgggagattcgtcagataatatacccggcgttccgggagtgggtgagaaaacggcgttaagccttatttcagcctacggtacactggaaggtgtttacgagcatattgatgaaataaaacagcctaagctgaaagcatcgctgattgaatataaggatcaggcgtttttaagccgtaagctgggtactattgtaagaaatctggagctgtgtgcttcgctggaggatctgaaaagaaaagaaataaaccgcaaagagcttttgaatgttttcagaaaactcgaatttgaaagtatcatatcaaaaatgaatcttgcttccgctgaggtgacagaattacctcccgcgccggaagagcttaaaataacccatatttcagcggcagaggatcttaagaaatggattgcttacctgcttaaccagaaaaacatttccgtccttcaactgattgaccgggaggattcatacagttcccgtctttcagggctggctttgtgcaccggggatgaggttttttatatcgagaccgggactgcactccccgagaatttgattgcaacagagctgaaagaactgtggcagaatgaaaatattcacaaaatcggacacaatataaaagaatttataacctggctgctgaaacacgatgttgaactgaacggcctttatttcgacactatgattgccgaatacctgatagattccataagaaacggctatcctatagcaagcctttctcacaaatacctgaatcgcagcgttccgtcgctggacgaacttttgggcaagggaaagggagcaaaaaagtactctgaaattccgcccgaaaggctgaaagattacagcgcttataacgtcaaagccatttttgacatatggccgatgcagaaaaaagttcttcaggaaaaccggcaggaggagctttttaatgacatagagcttcctcttataaccgtacttgccagtatggaataccacggtttcaaagttgacgccgcaaaacttcacgaatacggcgaagttcttctgtcacgcataaaagacctggaaaaggtaatttacatgctggccggtgaagaattcaacatcaattcaacgaagcagcttggtaccatattattcgaaaaactgaagcttcccgttgtaaaaagtacaaagaccggatactccaccgacgtcgaggttcttgaagagctttattacaagcatgatataataccatgcataatagaataccgccagcttacaaaactttacaccacctacgccgaaggtcttgaaaaagtgataaatcctgtaaccggtaaaattcattcaagttttaaccagacggttacggctacaggccgcatcagcagtaccgaaccaaatttacagaatatcccagtcagacacgaaatgggaagggaaatacggaaagcttttattccgtcgtcggaaaacgctgtttttgttgatgccgattattcacagatagagcttcgcgtgcttgcccatataacaggcgatgaagccctgataaatgctttcgttaagggggaagatattcatacggccacggcgtcgctggtatttgacgtagctcccgaagatgtgacgccggaactgcgcagaaaggcaaaagccgtaaatttcggcatagtgtacgggatcagtgattacgggctggcacgggatttgggaattacccggaaggaagcaaagcggtatatagacgactattttgccaaataccccaaagtaaaaacctatgtggatgaaattgtgcgggtcggccaggaacaggggtatgtggaaactctgttccacagaagaagataccttcccgagcttgcatctaaaaattttcaccagcgttctttccttaaaagggttgcaatgaatacgcccatacagggcactgcagccgatattattaaaattgcgatggtgaaggtatacaaggctttgaaagaatccggccttaaatccaggcttatcctccaggtccatgacgaacttgttattgagacttttgaagacgaactggagactgtcaaggaacttgtcaaaaagtgcatggaagaggccgttgaattgagtgtgccgcttgttgtcgacgtttcaatcgggaaaaactggtatgaagcctcctgatatggatcc

SEQ ID NO: 435 - DNA, 2772 bp, Artificial Sequence
  Description of Artificial Sequence: Synthetic Clostridium stercorarium DNA Polymerase G831K
atgaaatacctgctgccgaccgctgctgctggtctgctgctcctcgctgcccagccggcgatggccatggatccaaaaataatccttatagacggaaacagtattttaaaccgcggtttttatgccctgtcggggcgatccatgctgactacgtccacaggtctgtataccaatgcggttttcgcttttgtaaatatattgaacaaatatatcgaagaggaaaaccctgattatattgccgttgctttcgatcttagggcaaaaactttccggcacggtctatatgagggatacaaagcgcagcggaaaggcatgcccgatgaacttgcaatgcagatacccctcgcgaaggaagtactgagggcgatgaatattgccataatagagcatgaaggttatgaagccgacgatataatcggcagcctttcgttaaaggccgaaaaagagaattttgacgtaataatccttacgggggacagggattctttccagctgatcagcgacagggtgaaagttatcctgccttcgacgaaagccggaaaaacagagaccaacgtatatgataaacaggccatcattgacaaatacggagttttaccccatcagcttattgacgttaaaggcttaatgggagattcgtcagataatatacccggcgttccgggagtgggtgagaaaacggcgttaagccttatttcagcctacggtacactggaaggtgtttacgagcatattgatgaaataaaacagcctaagctgaaagcatcgctgattgaatataaggatcaggcgtttttaagccgtaagctgggtactattgtaagaaatctggagctgtgtgcttcgctggaggatctgaaaagaaaagaaataaaccgcaaagagcttttgaatgttttcagaaaactcgaatttgaaagtatcatatcaaaaatgaatcttgcttccgctgaggtgacagaattacctcccgcgccggaagagcttaaaataacccatatttcagcggcagaggatcttaagaaatggattgcttacctgcttaaccagaaaaacatttccgtccttcaactgattgaccgggaggattcatacagttcccgtctttcagggctggctttgtgcaccggggatgaggttttttatatcgagaccgggactgcactccccgagaatttgattgcaacagagctgaaagaactgtggcagaatgaaaatattcacaaaatcggacacaatataaaagaatttataacctggctgctgaaacacgatgttgaactgaacggcctttatttcgacactatgattgccgaatacctgatagattccataagaaacggctatcctatagcaagcctttctcacaaatacctgaatcgcagcgttccgtcgctggacgaacttttgggcaagggaaagggagcaaaaaagtactctgaaattccgcccgaaaggctgaaagattacagcgcttataacgtcaaagccatttttgacatatggccgatgcagaaaaaagttcttcaggaaaaccggcaggaggagctttttaatgacatagagcttcctcttataaccgtacttgccagtatggaataccacggtttcaaagttgacgccgcaaaacttcacgaatacggcgaagttcttctgtcacgcataaaagacctggaaaaggtaatttacatgctggccggtgaagaattcaacatcaattcaacgaagcagcttggtaccatattattcgaaaaactgaagcttcccgttgtaaaaagtacaaagaccggatactccaccgacgtcgaggttcttgaagagctttattacaagcatgatataataccatgcataatagaataccgccagcttacaaaactttacaccacctacgccgaaggtcttgaaaaagtgataaatcctgtaaccggtaaaattcattcaagttttaaccagacggttacggctacaggccgcatcagcagtaccgaaccaaatttacagaatatcccagtcagacacgaaatgggaagggaaatacggaaagcttttattccgtcgtcggaaaacgctgtttttgttgatgccgattattcacagatagagcttcgcgtgcttgcccatataacaggcgatgaagccctgataaatgctttcgttaagggggaagatattcatacggccacggcgtcgctggtatttgacgtagctcccgaagatgtgacgccggaactgcgcagaaaggcaaaagccgtaaatttcggcatagtgtacgggatcagtgattacgggctggcacgggatttgggaattacccggaaggaagcaaagcggtatatagacgactattttgccaaataccccaaagtaaaaacctatgtggatgaaattgtgcgggtcggccaggaacaggggtatgtggaaactctgttccacagaagaagataccttcccgagcttgcatctaaaaattttcaccagcgttctttcaaaaaaagggttgcaatgaatacgcccatacagggcactgcagccgatattattaaaattgcgatggtgaaggtatacaaggctttgaaagaatccggccttaaatccaggcttatcctccaggtccatgacgaacttgttattgagacttttgaagacgaactggagactgtcaaggaacttgtcaaaaagtgcatggaagaggccgttgaattgagtgtgccgcttgttgtcgacgtttcaatcgggaaaaactggtatgaagcctcctgatatggatcc

SEQ ID NO: 436 - DNA, 2772 bp, Artificial Sequence
  Description of Artificial Sequence: Synthetic Clostridium stercorarium DNA Polymerase G831M
atgaaatacctgctgccgaccgctgctgctggtctgctgctcctcgctgcccagccggcgatggccatggatccaaaaataatccttatagacggaaacagtattttaaaccgcggtttttatgccctgtcggggcgatccatgctgactacgtccacaggtctgtataccaatgcggttttcgcttttgtaaatatattgaacaaatatatcgaagaggaaaaccctgattatattgccgttgctttcgatcttagggcaaaaactttccggcacggtctatatgagggatacaaagcgcagcggaaaggcatgcccgatgaacttgcaatgcagatacccctcgcgaaggaagtactgagggcgatgaatattgccataatagagcatgaaggttatgaagccgacgatataatcggcagcctttcgttaaaggccgaaaaagagaattttgacgtaataatccttacgggggacagggattctttccagctgatcagcgacagggtgaaagttatcctgccttcgacgaaagccggaaaaacagagaccaacgtatatgataaacaggccatcattgacaaatacggagttttaccccatcagcttattgacgttaaaggcttaatgggagattcgtcagataatatacccggcgttccgggagtgggtgagaaaacggcgttaagccttatttcagcctacggtacactggaaggtgtttacgagcatattgatgaaataaaacagcctaagctgaaagcatcgctgattgaatataaggatcaggcgtttttaagccgtaagctgggtactattgtaagaaatctggagctgtgtgcttcgctggaggatctgaaaagaaaagaaataaaccgcaaagagcttttgaatgttttcagaaaactcgaatttgaaagtatcatatcaaaaatgaatcttgcttccgctgaggtgacagaattacctcccgcgccggaagagcttaaaataacccatatttcagcggcagaggatcttaagaaatggattgcttacctgcttaaccagaaaaacatttccgtccttcaactgattgaccgggaggattcatacagttcccgtctttcagggctggctttgtgcaccggggatgaggttttttatatcgagaccgggactgcactccccgagaatttgattgcaacagagctgaaagaactgtggcagaatgaaaatattcacaaaatcggacacaatataaaagaatttataacctggctgctgaaacacgatgttgaactgaacggcctttatttcgacactatgattgccgaatacctgatagattccataagaaacggctatcctatagcaagcctttctcacaaatacctgaatcgcagcgttccgtcgctggacgaacttttgggcaagggaaagggagcaaaaaagtactctgaaattccgcccgaaaggctgaaagattacagcgcttataacgtcaaagccatttttgacatatggccgatgcagaaaaaagttcttcaggaaaaccggcaggaggagctttttaatgacatagagcttcctcttataaccgtacttgccagtatggaataccacggtttcaaagttgacgccgcaaaacttcacgaatacggcgaagttcttctgtcacgcataaaagacctggaaaaggtaatttacatgctggccggtgaagaattcaacatcaattcaacgaagcagcttggtaccatattattcgaaaaactgaagcttcccgttgtaaaaagtacaaagaccggatactccaccgacgtcgaggttcttgaagagctttattacaagcatgatataataccatgcataatagaataccgccagcttacaaaactttacaccacctacgccgaaggtcttgaaaaagtgataaatcctgtaaccggtaaaattcattcaagttttaaccagacggttacggctacaggccgcatcagcagtaccgaaccaaatttacagaatatcccagtcagacacgaaatgggaagggaaatacggaaagcttttattccgtcgtcggaaaacgctgtttttgttgatgccgattattcacagatagagcttcgcgtgcttgcccatataacaggcgatgaagccctgataaatgctttcgttaagggggaagatattcatacggccacggcgtcgctggtatttgacgtagctcccgaagatgtgacgccggaactgcgcagaaaggcaaaagccgtaaatttcggcatagtgtacgggatcagtgattacgggctggcacgggatttgggaattacccggaaggaagcaaagcggtatatagacgactattttgccaaataccccaaagtaaaaacctatgtggatgaaattgtgcgggtcggccaggaacaggggtatgtggaaactctgttccacagaagaagataccttcccgagcttgcatctaaaaattttcaccagcgttctttcatgaaaagggttgcaatgaatacgcccatacagggcactgcagccgatattattaaaattgcgatggtgaaggtatacaaggctttgaaagaatccggccttaaatccaggcttatcctccaggtccatgacgaacttgttattgagacttttgaagacgaactggagactgtcaaggaacttgtcaaaaagtgcatggaagaggccgttgaattgagtgtgccgcttgttgtcgacgtttcaatcgggaaaaactggtatgaagcctcctgatatggatcc

SEQ ID NO: 437 - DNA, 2772 bp, Artificial Sequence
  Description of Artificial Sequence: Synthetic Clostridium stercorarium DNA Polymerase G831F
atgaaatacctgctgccgaccgctgctgctggtctgctgctcctcgctgcccagccggcgatggccatggatccaaaaataatccttatagacggaaacagtattttaaaccgcggtttttatgccctgtcggggcgatccatgctgactacgtccacaggtctgtataccaatgcggttttcgcttttgtaaatatattgaacaaatatatcgaagaggaaaaccctgattatattgccgttgctttcgatcttagggcaaaaactttccggcacggtctatatgagggatacaaagcgcagcggaaaggcatgcccgatgaacttgcaatgcagatacccctcgcgaaggaagtactgagggcgatgaatattgccataatagagcatgaaggttatgaagccgacgatataatcggcagcctttcgttaaaggccgaaaaagagaattttgacgtaataatccttacgggggacagggattctttccagctgatcagcgacagggtgaaagttatcctgccttcgacgaaagccggaaaaacagagaccaacgtatatgataaacaggccatcattgacaaatacggagttttaccccatcagcttattgacgttaaaggcttaatgggagattcgtcagataatatacccggcgttccgggagtgggtgagaaaacggcgttaagccttatttcagcctacggtacactggaaggtgtttacgagcatattgatgaaataaaacagcctaagctgaaagcatcgctgattgaatataaggatcaggcgtttttaagccgtaagctgggtactattgtaagaaatctggagctgtgtgcttcgctggaggatctgaaaagaaaagaaataaaccgcaaagagcttttgaatgttttcagaaaactcgaatttgaaagtatcatatcaaaaatgaatcttgcttccgctgaggtgacagaattacctcccgcgccggaagagcttaaaataacccatatttcagcggcagaggatcttaagaaatggattgcttacctgcttaaccagaaaaacatttccgtccttcaactgattgaccgggaggattcatacagttcccgtctttcagggctggctttgtgcaccggggatgaggttttttatatcgagaccgggactgcactccccgagaatttgattgcaacagagctgaaagaactgtggcagaatgaaaatattcacaaaatcggacacaatataaaagaatttataacctggctgctgaaacacgatgttgaactgaacggcctttatttcgacactatgattgccgaatacctgatagattccataagaaacggctatcctatagcaagcctttctcacaaatacctgaatcgcagcgttccgtcgctggacgaacttttgggcaagggaaagggagcaaaaaagtactctgaaattccgcccgaaaggctgaaagattacagcgcttataacgtcaaagccatttttgacatatggccgatgcagaaaaaagttcttcaggaaaaccggcaggaggagctttttaatgacatagagcttcctcttataaccgtacttgccagtatggaataccacggtttcaaagttgacgccgcaaaacttcacgaatacggcgaagttcttctgtcacgcataaaagacctggaaaaggtaatttacatgctggccggtgaagaattcaacatcaattcaacgaagcagcttggtaccatattattcgaaaaactgaagcttcccgttgtaaaaagtacaaagaccggatactccaccgacgtcgaggttcttgaagagctttattacaagcatgatataataccatgcataatagaataccgccagcttacaaaactttacaccacctacgccgaaggtcttgaaaaagtgataaatcctgtaaccggtaaaattcattcaagttttaaccagacggttacggctacaggccgcatcagcagtaccgaaccaaatttacagaatatcccagtcagacacgaaatgggaagggaaatacggaaagcttttattccgtcgtcggaaaacgctgtttttgttgatgccgattattcacagatagagcttcgcgtgcttgcccatataacaggcgatgaagccctgataaatgctttcgttaagggggaagatattcatacggccacggcgtcgctggtatttgacgtagctcccgaagatgtgacgccggaactgcgcagaaaggcaaaagccgtaaatttcggcatagtgtacgggatcagtgattacgggctggcacgggatttgggaattacccggaaggaagcaaagcggtatatagacgactattttgccaaataccccaaagtaaaaacctatgtggatgaaattgtgcgggtcggccaggaacaggggtatgtggaaactctgttccacagaagaagataccttcccgagcttgcatctaaaaattttcaccagcgttctttctttaaaagggttgcaatgaatacgcccatacagggcactgcagccgatattattaaaattgcgatggtgaaggtatacaaggctttgaaagaatccggccttaaatccaggcttatcctccaggtccatgacgaacttgttattgagacttttgaagacgaactggagactgtcaaggaacttgtcaaaaagtgcatggaagaggccgttgaattgagtgtgccgcttgttgtcgacgtttcaatcgggaaaaactggtatgaagcctcctgatatggatcc

SEQ ID NO: 438 - DNA, 2772 bp, Artificial Sequence
  Description of Artificial Sequence: Synthetic Clostridium stercorarium DNA Polymerase G831P
atgaaatacctgctgccgaccgctgctgctggtctgctgctcctcgctgcccagccggcgatggccatggatccaaaaataatccttatagacggaaacagtattttaaaccgcggtttttatgccctgtcggggcgatccatgctgactacgtccacaggtctgtataccaatgcggttttcgcttttgtaaatatattgaacaaatatatcgaagaggaaaaccctgattatattgccgttgctttcgatcttagggcaaaaactttccggcacggtctatatgagggatacaaagcgcagcggaaaggcatgcccgatgaacttgcaatgcagatacccctcgcgaaggaagtactgagggcgatgaatattgccataatagagcatgaaggttatgaagccgacgatataatcggcagcctttcgttaaaggccgaaaaagagaattttgacgtaataatccttacgggggacagggattctttccagctgatcagcgacagggtgaaagttatcctgccttcgacgaaagccggaaaaacagagaccaacgtatatgataaacaggccatcattgacaaatacggagttttaccccatcagcttattgacgttaaaggcttaatgggagattcgtcagataatatacccggcgttccgggagtgggtgagaaaacggcgttaagccttatttcagcctacggtacactggaaggtgtttacgagcatattgatgaaataaaacagcctaagctgaaagcatcgctgattgaatataaggatcaggcgtttttaagccgtaagctgggtactattgtaagaaatctggagctgtgtgcttcgctggaggatctgaaaagaaaagaaataaaccgcaaagagcttttgaatgttttcagaaaactcgaatttgaaagtatcatatcaaaaatgaatcttgcttccgctgaggtgacagaattacctcccgcgccggaagagcttaaaataacccatatttcagcggcagaggatcttaagaaatggattgcttacctgcttaaccagaaaaacatttccgtccttcaactgattgaccgggaggattcatacagttcccgtctttcagggctggctttgtgcaccggggatgaggttttttatatcgagaccgggactgcactccccgagaatttgattgcaacagagctgaaagaactgtggcagaatgaaaatattcacaaaatcggacacaatataaaagaatttataacctggctgctgaaacacgatgttgaactgaacggcctttatttcgacactatgattgccgaatacctgatagattccataagaaacggctatcctatagcaagcctttctcacaaatacctgaatcgcagcgttccgtcgctggacgaacttttgggcaagggaaagggagcaaaaaagtactctgaaattccgcccgaaaggctgaaagattacagcgcttataacgtcaaagccatttttgacatatggccgatgcagaaaaaagttcttcaggaaaaccggcaggaggagctttttaatgacatagagcttcctcttataaccgtacttgccagtatggaataccacggtttcaaagttgacgccgcaaaacttcacgaatacggcgaagttcttctgtcacgcataaaagacctggaaaaggtaatttacatgctggccggtgaagaattcaacatcaattcaacgaagcagcttggtaccatattattcgaaaaactgaagcttcccgttgtaaaaagtacaaagaccggatactccaccgacgtcgaggttcttgaagagctttattacaagcatgatataataccatgcataatagaataccgccagcttacaaaactttacaccacctacgccgaaggtcttgaaaaagtgataaatcctgtaaccggtaaaattcattcaagttttaaccagacggttacggctacaggccgcatcagcagtaccgaaccaaatttacagaatatcccagtcagacacgaaatgggaagggaaatacggaaagcttttattccgtcgtcggaaaacgctgtttttgttgatgccgattattcacagatagagcttcgcgtgcttgcccatataacaggcgatgaagccctgataaatgctttcgttaagggggaagatattcatacggccacggcgtcgctggtatttgacgtagctcccgaagatgtgacgccggaactgcgcagaaaggcaaaagccgtaaatttcggcatagtgtacgggatcagtgattacgggctggcacgggatttgggaattacccggaaggaagcaaagcggtatatagacgactattttgccaaataccccaaagtaaaaacctatgtggatgaaattgtgcgggtcggccaggaacaggggtatgtggaaactctgttccacagaagaagataccttcccgagcttgcatctaaaaattttcaccagcgttctttccctaaaagggttgcaatgaatacgcccatacagggcactgcagccgatattattaaaattgcgatggtgaaggtatacaaggctttgaaagaatccggccttaaatccaggcttatcctccaggtccatgacgaacttgttattgagacttttgaagacgaactggagactgtcaaggaacttgtcaaaaagtgcatggaagaggccgttgaattgagtgtgccgcttgttgtcgacgtttcaatcgggaaaaactggtatgaagcctcctgatatggatcc

SEQ ID NO: 439 - DNA, 2772 bp, Artificial Sequence
  Description of Artificial Sequence: Synthetic Clostridium stercorarium DNA Polymerase G831S
atgaaatacctgctgccgaccgctgctgctggtctgctgctcctcgctgcccagccggcgatggccatggatccaaaaataatccttatagacggaaacagtattttaaaccgcggtttttatgccctgtcggggcgatccatgctgactacgtccacaggtctgtataccaatgcggttttcgcttttgtaaatatattgaacaaatatatcgaagaggaaaaccctgattatattgccgttgctttcgatcttagggcaaaaactttccggcacggtctatatgagggatacaaagcgcagcggaaaggcatgcccgatgaacttgcaatgcagatacccctcgcgaaggaagtactgagggcgatgaatattgccataatagagcatgaaggttatgaagccgacgatataatcggcagcctttcgttaaaggccgaaaaagagaattttgacgtaataatccttacgggggacagggattctttccagctgatcagcgacagggtgaaagttatcctgccttcgacgaaagccggaaaaacagagaccaacgtatatgataaacaggccatcattgacaaatacggagttttaccccatcagcttattgacgttaaaggcttaatgggagattcgtcagataatatacccggcgttccgggagtgggtgagaaaacggcgttaagccttatttcagcctacggtacactggaaggtgtttacgagcatattgatgaaataaaacagcctaagctgaaagcatcgctgattgaatataaggatcaggcgtttttaagccgtaagctgggtactattgtaagaaatctggagctgtgtgcttcgctggaggatctgaaaagaaaagaaataaaccgcaaagagcttttgaatgttttcagaaaactcgaatttgaaagtatcatatcaaaaatgaatcttgcttccgctgaggtgacagaattacctcccgcgccggaagagcttaaaataacccatatttcagcggcagaggatcttaagaaatggattgcttacctgcttaaccagaaaaacatttccgtccttcaactgattgaccgggaggattcatacagttcccgtctttcagggctggctttgtgcaccggggatgaggttttttatatcgagaccgggactgcactccccgagaatttgattgcaacagagctgaaagaactgtggcagaatgaaaatattcacaaaatcggacacaatataaaagaatttataacctggctgctgaaacacgatgttgaactgaacggcctttatttcgacactatgattgccgaatacctgatagattccataagaaacggctatcctatagcaagcctttctcacaaatacctgaatcgcagcgttccgtcgctggacgaacttttgggcaagggaaagggagcaaaaaagtactctgaaattccgcccgaaaggctgaaagattacagcgcttataacgtcaaagccatttttgacatatggccgatgcagaaaaaagttcttcaggaaaaccggcaggaggagctttttaatgacatagagcttcctcttataaccgtacttgccagtatggaataccacggtttcaaagttgacgccgcaaaacttcacgaatacggcgaagttcttctgtcacgcataaaagacctggaaaaggtaatttacatgctggccggtgaagaattcaacatcaattcaacgaagcagcttggtaccatattattcgaaaaactgaagcttcccgttgtaaaaagtacaaagaccggatactccaccgacgtcgaggttcttgaagagctttattacaagcatgatataataccatgcataatagaataccgccagcttacaaaactttacaccacctacgccgaaggtcttgaaaaagtgataaatcctgtaaccggtaaaattcattcaagttttaaccagacggttacggctacaggccgcatcagcagtaccgaaccaaatttacagaatatcccagtcagacacgaaatgggaagggaaatacggaaagcttttattccgtcgtcggaaaacgctgtttttgttgatgccgattattcacagatagagcttcgcgtgcttgcccatataacaggcgatgaagccctgataaatgctttcgttaagggggaagatattcatacggccacggcgtcgctggtatttgacgtagctcccgaagatgtgacgccggaactgcgcagaaaggcaaaagccgtaaatttcggcatagtgtacgggatcagtgattacgggctggcacgggatttgggaattacccggaaggaagcaaagcggtatatagacgactattttgccaaataccccaaagtaaaaacctatgtggatgaaattgtgcgggtcggccaggaacaggggtatgtggaaactctgttccacagaagaagataccttcccgagcttgcatctaaaaattttcaccagcgttctttctctaaaagggttgcaatgaatacgcccatacagggcactgcagccgatattattaaaattgcgatggtgaaggtatacaaggctttgaaagaatccggccttaaatccaggcttatcctccaggtccatgacgaacttgttattgagacttttgaagacgaactggagactgtcaaggaacttgtcaaaaagtgcatggaagaggccgttgaattgagtgtgccgcttgttgtcgacgtttcaatcgggaaaaactggtatgaagcctcctgatatggatcc

SEQ ID NO: 440 - DNA, 2772 bp, Artificial Sequence
  Description of Artificial Sequence: Synthetic Clostridium stercorarium DNA Polymerase G831T
atgaaatacctgctgccgaccgctgctgctggtctgctgctcctcgctgcccagccggcgatggccatggatccaaaaataatccttatagacggaaacagtattttaaaccgcggtttttatgccctgtcggggcgatccatgctgactacgtccacaggtctgtataccaatgcggttttcgcttttgtaaatatattgaacaaatatatcgaagaggaaaaccctgattatattgccgttgctttcgatcttagggcaaaaactttccggcacggtctatatgagggatacaaagcgcagcggaaaggcatgcccgatgaacttgcaatgcagatacccctcgcgaaggaagtactgagggcgatgaatattgccataatagagcatgaaggttatgaagccgacgatataatcggcagcctttcgttaaaggccgaaaaagagaattttgacgtaataatccttacgggggacagggattctttccagctgatcagcgacagggtgaaagttatcctgccttcgacgaaagccggaaaaacagagaccaacgtatatgataaacaggccatcattgacaaatacggagttttaccccatcagcttattgacgttaaaggcttaatgggagattcgtcagataatatacccggcgttccgggagtgggtgagaaaacggcgttaagccttatttcagcctacggtacactggaaggtgtttacgagcatattgatgaaataaaacagcctaagctgaaagcatcgctgattgaatataaggatcaggcgtttttaagccgtaagctgggtactattgtaagaaatctggagctgtgtgcttcgctggaggatctgaaaagaaaagaaataaaccgcaaagagcttttgaatgttttcagaaaactcgaatttgaaagtatcatatcaaaaatgaatcttgcttccgctgaggtgacagaattacctcccgcgccggaagagcttaaaataacccatatttcagcggcagaggatcttaagaaatggattgcttacctgcttaaccagaaaaacatttccgtccttcaactgattgaccgggaggattcatacagttcccgtctttcagggctggctttgtgcaccggggatgaggttttttatatcgagaccgggactgcactccccgagaatttgattgcaacagagctgaaagaactgtggcagaatgaaaatattcacaaaatcggacacaatataaaagaatttataacctggctgctgaaacacgatgttgaactgaacggcctttatttcgacactatgattgccgaatacctgatagattccataagaaacggctatcctatagcaagcctttctcacaaatacctgaatcgcagcgttccgtcgctggacgaacttttgggcaagggaaagggagcaaaaaagtactctgaaattccgcccgaaaggctgaaagattacagcgcttataacgtcaaagccatttttgacatatggccgatgcagaaaaaagttcttcaggaaaaccggcaggaggagctttttaatgacatagagcttcctcttataaccgtacttgccagtatggaataccacggtttcaaagttgacgccgcaaaacttcacgaatacggcgaagttcttctgtcacgcataaaagacctggaaaaggtaatttacatgctggccggtgaagaattcaacatcaattcaacgaagcagcttggtaccatattattcgaaaaactgaagcttcccgttgtaaaaagtacaaagaccggatactccaccgacgtcgaggttcttgaagagctttattacaagcatgatataataccatgcataatagaataccgccagcttacaaaactttacaccacctacgccgaaggtcttgaaaaagtgataaatcctgtaaccggtaaaattcattcaagttttaaccagacggttacggctacaggccgcatcagcagtaccgaaccaaatttacagaatatcccagtcagacacgaaatgggaagggaaatacggaaagcttttattccgtcgtcggaaaacgctgtttttgttgatgccgattattcacagatagagcttcgcgtgcttgcccatataacaggcgatgaagccctgataaatgctttcgttaagggggaagatattcatacggccacggcgtcgctggtatttgacgtagctcccgaagatgtgacgccggaactgcgcagaaaggcaaaagccgtaaatttcggcatagtgtacgggatcagtgattacgggctggcacgggatttgggaattacccggaaggaagcaaagcggtatatagacgactattttgccaaataccccaaagtaaaaacctatgtggatgaaattgtgcgggtcggccaggaacaggggtatgtggaaactctgttccacagaagaagataccttcccgagcttgcatctaaaaattttcaccagcgttctttcactaaaagggttgcaatgaatacgcccatacagggcactgcagccgatattattaaaattgcgatggtgaaggtatacaaggctttgaaagaatccggccttaaatccaggcttatcctccaggtccatgacgaacttgttattgagacttttgaagacgaactggagactgtcaaggaacttgtcaaaaagtgcatggaagaggccgttgaattgagtgtgccgcttgttgtcgacgtttcaatcgggaaaaactggtatgaagcctcctgatatggatcc

SEQ ID NO: 441 - DNA, 2772 bp, Artificial Sequence
  Description of Artificial Sequence: Synthetic Clostridium stercorarium DNA Polymerase G831W
atgaaatacctgctgccgaccgctgctgctggtctgctgctcctcgctgcccagccggcgatggccatggatccaaaaataatccttatagacggaaacagtattttaaaccgcggtttttatgccctgtcggggcgatccatgctgactacgtccacaggtctgtataccaatgcggttttcgcttttgtaaatatattgaacaaatatatcgaagaggaaaaccctgattatattgccgttgctttcgatcttagggcaaaaactttccggcacggtctatatgagggatacaaagcgcagcggaaaggcatgcccgatgaacttgcaatgcagatacccctcgcgaaggaagtactgagggcgatgaatattgccataatagagcatgaaggttatgaagccgacgatataatcggcagcctttcgttaaaggccgaaaaagagaattttgacgtaataatccttacgggggacagggattctttccagctgatcagcgacagggtgaaagttatcctgccttcgacgaaagccggaaaaacagagaccaacgtatatgataaacaggccatcattgacaaatacggagttttaccccatcagcttattgacgttaaaggcttaatgggagattcgtcagataatatacccggcgttccgggagtgggtgagaaaacggcgttaagccttatttcagcctacggtacactggaaggtgtttacgagcatattgatgaaataaaacagcctaagctgaaagcatcgctgattgaatataaggatcaggcgtttttaagccgtaagctgggtactattgtaagaaatctggagctgtgtgcttcgctggaggatctgaaaagaaaagaaataaaccgcaaagagcttttgaatgttttcagaaaactcgaatttgaaagtatcatatcaaaaatgaatcttgcttccgctgaggtgacagaattacctcccgcgccggaagagcttaaaataacccatatttcagcggcagaggatcttaagaaatggattgcttacctgcttaaccagaaaaacatttccgtccttcaactgattgaccgggaggattcatacagttcccgtctttcagggctggctttgtgcaccggggatgaggttttttatatcgagaccgggactgcactccccgagaatttgattgcaacagagctgaaagaactgtggcagaatgaaaatattcacaaaatcggacacaatataaaagaatttataacctggctgctgaaacacgatgttgaactgaacggcctttatttcgacactatgattgccgaatacctgatagattccataagaaacggctatcctatagcaagcctttctcacaaatacctgaatcgcagcgttccgtcgctggacgaacttttgggcaagggaaagggagcaaaaaagtactctgaaattccgcccgaaaggctgaaagattacagcgcttataacgtcaaagccatttttgacatatggccgatgcagaaaaaagttcttcaggaaaaccggcaggaggagctttttaatgacatagagcttcctcttataaccgtacttgccagtatggaataccacggtttcaaagttgacgccgcaaaacttcacgaatacggcgaagttcttctgtcacgcataaaagacctggaaaaggtaatttacatgctggccggtgaagaattcaacatcaattcaacgaagcagcttggtaccatattattcgaaaaactgaagcttcccgttgtaaaaagtacaaagaccggatactccaccgacgtcgaggttcttgaagagctttattacaagcatgatataataccatgcataatagaataccgccagcttacaaaactttacaccacctacgccgaaggtcttgaaaaagtgataaatcctgtaaccggtaaaattcattcaagttttaaccagacggttacggctacaggccgcatcagcagtaccgaaccaaatttacagaatatcccagtcagacacgaaatgggaagggaaatacggaaagcttttattccgtcgtcggaaaacgctgtttttgttgatgccgattattcacagatagagcttcgcgtgcttgcccatataacaggcgatgaagccctgataaatgctttcgttaagggggaagatattcatacggccacggcgtcgctggtatttgacgtagctcccgaagatgtgacgccggaactgcgcagaaaggcaaaagccgtaaatttcggcatagtgtacgggatcagtgattacgggctggcacgggatttgggaattacccggaaggaagcaaagcggtatatagacgactattttgccaaataccccaaagtaaaaacctatgtggatgaaattgtgcgggtcggccaggaacaggggtatgtggaaactctgttccacagaagaagataccttcccgagcttgcatctaaaaattttcaccagcgttctttctggaaaagggttgcaatgaatacgcccatacagggcactgcagccgatattattaaaattgcgatggtgaaggtatacaaggctttgaaagaatccggccttaaatccaggcttatcctccaggtccatgacgaacttgttattgagacttttgaagacgaactggagactgtcaaggaacttgtcaaaaagtgcatggaagaggccgttgaattgagtgtgccgcttgttgtcgacgtttcaatcgggaaaaactggtatgaagcctcctgatatggatcc

SEQ ID NO: 442 - DNA, 2772 bp, Artificial Sequence
  Description of Artificial Sequence: Synthetic Clostridium stercorarium DNA Polymerase G831Y
atgaaatacctgctgccgaccgctgctgctggtctgctgctcctcgctgcccagccggcgatggccatggatccaaaaataatccttatagacggaaacagtattttaaaccgcggtttttatgccctgtcggggcgatccatgctgactacgtccacaggtctgtataccaatgcggttttcgcttttgtaaatatattgaacaaatatatcgaagaggaaaaccctgattatattgccgttgctttcgatcttagggcaaaaactttccggcacggtctatatgagggatacaaagcgcagcggaaaggcatgcccgatgaacttgcaatgcagatacccctcgcgaaggaagtactgagggcgatgaatattgccataatagagcatgaaggttatgaagccgacgatataatcggcagcctttcgttaaaggccgaaaaagagaattttgacgtaataatccttacgggggacagggattctttccagctgatcagcgacagggtgaaagttatcctgccttcgacgaaagccggaaaaacagagaccaacgtatatgataaacaggccatcattgacaaatacggagttttaccccatcagcttattgacgttaaaggcttaatgggagattcgtcagataatatacccggcgttccgggagtgggtgagaaaacggcgttaagccttatttcagcctacggtacactggaaggtgtttacgagcatattgatgaaataaaacagcctaagctgaaagcatcgctgattgaatataaggatcaggcgtttttaagccgtaagctgggtactattgtaagaaatctggagctgtgtgcttcgctggaggatctgaaaagaaaagaaataaaccgcaaagagcttttgaatgttttcagaaaactcgaatttgaaagtatcatatcaaaaatgaatcttgcttccgctgaggtgacagaattacctcccgcgccggaagagcttaaaataacccatatttcagcggcagaggatcttaagaaatggattgcttacctgcttaaccagaaaaacatttccgtccttcaactgattgaccgggaggattcatacagttcccgtctttcagggctggctttgtgcaccggggatgaggttttttatatcgagaccgggactgcactccccgagaatttgattgcaacagagctgaaagaactgtggcagaatgaaaatattcacaaaatcggacacaatataaaagaatttataacctggctgctgaaacacgatgttgaactgaacggcctttatttcgacactatgattgccgaatacctgatagattccataagaaacggctatcctatagcaagcctttctcacaaatacctgaatcgcagcgttccgtcgctggacgaacttttgggcaagggaaagggagcaaaaaagtactctgaaattccgcccgaaaggctgaaagattacagcgcttataacgtcaaagccatttttgacatatggccgatgcagaaaaaagttcttcaggaaaaccggcaggaggagctttttaatgacatagagcttcctcttataaccgtacttgccagtatggaataccacggtttcaaagttgacgccgcaaaacttcacgaatacggcgaagttcttctgtcacgcataaaagacctggaaaaggtaatttacatgctggccggtgaagaattcaacatcaattcaacgaagcagcttggtaccatattattcgaaaaactgaagcttcccgttgtaaaaagtacaaagaccggatactccaccgacgtcgaggttcttgaagagctttattacaagcatgatataataccatgcataatagaataccgccagcttacaaaactttacaccacctacgccgaaggtcttgaaaaagtgataaatcctgtaaccggtaaaattcattcaagttttaaccagacggttacggctacaggccgcatcagcagtaccgaaccaaatttacagaatatcccagtcagacacgaaatgggaagggaaatacggaaagcttttattccgtcgtcggaaaacgctgtttttgttgatgccgattattcacagatagagcttcgcgtgcttgcccatataacaggcgatgaagccctgataaatgctttcgttaagggggaagatattcatacggccacggcgtcgctggtatttgacgtagctcccgaagatgtgacgccggaactgcgcagaaaggcaaaagccgtaaatttcggcatagtgtacgggatcagtgattacgggctggcacgggatttgggaattacccggaaggaagcaaagcggtatatagacgactattttgccaaataccccaaagtaaaaacctatgtggatgaaattgtgcgggtcggccaggaacaggggtatgtggaaactctgttccacagaagaagataccttcccgagcttgcatctaaaaattttcaccagcgttctttctataaaagggttgcaatgaatacgcccatacagggcactgcagccgatattattaaaattgcgatggtgaaggtatacaaggctttgaaagaatccggccttaaatccaggcttatcctccaggtccatgacgaacttgttattgagacttttgaagacgaactggagactgtcaaggaacttgtcaaaaagtgcatggaagaggccgttgaattgagtgtgccgcttgttgtcgacgtttcaatcgggaaaaactggtatgaagcctcctgatatggatcc

SEQ ID NO: 443 - DNA, 2772 bp, Artificial Sequence
  Description of Artificial Sequence: Synthetic Clostridium stercorarium DNA Polymerase G831V
atgaaatacctgctgccgaccgctgctgctggtctgctgctcctcgctgcccagccggcgatggccatggatccaaaaataatccttatagacggaaacagtattttaaaccgcggtttttatgccctgtcggggcgatccatgctgactacgtccacaggtctgtataccaatgcggttttcgcttttgtaaatatattgaacaaatatatcgaagaggaaaaccctgattatattgccgttgctttcgatcttagggcaaaaactttccggcacggtctatatgagggatacaaagcgcagcggaaaggcatgcccgatgaacttgcaatgcagatacccctcgcgaaggaagtactgagggcgatgaatattgccataatagagcatgaaggttatgaagccgacgatataatcggcagcctttcgttaaaggccgaaaaagagaattttgacgtaataatccttacgggggacagggattctttccagctgatcagcgacagggtgaaagttatcctgccttcgacgaaagccggaaaaacagagaccaacgtatatgataaacaggccatcattgacaaatacggagttttaccccatcagcttattgacgttaaaggcttaatgggagattcgtcagataatatacccggcgttccgggagtgggtgagaaaacggcgttaagccttatttcagcctacggtacactggaaggtgtttacgagcatattgatgaaataaaacagcctaagctgaaagcatcgctgattgaatataaggatcaggcgtttttaagccgtaagctgggtactattgtaagaaatctggagctgtgtgcttcgctggaggatctgaaaagaaaagaaataaaccgcaaagagcttttgaatgttttcagaaaactcgaatttgaaagtatcatatcaaaaatgaatcttgcttccgctgaggtgacagaattacctcccgcgccggaagagcttaaaataacccatatttcagcggcagaggatcttaagaaatggattgcttacctgcttaaccagaaaaacatttccgtccttcaactgattgaccgggaggattcatacagttcccgtctttcagggctggctttgtgcaccggggatgaggttttttatatcgagaccgggactgcactccccgagaatttgattgcaacagagctgaaagaactgtggcagaatgaaaatattcacaaaatcggacacaatataaaagaatttataacctggctgctgaaacacgatgttgaactgaacggcctttatttcgacactatgattgccgaatacctgatagattccataagaaacggctatcctatagcaagcctttctcacaaatacctgaatcgcagcgttccgtcgctggacgaacttttgggcaagggaaagggagcaaaaaagtactctgaaattccgcccgaaaggctgaaagattacagcgcttataacgtcaaagccatttttgacatatggccgatgcagaaaaaagttcttcaggaaaaccggcaggaggagctttttaatgacatagagcttcctcttataaccgtacttgccagtatggaataccacggtttcaaagttgacgccgcaaaacttcacgaatacggcgaagttcttctgtcacgcataaaagacctggaaaaggtaatttacatgctggccggtgaagaattcaacatcaattcaacgaagcagcttggtaccatattattcgaaaaactgaagcttcccgttgtaaaaagtacaaagaccggatactccaccgacgtcgaggttcttgaagagctttattacaagcatgatataataccatgcataatagaataccgccagcttacaaaactttacaccacctacgccgaaggtcttgaaaaagtgataaatcctgtaaccggtaaaattcattcaagttttaaccagacggttacggctacaggccgcatcagcagtaccgaaccaaatttacagaatatcccagtcagacacgaaatgggaagggaaatacggaaagcttttattccgtcgtcggaaaacgctgtttttgttgatgccgattattcacagatagagcttcgcgtgcttgcccatataacaggcgatgaagccctgataaatgctttcgttaagggggaagatattcatacggccacggcgtcgctggtatttgacgtagctcccgaagatgtgacgccggaactgcgcagaaaggcaaaagccgtaaatttcggcatagtgtacgggatcagtgattacgggctggcacgggatttgggaattacccggaaggaagcaaagcggtatatagacgactattttgccaaataccccaaagtaaaaacctatgtggatgaaattgtgcgggtcggccaggaacaggggtatgtggaaactctgttccacagaagaagataccttcccgagcttgcatctaaaaattttcaccagcgttctttcgttaaaagggttgcaatgaatacgcccatacagggcactgcagccgatattattaaaattgcgatggtgaaggtatacaaggctttgaaagaatccggccttaaatccaggcttatcctccaggtccatgacgaacttgttattgagacttttgaagacgaactggagactgtcaaggaacttgtcaaaaagtgcatggaagaggccgttgaattgagtgtgccgcttgttgtcgacgtttcaatcgggaaaaactggtatgaagcctcctgatatggatcc

SEQ ID NO: 444 - DNA, 2772 bp, Artificial Sequence
  Description of Artificial Sequence: Synthetic Clostridium stercorarium DNA Polymerase K832A
atgaaatacctgctgccgaccgctgctgctggtctgctgctcctcgctgcccagccggcgatggccatggatccaaaaataatccttatagacggaaacagtattttaaaccgcggtttttatgccctgtcggggcgatccatgctgactacgtccacaggtctgtataccaatgcggttttcgcttttgtaaatatattgaacaaatatatcgaagaggaaaaccctgattatattgccgttgctttcgatcttagggcaaaaactttccggcacggtctatatgagggatacaaagcgcagcggaaaggcatgcccgatgaacttgcaatgcagatacccctcgcgaaggaagtactgagggcgatgaatattgccataatagagcatgaaggttatgaagccgacgatataatcggcagcctttcgttaaaggccgaaaaagagaattttgacgtaataatccttacgggggacagggattctttccagctgatcagcgacagggtgaaagttatcctgccttcgacgaaagccggaaaaacagagaccaacgtatatgataaacaggccatcattgacaaatacggagttttaccccatcagcttattgacgttaaaggcttaatgggagattcgtcagataatatacccggcgttccgggagtgggtgagaaaacggcgttaagccttatttcagcctacggtacactggaaggtgtttacgagcatattgatgaaataaaacagcctaagctgaaagcatcgctgattgaatataaggatcaggcgtttttaagccgtaagctgggtactattgtaagaaatctggagctgtgtgcttcgctggaggatctgaaaagaaaagaaataaaccgcaaagagcttttgaatgttttcagaaaactcgaatttgaaagtatcatatcaaaaatgaatcttgcttccgctgaggtgacagaattacctcccgcgccggaagagcttaaaataacccatatttcagcggcagaggatcttaagaaatggattgcttacctgcttaaccagaaaaacatttccgtccttcaactgattgaccgggaggattcatacagttcccgtctttcagggctggctttgtgcaccggggatgaggttttttatatcgagaccgggactgcactccccgagaatttgattgcaacagagctgaaagaactgtggcagaatgaaaatattcacaaaatcggacacaatataaaagaatttataacctggctgctgaaacacgatgttgaactgaacggcctttatttcgacactatgattgccgaatacctgatagattccataagaaacggctatcctatagcaagcctttctcacaaatacctgaatcgcagcgttccgtcgctggacgaacttttgggcaagggaaagggagcaaaaaagtactctgaaattccgcccgaaaggctgaaagattacagcgcttataacgtcaaagccatttttgacatatggccgatgcagaaaaaagttcttcaggaaaaccggcaggaggagctttttaatgacatagagcttcctcttataaccgtacttgccagtatggaataccacggtttcaaagttgacgccgcaaaacttcacgaatacggcgaagttcttctgtcacgcataaaagacctggaaaaggtaatttacatgctggccggtgaagaattcaacatcaattcaacgaagcagcttggtaccatattattcgaaaaactgaagcttcccgttgtaaaaagtacaaagaccggatactccaccgacgtcgaggttcttgaagagctttattacaagcatgatataataccatgcataatagaataccgccagcttacaaaactttacaccacctacgccgaaggtcttgaaaaagtgataaatcctgtaaccggtaaaattcattcaagttttaaccagacggttacggctacaggccgcatcagcagtaccgaaccaaatttacagaatatcccagtcagacacgaaatgggaagggaaatacggaaagcttttattccgtcgtcggaaaacgctgtttttgttgatgccgattattcacagatagagcttcgcgtgcttgcccatataacaggcgatgaagccctgataaatgctttcgttaagggggaagatattcatacggccacggcgtcgctggtatttgacgtagctcccgaagatgtgacgccggaactgcgcagaaaggcaaaagccgtaaatttcggcatagtgtacgggatcagtgattacgggctggcacgggatttgggaattacccggaaggaagcaaagcggtatatagacgactattttgccaaataccccaaagtaaaaacctatgtggatgaaattgtgcgggtcggccaggaacaggggtatgtggaaactctgttccacagaagaagataccttcccgagcttgcatctaaaaattttcaccagcgttctttcggagctagggttgcaatgaatacgcccatacagggcactgcagccgatattattaaaattgcgatggtgaaggtatacaaggctttgaaagaatccggccttaaatccaggcttatcctccaggtccatgacgaacttgttattgagacttttgaagacgaactggagactgtcaaggaacttgtcaaaaagtgcatggaagaggccgttgaattgagtgtgccgcttgttgtcgacgtttcaatcgggaaaaactggtatgaagcctcctgatatggatcc

SEQ ID NO: 445 - DNA, 2772 bp, Artificial Sequence
  Description of Artificial Sequence: Synthetic Clostridium stercorarium DNA Polymerase K832R
atgaaatacctgctgccgaccgctgctgctggtctgctgctcctcgctgcccagccggcgatggccatggatccaaaaataatccttatagacggaaacagtattttaaaccgcggtttttatgccctgtcggggcgatccatgctgactacgtccacaggtctgtataccaatgcggttttcgcttttgtaaatatattgaacaaatatatcgaagaggaaaaccctgattatattgccgttgctttcgatcttagggcaaaaactttccggcacggtctatatgagggatacaaagcgcagcggaaaggcatgcccgatgaacttgcaatgcagatacccctcgcgaaggaagtactgagggcgatgaatattgccataatagagcatgaaggttatgaagccgacgatataatcggcagcctttcgttaaaggccgaaaaagagaattttgacgtaataatccttacgggggacagggattctttccagctgatcagcgacagggtgaaagttatcctgccttcgacgaaagccggaaaaacagagaccaacgtatatgataaacaggccatcattgacaaatacggagttttaccccatcagcttattgacgttaaaggcttaatgggagattcgtcagataatatacccggcgttccgggagtgggtgagaaaacggcgttaagccttatttcagcctacggtacactggaaggtgtttacgagcatattgatgaaataaaacagcctaagctgaaagcatcgctgattgaatataaggatcaggcgtttttaagccgtaagctgggtactattgtaagaaatctggagctgtgtgcttcgctggaggatctgaaaagaaaagaaataaaccgcaaagagcttttgaatgttttcagaaaactcgaatttgaaagtatcatatcaaaaatgaatcttgcttccgctgaggtgacagaattacctcccgcgccggaagagcttaaaataacccatatttcagcggcagaggatcttaagaaatggattgcttacctgcttaaccagaaaaacatttccgtccttcaactgattgaccgggaggattcatacagttcccgtctttcagggctggctttgtgcaccggggatgaggttttttatatcgagaccgggactgcactccccgagaatttgattgcaacagagctgaaagaactgtggcagaatgaaaatattcacaaaatcggacacaatataaaagaatttataacctggctgctgaaacacgatgttgaactgaacggcctttatttcgacactatgattgccgaatacctgatagattccataagaaacggctatcctatagcaagcctttctcacaaatacctgaatcgcagcgttccgtcgctggacgaacttttgggcaagggaaagggagcaaaaaagtactctgaaattccgcccgaaaggctgaaagattacagcgcttataacgtcaaagccatttttgacatatggccgatgcagaaaaaagttcttcaggaaaaccggcaggaggagctttttaatgacatagagcttcctcttataaccgtacttgccagtatggaataccacggtttcaaagttgacgccgcaaaacttcacgaatacggcgaagttcttctgtcacgcataaaagacctggaaaaggtaatttacatgctggccggtgaagaattcaacatcaattcaacgaagcagcttggtaccatattattcgaaaaactgaagcttcccgttgtaaaaagtacaaagaccggatactccaccgacgtcgaggttcttgaagagctttattacaagcatgatataataccatgcataatagaataccgccagcttacaaaactttacaccacctacgccgaaggtcttgaaaaagtgataaatcctgtaaccggtaaaattcattcaagttttaaccagacggttacggctacaggccgcatcagcagtaccgaaccaaatttacagaatatcccagtcagacacgaaatgggaagggaaatacggaaagcttttattccgtcgtcggaaaacgctgtttttgttgatgccgattattcacagatagagcttcgcgtgcttgcccatataacaggcgatgaagccctgataaatgctttcgttaagggggaagatattcatacggccacggcgtcgctggtatttgacgtagctcccgaagatgtgacgccggaactgcgcagaaaggcaaaagccgtaaatttcggcatagtgtacgggatcagtgattacgggctggcacgggatttgggaattacccggaaggaagcaaagcggtatatagacgactattttgccaaataccccaaagtaaaaacctatgtggatgaaattgtgcgggtcggccaggaacaggggtatgtggaaactctgttccacagaagaagataccttcccgagcttgcatctaaaaattttcaccagcgttctttcggacgtagggttgcaatgaatacgcccatacagggcactgcagccgatattattaaaattgcgatggtgaaggtatacaaggctttgaaagaatccggccttaaatccaggcttatcctccaggtccatgacgaacttgttattgagacttttgaagacgaactggagactgtcaaggaacttgtcaaaaagtgcatggaagaggccgttgaattgagtgtgccgcttgttgtcgacgtttcaatcgggaaaaactggtatgaagcctcctgatatggatcc

SEQ ID NO: 446 - DNA, 2772 bp, Artificial Sequence
  Description of Artificial Sequence: Synthetic Clostridium stercorarium DNA Polymerase K832N
atgaaatacctgctgccgaccgctgctgctggtctgctgctcctcgctgcccagccggcgatggccatggatccaaaaataatccttatagacggaaacagtattttaaaccgcggtttttatgccctgtcggggcgatccatgctgactacgtccacaggtctgtataccaatgcggttttcgcttttgtaaatatattgaacaaatatatcgaagaggaaaaccctgattatattgccgttgctttcgatcttagggcaaaaactttccggcacggtctatatgagggatacaaagcgcagcggaaaggcatgcccgatgaacttgcaatgcagatacccctcgcgaaggaagtactgagggcgatgaatattgccataatagagcatgaaggttatgaagccgacgatataatcggcagcctttcgttaaaggccgaaaaagagaattttgacgtaataatccttacgggggacagggattctttccagctgatcagcgacagggtgaaagttatcctgccttcgacgaaagccggaaaaacagagaccaacgtatatgataaacaggccatcattgacaaatacggagttttaccccatcagcttattgacgttaaaggcttaatgggagattcgtcagataatatacccggcgttccgggagtgggtgagaaaacggcgttaagccttatttcagcctacggtacactggaaggtgtttacgagcatattgatgaaataaaacagcctaagctgaaagcatcgctgattgaatataaggatcaggcgtttttaagccgtaagctgggtactattgtaagaaatctggagctgtgtgcttcgctggaggatctgaaaagaaaagaaataaaccgcaaagagcttttgaatgttttcagaaaactcgaatttgaaagtatcatatcaaaaatgaatcttgcttccgctgaggtgacagaattacctcccgcgccggaagagcttaaaataacccatatttcagcggcagaggatcttaagaaatggattgcttacctgcttaaccagaaaaacatttccgtccttcaactgattgaccgggaggattcatacagttcccgtctttcagggctggctttgtgcaccggggatgaggttttttatatcgagaccgggactgcactccccgagaatttgattgcaacagagctgaaagaactgtggcagaatgaaaatattcacaaaatcggacacaatataaaagaatttataacctggctgctgaaacacgatgttgaactgaacggcctttatttcgacactatgattgccgaatacctgatagattccataagaaacggctatcctatagcaagcctttctcacaaatacctgaatcgcagcgttccgtcgctggacgaacttttgggcaagggaaagggagcaaaaaagtactctgaaattccgcccgaaaggctgaaagattacagcgcttataacgtcaaagccatttttgacatatggccgatgcagaaaaaagttcttcaggaaaaccggcaggaggagctttttaatgacatagagcttcctcttataaccgtacttgccagtatggaataccacggtttcaaagttgacgccgcaaaacttcacgaatacggcgaagttcttctgtcacgcataaaagacctggaaaaggtaatttacatgctggccggtgaagaattcaacatcaattcaacgaagcagcttggtaccatattattcgaaaaactgaagcttcccgttgtaaaaagtacaaagaccggatactccaccgacgtcgaggttcttgaagagctttattacaagcatgatataataccatgcataatagaataccgccagcttacaaaactttacaccacctacgccgaaggtcttgaaaaagtgataaatcctgtaaccggtaaaattcattcaagttttaaccagacggttacggctacaggccgcatcagcagtaccgaaccaaatttacagaatatcccagtcagacacgaaatgggaagggaaatacggaaagcttttattccgtcgtcggaaaacgctgtttttgttgatgccgattattcacagatagagcttcgcgtgcttgcccatataacaggcgatgaagccctgataaatgctttcgttaagggggaagatattcatacggccacggcgtcgctggtatttgacgtagctcccgaagatgtgacgccggaactgcgcagaaaggcaaaagccgtaaatttcggcatagtgtacgggatcagtgattacgggctggcacgggatttgggaattacccggaaggaagcaaagcggtatatagacgactattttgccaaataccccaaagtaaaaacctatgtggatgaaattgtgcgggtcggccaggaacaggggtatgtggaaactctgttccacagaagaagataccttcccgagcttgcatctaaaaattttcaccagcgttctttcggaaatagggttgcaatgaatacgcccatacagggcactgcagccgatattattaaaattgcgatggtgaaggtatacaaggctttgaaagaatccggccttaaatccaggcttatcctccaggtccatgacgaacttgttattgagacttttgaagacgaactggagactgtcaaggaacttgtcaaaaagtgcatggaagaggccgttgaattgagtgtgccgcttgttgtcgacgtttcaatcgggaaaaactggtatgaagcctcctgatatggatcc

SEQ ID NO: 447 - DNA, 2772 bp, Artificial Sequence
  Description of Artificial Sequence: Synthetic Clostridium stercorarium DNA Polymerase K832D
atgaaatacctgctgccgaccgctgctgctggtctgctgctcctcgctgcccagccggcgatggccatggatccaaaaataatccttatagacggaaacagtattttaaaccgcggtttttatgccctgtcggggcgatccatgctgactacgtccacaggtctgtataccaatgcggttttcgcttttgtaaatatattgaacaaatatatcgaagaggaaaaccctgattatattgccgttgctttcgatcttagggcaaaaactttccggcacggtctatatgagggatacaaagcgcagcggaaaggcatgcccgatgaacttgcaatgcagatacccctcgcgaaggaagtactgagggcgatgaatattgccataatagagcatgaaggttatgaagccgacgatataatcggcagcctttcgttaaaggccgaaaaagagaattttgacgtaataatccttacgggggacagggattctttccagctgatcagcgacagggtgaaagttatcctgccttcgacgaaagccggaaaaacagagaccaacgtatatgataaacaggccatcattgacaaatacggagttttaccccatcagcttattgacgttaaaggcttaatgggagattcgtcagataatatacccggcgttccgggagtgggtgagaaaacggcgttaagccttatttcagcctacggtacactggaaggtgtttacgagcatattgatgaaataaaacagcctaagctgaaagcatcgctgattgaatataaggatcaggcgtttttaagccgtaagctgggtactattgtaagaaatctggagctgtgtgcttcgctggaggatctgaaaagaaaagaaataaaccgcaaagagcttttgaatgttttcagaaaactcgaatttgaaagtatcatatcaaaaatgaatcttgcttccgctgaggtgacagaattacctcccgcgccggaagagcttaaaataacccatatttcagcggcagaggatcttaagaaatggattgcttacctgcttaaccagaaaaacatttccgtccttcaactgattgaccgggaggattcatacagttcccgtctttcagggctggctttgtgcaccggggatgaggttttttatatcgagaccgggactgcactccccgagaatttgattgcaacagagctgaaagaactgtggcagaatgaaaatattcacaaaatcggacacaatataaaagaatttataacctggctgctgaaacacgatgttgaactgaacggcctttatttcgacactatgattgccgaatacctgatagattccataagaaacggctatcctatagcaagcctttctcacaaatacctgaatcgcagcgttccgtcgctggacgaacttttgggcaagggaaagggagcaaaaaagtactctgaaattccgcccgaaaggctgaaagattacagcgcttataacgtcaaagccatttttgacatatggccgatgcagaaaaaagttcttcaggaaaaccggcaggaggagctttttaatgacatagagcttcctcttataaccgtacttgccagtatggaataccacggtttcaaagttgacgccgcaaaacttcacgaatacggcgaagttcttctgtcacgcataaaagacctggaaaaggtaatttacatgctggccggtgaagaattcaacatcaattcaacgaagcagcttggtaccatattattcgaaaaactgaagcttcccgttgtaaaaagtacaaagaccggatactccaccgacgtcgaggttcttgaagagctttattacaagcatgatataataccatgcataatagaataccgccagcttacaaaactttacaccacctacgccgaaggtcttgaaaaagtgataaatcctgtaaccggtaaaattcattcaagttttaaccagacggttacggctacaggccgcatcagcagtaccgaaccaaatttacagaatatcccagtcagacacgaaatgggaagggaaatacggaaagcttttattccgtcgtcggaaaacgctgtttttgttgatgccgattattcacagatagagcttcgcgtgcttgcccatataacaggcgatgaagccctgataaatgctttcgttaagggggaagatattcatacggccacggcgtcgctggtatttgacgtagctcccgaagatgtgacgccggaactgcgcagaaaggcaaaagccgtaaatttcggcatagtgtacgggatcagtgattacgggctggcacgggatttgggaattacccggaaggaagcaaagcggtatatagacgactattttgccaaataccccaaagtaaaaacctatgtggatgaaattgtgcgggtcggccaggaacaggggtatgtggaaactctgttccacagaagaagataccttcccgagcttgcatctaaaaattttcaccagcgttctttcggagatagggttgcaatgaatacgcccatacagggcactgcagccgatattattaaaattgcgatggtgaaggtatacaaggctttgaaagaatccggccttaaatccaggcttatcctccaggtccatgacgaacttgttattgagacttttgaagacgaactggagactgtcaaggaacttgtcaaaaagtgcatggaagaggccgttgaattgagtgtgccgcttgttgtcgacgtttcaatcgggaaaaactggtatgaagcctcctgatatggatcc

SEQ ID NO: 448 - DNA, 2772 bp, Artificial Sequence
  Description of Artificial Sequence: Synthetic Clostridium stercorarium DNA Polymerase K832C
atgaaatacctgctgccgaccgctgctgctggtctgctgctcctcgctgcccagccggcgatggccatggatccaaaaataatccttatagacggaaacagtattttaaaccgcggtttttatgccctgtcggggcgatccatgctgactacgtccacaggtctgtataccaatgcggttttcgcttttgtaaatatattgaacaaatatatcgaagaggaaaaccctgattatattgccgttgctttcgatcttagggcaaaaactttccggcacggtctatatgagggatacaaagcgcagcggaaaggcatgcccgatgaacttgcaatgcagatacccctcgcgaaggaagtactgagggcgatgaatattgccataatagagcatgaaggttatgaagccgacgatataatcggcagcctttcgttaaaggccgaaaaagagaattttgacgtaataatccttacgggggacagggattctttccagctgatcagcgacagggtgaaagttatcctgccttcgacgaaagccggaaaaacagagaccaacgtatatgataaacaggccatcattgacaaatacggagttttaccccatcagcttattgacgttaaaggcttaatgggagattcgtcagataatatacccggcgttccgggagtgggtgagaaaacggcgttaagccttatttcagcctacggtacactggaaggtgtttacgagcatattgatgaaataaaacagcctaagctgaaagcatcgctgattgaatataaggatcaggcgtttttaagccgtaagctgggtactattgtaagaaatctggagctgtgtgcttcgctggaggatctgaaaagaaaagaaataaaccgcaaagagcttttgaatgttttcagaaaactcgaatttgaaagtatcatatcaaaaatgaatcttgcttccgctgaggtgacagaattacctcccgcgccggaagagcttaaaataacccatatttcagcggcagaggatcttaagaaatggattgcttacctgcttaaccagaaaaacatttccgtccttcaactgattgaccgggaggattcatacagttcccgtctttcagggctggctttgtgcaccggggatgaggttttttatatcgagaccgggactgcactccccgagaatttgattgcaacagagctgaaagaactgtggcagaatgaaaatattcacaaaatcggacacaatataaaagaatttataacctggctgctgaaacacgatgttgaactgaacggcctttatttcgacactatgattgccgaatacctgatagattccataagaaacggctatcctatagcaagcctttctcacaaatacctgaatcgcagcgttccgtcgctggacgaacttttgggcaagggaaagggagcaaaaaagtactctgaaattccgcccgaaaggctgaaagattacagcgcttataacgtcaaagccatttttgacatatggccgatgcagaaaaaagttcttcaggaaaaccggcaggaggagctttttaatgacatagagcttcctcttataaccgtacttgccagtatggaataccacggtttcaaagttgacgccgcaaaacttcacgaatacggcgaagttcttctgtcacgcataaaagacctggaaaaggtaatttacatgctggccggtgaagaattcaacatcaattcaacgaagcagcttggtaccatattattcgaaaaactgaagcttcccgttgtaaaaagtacaaagaccggatactccaccgacgtcgaggttcttgaagagctttattacaagcatgatataataccatgcataatagaataccgccagcttacaaaactttacaccacctacgccgaaggtcttgaaaaagtgataaatcctgtaaccggtaaaattcattcaagttttaaccagacggttacggctacaggccgcatcagcagtaccgaaccaaatttacagaatatcccagtcagacacgaaatgggaagggaaatacggaaagcttttattccgtcgtcggaaaacgctgtttttgttgatgccgattattcacagatagagcttcgcgtgcttgcccatataacaggcgatgaagccctgataaatgctttcgttaagggggaagatattcatacggccacggcgtcgctggtatttgacgtagctcccgaagatgtgacgccggaactgcgcagaaaggcaaaagccgtaaatttcggcatagtgtacgggatcagtgattacgggctggcacgggatttgggaattacccggaaggaagcaaagcggtatatagacgactattttgccaaataccccaaagtaaaaacctatgtggatgaaattgtgcgggtcggccaggaacaggggtatgtggaaactctgttccacagaagaagataccttcccgagcttgcatctaaaaattttcaccagcgttctttcggatgtagggttgcaatgaatacgcccatacagggcactgcagccgatattattaaaattgcgatggtgaaggtatacaaggctttgaaagaatccggccttaaatccaggcttatcctccaggtccatgacgaacttgttattgagacttttgaagacgaactggagactgtcaaggaacttgtcaaaaagtgcatggaagaggccgttgaattgagtgtgccgcttgttgtcgacgtttcaatcgggaaaaactggtatgaagcctcctgatatggatcc

SEQ ID NO: 449 - DNA, 2772 bp, Artificial Sequence
  Description of Artificial Sequence: Synthetic Clostridium stercorarium DNA Polymerase K832E
atgaaatacctgctgccgaccgctgctgctggtctgctgctcctcgctgcccagccggcgatggccatggatccaaaaataatccttatagacggaaacagtattttaaaccgcggtttttatgccctgtcggggcgatccatgctgactacgtccacaggtctgtataccaatgcggttttcgcttttgtaaatatattgaacaaatatatcgaagaggaaaaccctgattatattgccgttgctttcgatcttagggcaaaaactttccggcacggtctatatgagggatacaaagcgcagcggaaaggcatgcccgatgaacttgcaatgcagatacccctcgcgaaggaagtactgagggcgatgaatattgccataatagagcatgaaggttatgaagccgacgatataatcggcagcctttcgttaaaggccgaaaaagagaattttgacgtaataatccttacgggggacagggattctttccagctgatcagcgacagggtgaaagttatcctgccttcgacgaaagccggaaaaacagagaccaacgtatatgataaacaggccatcattgacaaatacggagttttaccccatcagcttattgacgttaaaggcttaatgggagattcgtcagataatatacccggcgttccgggagtgggtgagaaaacggcgttaagccttatttcagcctacggtacactggaaggtgtttacgagcatattgatgaaataaaacagcctaagctgaaagcatcgctgattgaatataaggatcaggcgtttttaagccgtaagctgggtactattgtaagaaatctggagctgtgtgcttcgctggaggatctgaaaagaaaagaaataaaccgcaaagagcttttgaatgttttcagaaaactcgaatttgaaagtatcatatcaaaaatgaatcttgcttccgctgaggtgacagaattacctcccgcgccggaagagcttaaaataacccatatttcagcggcagaggatcttaagaaatggattgcttacctgcttaaccagaaaaacatttccgtccttcaactgattgaccgggaggattcatacagttcccgtctttcagggctggctttgtgcaccggggatgaggttttttatatcgagaccgggactgcactccccgagaatttgattgcaacagagctgaaagaactgtggcagaatgaaaatattcacaaaatcggacacaatataaaagaatttataacctggctgctgaaacacgatgttgaactgaacggcctttatttcgacactatgattgccgaatacctgatagattccataagaaacggctatcctatagcaagcctttctcacaaatacctgaatcgcagcgttccgtcgctggacgaacttttgggcaagggaaagggagcaaaaaagtactctgaaattccgcccgaaaggctgaaagattacagcgcttataacgtcaaagccatttttgacatatggccgatgcagaaaaaagttcttcaggaaaaccggcaggaggagctttttaatgacatagagcttcctcttataaccgtacttgccagtatggaataccacggtttcaaagttgacgccgcaaaacttcacgaatacggcgaagttcttctgtcacgcataaaagacctggaaaaggtaatttacatgctggccggtgaagaattcaacatcaattcaacgaagcagcttggtaccatattattcgaaaaactgaagcttcccgttgtaaaaagtacaaagaccggatactccaccgacgtcgaggttcttgaagagctttattacaagcatgatataataccatgcataatagaataccgccagcttacaaaactttacaccacctacgccgaaggtcttgaaaaagtgataaatcctgtaaccggtaaaattcattcaagttttaaccagacggttacggctacaggccgcatcagcagtaccgaaccaaatttacagaatatcccagtcagacacgaaatgggaagggaaatacggaaagcttttattccgtcgtcggaaaacgctgtttttgttgatgccgattattcacagatagagcttcgcgtgcttgcccatataacaggcgatgaagccctgataaatgctttcgttaagggggaagatattcatacggccacggcgtcgctggtatttgacgtagctcccgaagatgtgacgccggaactgcgcagaaaggcaaaagccgtaaatttcggcatagtgtacgggatcagtgattacgggctggcacgggatttgggaattacccggaaggaagcaaagcggtatatagacgactattttgccaaataccccaaagtaaaaacctatgtggatgaaattgtgcgggtcggccaggaacaggggtatgtggaaactctgttccacagaagaagataccttcccgagcttgcatctaaaaattttcaccagcgttctttcggagaaagggttgcaatgaatacgcccatacagggcactgcagccgatattattaaaattgcgatggtgaaggtatacaaggctttgaaagaatccggccttaaatccaggcttatcctccaggtccatgacgaacttgttattgagacttttgaagacgaactggagactgtcaaggaacttgtcaaaaagtgcatggaagaggccgttgaattgagtgtgccgcttgttgtcgacgtttcaatcgggaaaaactggtatgaagcctcctgatatggatcc

SEQ ID NO: 450 - DNA, 2772 bp, Artificial Sequence
  Description of Artificial Sequence: Synthetic Clostridium stercorarium DNA Polymerase K832Q
atgaaatacctgctgccgaccgctgctgctggtctgctgctcctcgctgcccagccggcgatggccatggatccaaaaataatccttatagacggaaacagtattttaaaccgcggtttttatgccctgtcggggcgatccatgctgactacgtccacaggtctgtataccaatgcggttttcgcttttgtaaatatattgaacaaatatatcgaagaggaaaaccctgattatattgccgttgctttcgatcttagggcaaaaactttccggcacggtctatatgagggatacaaagcgcagcggaaaggcatgcccgatgaacttgcaatgcagatacccctcgcgaaggaagtactgagggcgatgaatattgccataatagagcatgaaggttatgaagccgacgatataatcggcagcctttcgttaaaggccgaaaaagagaattttgacgtaataatccttacgggggacagggattctttccagctgatcagcgacagggtgaaagttatcctgccttcgacgaaagccggaaaaacagagaccaacgtatatgataaacaggccatcattgacaaatacggagttttaccccatcagcttattgacgttaaaggcttaatgggagattcgtcagataatatacccggcgttccgggagtgggtgagaaaacggcgttaagccttatttcagcctacggtacactggaaggtgtttacgagcatattgatgaaataaaacagcctaagctgaaagcatcgctgattgaatataaggatcaggcgtttttaagccgtaagctgggtactattgtaagaaatctggagctgtgtgcttcgctggaggatctgaaaagaaaagaaataaaccgcaaagagcttttgaatgttttcagaaaactcgaatttgaaagtatcatatcaaaaatgaatcttgcttccgctgaggtgacagaattacctcccgcgccggaagagcttaaaataacccatatttcagcggcagaggatcttaagaaatggattgcttacctgcttaaccagaaaaacatttccgtccttcaactgattgaccgggaggattcatacagttcccgtctttcagggctggctttgtgcaccggggatgaggttttttatatcgagaccgggactgcactccccgagaatttgattgcaacagagctgaaagaactgtggcagaatgaaaatattcacaaaatcggacacaatataaaagaatttataacctggctgctgaaacacgatgttgaactgaacggcctttatttcgacactatgattgccgaatacctgatagattccataagaaacggctatcctatagcaagcctttctcacaaatacctgaatcgcagcgttccgtcgctggacgaacttttgggcaagggaaagggagcaaaaaagtactctgaaattccgcccgaaaggctgaaagattacagcgcttataacgtcaaagccatttttgacatatggccgatgcagaaaaaagttcttcaggaaaaccggcaggaggagctttttaatgacatagagcttcctcttataaccgtacttgccagtatggaataccacggtttcaaagttgacgccgcaaaacttcacgaatacggcgaagttcttctgtcacgcataaaagacctggaaaaggtaatttacatgctggccggtgaagaattcaacatcaattcaacgaagcagcttggtaccatattattcgaaaaactgaagcttcccgttgtaaaaagtacaaagaccggatactccaccgacgtcgaggttcttgaagagctttattacaagcatgatataataccatgcataatagaataccgccagcttacaaaactttacaccacctacgccgaaggtcttgaaaaagtgataaatcctgtaaccggtaaaattcattcaagttttaaccagacggttacggctacaggccgcatcagcagtaccgaaccaaatttacagaatatcccagtcagacacgaaatgggaagggaaatacggaaagcttttattccgtcgtcggaaaacgctgtttttgttgatgccgattattcacagatagagcttcgcgtgcttgcccatataacaggcgatgaagccctgataaatgctttcgttaagggggaagatattcatacggccacggcgtcgctggtatttgacgtagctcccgaagatgtgacgccggaactgcgcagaaaggcaaaagccgtaaatttcggcatagtgtacgggatcagtgattacgggctggcacgggatttgggaattacccggaaggaagcaaagcggtatatagacgactattttgccaaataccccaaagtaaaaacctatgtggatgaaattgtgcgggtcggccaggaacaggggtatgtggaaactctgttccacagaagaagataccttcccgagcttgcatctaaaaattttcaccagcgttctttcggacaaagggttgcaatgaatacgcccatacagggcactgcagccgatattattaaaattgcgatggtgaaggtatacaaggctttgaaagaatccggccttaaatccaggcttatcctccaggtccatgacgaacttgttattgagacttttgaagacgaactggagactgtcaaggaacttgtcaaaaagtgcatggaagaggccgttgaattgagtgtgccgcttgttgtcgacgtttcaatcgggaaaaactggtatgaagcctcctgatatggatcc

SEQ ID NO: 451 - DNA, 2772 bp, Artificial Sequence
  Description of Artificial Sequence: Synthetic Clostridium stercorarium DNA Polymerase K832G
atgaaatacctgctgccgaccgctgctgctggtctgctgctcctcgctgcccagccggcgatggccatggatccaaaaataatccttatagacggaaacagtattttaaaccgcggtttttatgccctgtcggggcgatccatgctgactacgtccacaggtctgtataccaatgcggttttcgcttttgtaaatatattgaacaaatatatcgaagaggaaaaccctgattatattgccgttgctttcgatcttagggcaaaaactttccggcacggtctatatgagggatacaaagcgcagcggaaaggcatgcccgatgaacttgcaatgcagatacccctcgcgaaggaagtactgagggcgatgaatattgccataatagagcatgaaggttatgaagccgacgatataatcggcagcctttcgttaaaggccgaaaaagagaattttgacgtaataatccttacgggggacagggattctttccagctgatcagcgacagggtgaaagttatcctgccttcgacgaaagccggaaaaacagagaccaacgtatatgataaacaggccatcattgacaaatacggagttttaccccatcagcttattgacgttaaaggcttaatgggagattcgtcagataatatacccggcgttccgggagtgggtgagaaaacggcgttaagccttatttcagcctacggtacactggaaggtgtttacgagcatattgatgaaataaaacagcctaagctgaaagcatcgctgattgaatataaggatcaggcgtttttaagccgtaagctgggtactattgtaagaaatctggagctgtgtgcttcgctggaggatctgaaaagaaaagaaataaaccgcaaagagcttttgaatgttttcagaaaactcgaatttgaaagtatcatatcaaaaatgaatcttgcttccgctgaggtgacagaattacctcccgcgccggaagagcttaaaataacccatatttcagcggcagaggatcttaagaaatggattgcttacctgcttaaccagaaaaacatttccgtccttcaactgattgaccgggaggattcatacagttcccgtctttcagggctggctttgtgcaccggggatgaggttttttatatcgagaccgggactgcactccccgagaatttgattgcaacagagctgaaagaactgtggcagaatgaaaatattcacaaaatcggacacaatataaaagaatttataacctggctgctgaaacacgatgttgaactgaacggcctttatttcgacactatgattgccgaatacctgatagattccataagaaacggctatcctatagcaagcctttctcacaaatacctgaatcgcagcgttccgtcgctggacgaacttttgggcaagggaaagggagcaaaaaagtactctgaaattccgcccgaaaggctgaaagattacagcgcttataacgtcaaagccatttttgacatatggccgatgcagaaaaaagttcttcaggaaaaccggcaggaggagctttttaatgacatagagcttcctcttataaccgtacttgccagtatggaataccacggtttcaaagttgacgccgcaaaacttcacgaatacggcgaagttcttctgtcacgcataaaagacctggaaaaggtaatttacatgctggccggtgaagaattcaacatcaattcaacgaagcagcttggtaccatattattcgaaaaactgaagcttcccgttgtaaaaagtacaaagaccggatactccaccgacgtcgaggttcttgaagagctttattacaagcatgatataataccatgcataatagaataccgccagcttacaaaactttacaccacctacgccgaaggtcttgaaaaagtgataaatcctgtaaccggtaaaattcattcaagttttaaccagacggttacggctacaggccgcatcagcagtaccgaaccaaatttacagaatatcccagtcagacacgaaatgggaagggaaatacggaaagcttttattccgtcgtcggaaaacgctgtttttgttgatgccgattattcacagatagagcttcgcgtgcttgcccatataacaggcgatgaagccctgataaatgctttcgttaagggggaagatattcatacggccacggcgtcgctggtatttgacgtagctcccgaagatgtgacgccggaactgcgcagaaaggcaaaagccgtaaatttcggcatagtgtacgggatcagtgattacgggctggcacgggatttgggaattacccggaaggaagcaaagcggtatatagacgactattttgccaaataccccaaagtaaaaacctatgtggatgaaattgtgcgggtcggccaggaacaggggtatgtggaaactctgttccacagaagaagataccttcccgagcttgcatctaaaaattttcaccagcgttctttcggaggtagggttgcaatgaatacgcccatacagggcactgcagccgatattattaaaattgcgatggtgaaggtatacaaggctttgaaagaatccggccttaaatccaggcttatcctccaggtccatgacgaacttgttattgagacttttgaagacgaactggagactgtcaaggaacttgtcaaaaagtgcatggaagaggccgttgaattgagtgtgccgcttgttgtcgacgtttcaatcgggaaaaactggtatgaagcctcctgatatggatcc

SEQ ID NO: 452 - DNA, 2772 bp, Artificial Sequence
  Description of Artificial Sequence: Synthetic Clostridium stercorarium DNA Polymerase K832H
atgaaatacctgctgccgaccgctgctgctggtctgctgctcctcgctgcccagccggcgatggccatggatccaaaaataatccttatagacggaaacagtattttaaaccgcggtttttatgccctgtcggggcgatccatgctgactacgtccacaggtctgtataccaatgcggttttcgcttttgtaaatatattgaacaaatatatcgaagaggaaaaccctgattatattgccgttgctttcgatcttagggcaaaaactttccggcacggtctatatgagggatacaaagcgcagcggaaaggcatgcccgatgaacttgcaatgcagatacccctcgcgaaggaagtactgagggcgatgaatattgccataatagagcatgaaggttatgaagccgacgatataatcggcagcctttcgttaaaggccgaaaaagagaattttgacgtaataatccttacgggggacagggattctttccagctgatcagcgacagggtgaaagttatcctgccttcgacgaaagccggaaaaacagagaccaacgtatatgataaacaggccatcattgacaaatacggagttttaccccatcagcttattgacgttaaaggcttaatgggagattcgtcagataatatacccggcgttccgggagtgggtgagaaaacggcgttaagccttatttcagcctacggtacactggaaggtgtttacgagcatattgatgaaataaaacagcctaagctgaaagcatcgctgattgaatataaggatcaggcgtttttaagccgtaagctgggtactattgtaagaaatctggagctgtgtgcttcgctggaggatctgaaaagaaaagaaataaaccgcaaagagcttttgaatgttttcagaaaactcgaatttgaaagtatcatatcaaaaatgaatcttgcttccgctgaggtgacagaattacctcccgcgccggaagagcttaaaataacccatatttcagcggcagaggatcttaagaaatggattgcttacctgcttaaccagaaaaacatttccgtccttcaactgattgaccgggaggattcatacagttcccgtctttcagggctggctttgtgcaccggggatgaggttttttatatcgagaccgggactgcactccccgagaatttgattgcaacagagctgaaagaactgtggcagaatgaaaatattcacaaaatcggacacaatataaaagaatttataacctggctgctgaaacacgatgttgaactgaacggcctttatttcgacactatgattgccgaatacctgatagattccataagaaacggctatcctatagcaagcctttctcacaaatacctgaatcgcagcgttccgtcgctggacgaacttttgggcaagggaaagggagcaaaaaagtactctgaaattccgcccgaaaggctgaaagattacagcgcttataacgtcaaagccatttttgacatatggccgatgcagaaaaaagttcttcaggaaaaccggcaggaggagctttttaatgacatagagcttcctcttataaccgtacttgccagtatggaataccacggtttcaaagttgacgccgcaaaacttcacgaatacggcgaagttcttctgtcacgcataaaagacctggaaaaggtaatttacatgctggccggtgaagaattcaacatcaattcaacgaagcagcttggtaccatattattcgaaaaactgaagcttcccgttgtaaaaagtacaaagaccggatactccaccgacgtcgaggttcttgaagagctttattacaagcatgatataataccatgcataatagaataccgccagcttacaaaactttacaccacctacgccgaaggtcttgaaaaagtgataaatcctgtaaccggtaaaattcattcaagttttaaccagacggttacggctacaggccgcatcagcagtaccgaaccaaatttacagaatatcccagtcagacacgaaatgggaagggaaatacggaaagcttttattccgtcgtcggaaaacgctgtttttgttgatgccgattattcacagatagagcttcgcgtgcttgcccatataacaggcgatgaagccctgataaatgctttcgttaagggggaagatattcatacggccacggcgtcgctggtatttgacgtagctcccgaagatgtgacgccggaactgcgcagaaaggcaaaagccgtaaatttcggcatagtgtacgggatcagtgattacgggctggcacgggatttgggaattacccggaaggaagcaaagcggtatatagacgactattttgccaaataccccaaagtaaaaacctatgtggatgaaattgtgcgggtcggccaggaacaggggtatgtggaaactctgttccacagaagaagataccttcccgagcttgcatctaaaaattttcaccagcgttctttcggacatagggttgcaatgaatacgcccatacagggcactgcagccgatattattaaaattgcgatggtgaaggtatacaaggctttgaaagaatccggccttaaatccaggcttatcctccaggtccatgacgaacttgttattgagacttttgaagacgaactggagactgtcaaggaacttgtcaaaaagtgcatggaagaggccgttgaattgagtgtgccgcttgttgtcgacgtttcaatcgggaaaaactggtatgaagcctcctgatatggatcc

SEQ ID NO: 453 - DNA, 2772 bp, Artificial Sequence
  Description of Artificial Sequence: Synthetic Clostridium stercorarium DNA Polymerase K832I
atgaaatacctgctgccgaccgctgctgctggtctgctgctcctcgctgcccagccggcgatggccatggatccaaaaataatccttatagacggaaacagtattttaaaccgcggtttttatgccctgtcggggcgatccatgctgactacgtccacaggtctgtataccaatgcggttttcgcttttgtaaatatattgaacaaatatatcgaagaggaaaaccctgattatattgccgttgctttcgatcttagggcaaaaactttccggcacggtctatatgagggatacaaagcgcagcggaaaggcatgcccgatgaacttgcaatgcagatacccctcgcgaaggaagtactgagggcgatgaatattgccataatagagcatgaaggttatgaagccgacgatataatcggcagcctttcgttaaaggccgaaaaagagaattttgacgtaataatccttacgggggacagggattctttccagctgatcagcgacagggtgaaagttatcctgccttcgacgaaagccggaaaaacagagaccaacgtatatgataaacaggccatcattgacaaatacggagttttaccccatcagcttattgacgttaaaggcttaatgggagattcgtcagataatatacccggcgttccgggagtgggtgagaaaacggcgttaagccttatttcagcctacggtacactggaaggtgtttacgagcatattgatgaaataaaacagcctaagctgaaagcatcgctgattgaatataaggatcaggcgtttttaagccgtaagctgggtactattgtaagaaatctggagctgtgtgcttcgctggaggatctgaaaagaaaagaaataaaccgcaaagagcttttgaatgttttcagaaaactcgaatttgaaagtatcatatcaaaaatgaatcttgcttccgctgaggtgacagaattacctcccgcgccggaagagcttaaaataacccatatttcagcggcagaggatcttaagaaatggattgcttacctgcttaaccagaaaaacatttccgtccttcaactgattgaccgggaggattcatacagttcccgtctttcagggctggctttgtgcaccggggatgaggttttttatatcgagaccgggactgcactccccgagaatttgattgcaacagagctgaaagaactgtggcagaatgaaaatattcacaaaatcggacacaatataaaagaatttataacctggctgctgaaacacgatgttgaactgaacggcctttatttcgacactatgattgccgaatacctgatagattccataagaaacggctatcctatagcaagcctttctcacaaatacctgaatcgcagcgttccgtcgctggacgaacttttgggcaagggaaagggagcaaaaaagtactctgaaattccgcccgaaaggctgaaagattacagcgcttataacgtcaaagccatttttgacatatggccgatgcagaaaaaagttcttcaggaaaaccggcaggaggagctttttaatgacatagagcttcctcttataaccgtacttgccagtatggaataccacggtttcaaagttgacgccgcaaaacttcacgaatacggcgaagttcttctgtcacgcataaaagacctggaaaaggtaatttacatgctggccggtgaagaattcaacatcaattcaacgaagcagcttggtaccatattattcgaaaaactgaagcttcccgttgtaaaaagtacaaagaccggatactccaccgacgtcgaggttcttgaagagctttattacaagcatgatataataccatgcataatagaataccgccagcttacaaaactttacaccacctacgccgaaggtcttgaaaaagtgataaatcctgtaaccggtaaaattcattcaagttttaaccagacggttacggctacaggccgcatcagcagtaccgaaccaaatttacagaatatcccagtcagacacgaaatgggaagggaaatacggaaagcttttattccgtcgtcggaaaacgctgtttttgttgatgccgattattcacagatagagcttcgcgtgcttgcccatataacaggcgatgaagccctgataaatgctttcgttaagggggaagatattcatacggccacggcgtcgctggtatttgacgtagctcccgaagatgtgacgccggaactgcgcagaaaggcaaaagccgtaaatttcggcatagtgtacgggatcagtgattacgggctggcacgggatttgggaattacccggaaggaagcaaagcggtatatagacgactattttgccaaataccccaaagtaaaaacctatgtggatgaaattgtgcgggtcggccaggaacaggggtatgtggaaactctgttccacagaagaagataccttcccgagcttgcatctaaaaattttcaccagcgttctttcggaattagggttgcaatgaatacgcccatacagggcactgcagccgatattattaaaattgcgatggtgaaggtatacaaggctttgaaagaatccggccttaaatccaggcttatcctccaggtccatgacgaacttgttattgagacttttgaagacgaactggagactgtcaaggaacttgtcaaaaagtgcatggaagaggccgttgaattgagtgtgccgcttgttgtcgacgtttcaatcgggaaaaactggtatgaagcctcctgatatggatcc

SEQ ID NO: 454 - DNA, 2772 bp, Artificial Sequence
  Description of Artificial Sequence: Synthetic Clostridium stercorarium DNA Polymerase K832L
atgaaatacctgctgccgaccgctgctgctggtctgctgctcctcgctgcccagccggcgatggccatggatccaaaaataatccttatagacggaaacagtattttaaaccgcggtttttatgccctgtcggggcgatccatgctgactacgtccacaggtctgtataccaatgcggttttcgcttttgtaaatatattgaacaaatatatcgaagaggaaaaccctgattatattgccgttgctttcgatcttagggcaaaaactttccggcacggtctatatgagggatacaaagcgcagcggaaaggcatgcccgatgaacttgcaatgcagatacccctcgcgaaggaagtactgagggcgatgaatattgccataatagagcatgaaggttatgaagccgacgatataatcggcagcctttcgttaaaggccgaaaaagagaattttgacgtaataatccttacgggggacagggattctttccagctgatcagcgacagggtgaaagttatcctgccttcgacgaaagccggaaaaacagagaccaacgtatatgataaacaggccatcattgacaaatacggagttttaccccatcagcttattgacgttaaaggcttaatgggagattcgtcagataatatacccggcgttccgggagtgggtgagaaaacggcgttaagccttatttcagcctacggtacactggaaggtgtttacgagcatattgatgaaataaaacagcctaagctgaaagcatcgctgattgaatataaggatcaggcgtttttaagccgtaagctgggtactattgtaagaaatctggagctgtgtgcttcgctggaggatctgaaaagaaaagaaataaaccgcaaagagcttttgaatgttttcagaaaactcgaatttgaaagtatcatatcaaaaatgaatcttgcttccgctgaggtgacagaattacctcccgcgccggaagagcttaaaataacccatatttcagcggcagaggatcttaagaaatggattgcttacctgcttaaccagaaaaacatttccgtccttcaactgattgaccgggaggattcatacagttcccgtctttcagggctggctttgtgcaccggggatgaggttttttatatcgagaccgggactgcactccccgagaatttgattgcaacagagctgaaagaactgtggcagaatgaaaatattcacaaaatcggacacaatataaaagaatttataacctggctgctgaaacacgatgttgaactgaacggcctttatttcgacactatgattgccgaatacctgatagattccataagaaacggctatcctatagcaagcctttctcacaaatacctgaatcgcagcgttccgtcgctggacgaacttttgggcaagggaaagggagcaaaaaagtactctgaaattccgcccgaaaggctgaaagattacagcgcttataacgtcaaagccatttttgacatatggccgatgcagaaaaaagttcttcaggaaaaccggcaggaggagctttttaatgacatagagcttcctcttataaccgtacttgccagtatggaataccacggtttcaaagttgacgccgcaaaacttcacgaatacggcgaagttcttctgtcacgcataaaagacctggaaaaggtaatttacatgctggccggtgaagaattcaacatcaattcaacgaagcagcttggtaccatattattcgaaaaactgaagcttcccgttgtaaaaagtacaaagaccggatactccaccgacgtcgaggttcttgaagagctttattacaagcatgatataataccatgcataatagaataccgccagcttacaaaactttacaccacctacgccgaaggtcttgaaaaagtgataaatcctgtaaccggtaaaattcattcaagttttaaccagacggttacggctacaggccgcatcagcagtaccgaaccaaatttacagaatatcccagtcagacacgaaatgggaagggaaatacggaaagcttttattccgtcgtcggaaaacgctgtttttgttgatgccgattattcacagatagagcttcgcgtgcttgcccatataacaggcgatgaagccctgataaatgctttcgttaagggggaagatattcatacggccacggcgtcgctggtatttgacgtagctcccgaagatgtgacgccggaactgcgcagaaaggcaaaagccgtaaatttcggcatagtgtacgggatcagtgattacgggctggcacgggatttgggaattacccggaaggaagcaaagcggtatatagacgactattttgccaaataccccaaagtaaaaacctatgtggatgaaattgtgcgggtcggccaggaacaggggtatgtggaaactctgttccacagaagaagataccttcccgagcttgcatctaaaaattttcaccagcgttctttcggacttagggttgcaatgaatacgcccatacagggcactgcagccgatattattaaaattgcgatggtgaaggtatacaaggctttgaaagaatccggccttaaatccaggcttatcctccaggtccatgacgaacttgttattgagacttttgaagacgaactggagactgtcaaggaacttgtcaaaaagtgcatggaagaggccgttgaattgagtgtgccgcttgttgtcgacgtttcaatcgggaaaaactggtatgaagcctcctgatatggatcc

SEQ ID NO: 455 - DNA, 2772 bp, Artificial Sequence
  Description of Artificial Sequence: Synthetic Clostridium stercorarium DNA Polymerase K832M
atgaaatacctgctgccgaccgctgctgctggtctgctgctcctcgctgcccagccggcgatggccatggatccaaaaataatccttatagacggaaacagtattttaaaccgcggtttttatgccctgtcggggcgatccatgctgactacgtccacaggtctgtataccaatgcggttttcgcttttgtaaatatattgaacaaatatatcgaagaggaaaaccctgattatattgccgttgctttcgatcttagggcaaaaactttccggcacggtctatatgagggatacaaagcgcagcggaaaggcatgcccgatgaacttgcaatgcagatacccctcgcgaaggaagtactgagggcgatgaatattgccataatagagcatgaaggttatgaagccgacgatataatcggcagcctttcgttaaaggccgaaaaagagaattttgacgtaataatccttacgggggacagggattctttccagctgatcagcgacagggtgaaagttatcctgccttcgacgaaagccggaaaaacagagaccaacgtatatgataaacaggccatcattgacaaatacggagttttaccccatcagcttattgacgttaaaggcttaatgggagattcgtcagataatatacccggcgttccgggagtgggtgagaaaacggcgttaagccttatttcagcctacggtacactggaaggtgtttacgagcatattgatgaaataaaacagcctaagctgaaagcatcgctgattgaatataaggatcaggcgtttttaagccgtaagctgggtactattgtaagaaatctggagctgtgtgcttcgctggaggatctgaaaagaaaagaaataaaccgcaaagagcttttgaatgttttcagaaaactcgaatttgaaagtatcatatcaaaaatgaatcttgcttccgctgaggtgacagaattacctcccgcgccggaagagcttaaaataacccatatttcagcggcagaggatcttaagaaatggattgcttacctgcttaaccagaaaaacatttccgtccttcaactgattgaccgggaggattcatacagttcccgtctttcagggctggctttgtgcaccggggatgaggttttttatatcgagaccgggactgcactccccgagaatttgattgcaacagagctgaaagaactgtggcagaatgaaaatattcacaaaatcggacacaatataaaagaatttataacctggctgctgaaacacgatgttgaactgaacggcctttatttcgacactatgattgccgaatacctgatagattccataagaaacggctatcctatagcaagcctttctcacaaatacctgaatcgcagcgttccgtcgctggacgaacttttgggcaagggaaagggagcaaaaaagtactctgaaattccgcccgaaaggctgaaagattacagcgcttataacgtcaaagccatttttgacatatggccgatgcagaaaaaagttcttcaggaaaaccggcaggaggagctttttaatgacatagagcttcctcttataaccgtacttgccagtatggaataccacggtttcaaagttgacgccgcaaaacttcacgaatacggcgaagttcttctgtcacgcataaaagacctggaaaaggtaatttacatgctggccggtgaagaattcaacatcaattcaacgaagcagcttggtaccatattattcgaaaaactgaagcttcccgttgtaaaaagtacaaagaccggatactccaccgacgtcgaggttcttgaagagctttattacaagcatgatataataccatgcataatagaataccgccagcttacaaaactttacaccacctacgccgaaggtcttgaaaaagtgataaatcctgtaaccggtaaaattcattcaagttttaaccagacggttacggctacaggccgcatcagcagtaccgaaccaaatttacagaatatcccagtcagacacgaaatgggaagggaaatacggaaagcttttattccgtcgtcggaaaacgctgtttttgttgatgccgattattcacagatagagcttcgcgtgcttgcccatataacaggcgatgaagccctgataaatgctttcgttaagggggaagatattcatacggccacggcgtcgctggtatttgacgtagctcccgaagatgtgacgccggaactgcgcagaaaggcaaaagccgtaaatttcggcatagtgtacgggatcagtgattacgggctggcacgggatttgggaattacccggaaggaagcaaagcggtatatagacgactattttgccaaataccccaaagtaaaaacctatgtggatgaaattgtgcgggtcggccaggaacaggggtatgtggaaactctgttccacagaagaagataccttcccgagcttgcatctaaaaattttcaccagcgttctttcggaatgagggttgcaatgaatacgcccatacagggcactgcagccgatattattaaaattgcgatggtgaaggtatacaaggctttgaaagaatccggccttaaatccaggcttatcctccaggtccatgacgaacttgttattgagacttttgaagacgaactggagactgtcaaggaacttgtcaaaaagtgcatggaagaggccgttgaattgagtgtgccgcttgttgtcgacgtttcaatcgggaaaaactggtatgaagcctcctgatatggatcc

SEQ ID NO: 456 - DNA, 2772 bp, Artificial Sequence
  Description of Artificial Sequence: Synthetic Clostridium stercorarium DNA Polymerase K832F
atgaaatacctgctgccgaccgctgctgctggtctgctgctcctcgctgcccagccggcgatggccatggatccaaaaataatccttatagacggaaacagtattttaaaccgcggtttttatgccctgtcggggcgatccatgctgactacgtccacaggtctgtataccaatgcggttttcgcttttgtaaatatattgaacaaatatatcgaagaggaaaaccctgattatattgccgttgctttcgatcttagggcaaaaactttccggcacggtctatatgagggatacaaagcgcagcggaaaggcatgcccgatgaacttgcaatgcagatacccctcgcgaaggaagtactgagggcgatgaatattgccataatagagcatgaaggttatgaagccgacgatataatcggcagcctttcgttaaaggccgaaaaagagaattttgacgtaataatccttacgggggacagggattctttccagctgatcagcgacagggtgaaagttatcctgccttcgacgaaagccggaaaaacagagaccaacgtatatgataaacaggccatcattgacaaatacggagttttaccccatcagcttattgacgttaaaggcttaatgggagattcgtcagataatatacccggcgttccgggagtgggtgagaaaacggcgttaagccttatttcagcctacggtacactggaaggtgtttacgagcatattgatgaaataaaacagcctaagctgaaagcatcgctgattgaatataaggatcaggcgtttttaagccgtaagctgggtactattgtaagaaatctggagctgtgtgcttcgctggaggatctgaaaagaaaagaaataaaccgcaaagagcttttgaatgttttcagaaaactcgaatttgaaagtatcatatcaaaaatgaatcttgcttccgctgaggtgacagaattacctcccgcgccggaagagcttaaaataacccatatttcagcggcagaggatcttaagaaatggattgcttacctgcttaaccagaaaaacatttccgtccttcaactgattgaccgggaggattcatacagttcccgtctttcagggctggctttgtgcaccggggatgaggttttttatatcgagaccgggactgcactccccgagaatttgattgcaacagagctgaaagaactgtggcagaatgaaaatattcacaaaatcggacacaatataaaagaatttataacctggctgctgaaacacgatgttgaactgaacggcctttatttcgacactatgattgccgaatacctgatagattccataagaaacggctatcctatagcaagcctttctcacaaatacctgaatcgcagcgttccgtcgctggacgaacttttgggcaagggaaagggagcaaaaaagtactctgaaattccgcccgaaaggctgaaagattacagcgcttataacgtcaaagccatttttgacatatggccgatgcagaaaaaagttcttcaggaaaaccggcaggaggagctttttaatgacatagagcttcctcttataaccgtacttgccagtatggaataccacggtttcaaagttgacgccgcaaaacttcacgaatacggcgaagttcttctgtcacgcataaaagacctggaaaaggtaatttacatgctggccggtgaagaattcaacatcaattcaacgaagcagcttggtaccatattattcgaaaaactgaagcttcccgttgtaaaaagtacaaagaccggatactccaccgacgtcgaggttcttgaagagctttattacaagcatgatataataccatgcataatagaataccgccagcttacaaaactttacaccacctacgccgaaggtcttgaaaaagtgataaatcctgtaaccggtaaaattcattcaagttttaaccagacggttacggctacaggccgcatcagcagtaccgaaccaaatttacagaatatcccagtcagacacgaaatgggaagggaaatacggaaagcttttattccgtcgtcggaaaacgctgtttttgttgatgccgattattcacagatagagcttcgcgtgcttgcccatataacaggcgatgaagccctgataaatgctttcgttaagggggaagatattcatacggccacggcgtcgctggtatttgacgtagctcccgaagatgtgacgccggaactgcgcagaaaggcaaaagccgtaaatttcggcatagtgtacgggatcagtgattacgggctggcacgggatttgggaattacccggaaggaagcaaagcggtatatagacgactattttgccaaataccccaaagtaaaaacctatgtggatgaaattgtgcgggtcggccaggaacaggggtatgtggaaactctgttccacagaagaagataccttcccgagcttgcatctaaaaattttcaccagcgttctttcggatttagggttgcaatgaatacgcccatacagggcactgcagccgatattattaaaattgcgatggtgaaggtatacaaggctttgaaagaatccggccttaaatccaggcttatcctccaggtccatgacgaacttgttattgagacttttgaagacgaactggagactgtcaaggaacttgtcaaaaagtgcatggaagaggccgttgaattgagtgtgccgcttgttgtcgacgtttcaatcgggaaaaactggtatgaagcctcctgatatggatcc

SEQ ID NO: 457 - DNA, 2772 bp, Artificial Sequence
  Description of Artificial Sequence: Synthetic Clostridium stercorarium DNA Polymerase K832P
atgaaatacctgctgccgaccgctgctgctggtctgctgctcctcgctgcccagccggcgatggccatggatccaaaaataatccttatagacggaaacagtattttaaaccgcggtttttatgccctgtcggggcgatccatgctgactacgtccacaggtctgtataccaatgcggttttcgcttttgtaaatatattgaacaaatatatcgaagaggaaaaccctgattatattgccgttgctttcgatcttagggcaaaaactttccggcacggtctatatgagggatacaaagcgcagcggaaaggcatgcccgatgaacttgcaatgcagatacccctcgcgaaggaagtactgagggcgatgaatattgccataatagagcatgaaggttatgaagccgacgatataatcggcagcctttcgttaaaggccgaaaaagagaattttgacgtaataatccttacgggggacagggattctttccagctgatcagcgacagggtgaaagttatcctgccttcgacgaaagccggaaaaacagagaccaacgtatatgataaacaggccatcattgacaaatacggagttttaccccatcagcttattgacgttaaaggcttaatgggagattcgtcagataatatacccggcgttccgggagtgggtgagaaaacggcgttaagccttatttcagcctacggtacactggaaggtgtttacgagcatattgatgaaataaaacagcctaagctgaaagcatcgctgattgaatataaggatcaggcgtttttaagccgtaagctgggtactattgtaagaaatctggagctgtgtgcttcgctggaggatctgaaaagaaaagaaataaaccgcaaagagcttttgaatgttttcagaaaactcgaatttgaaagtatcatatcaaaaatgaatcttgcttccgctgaggtgacagaattacctcccgcgccggaagagcttaaaataacccatatttcagcggcagaggatcttaagaaatggattgcttacctgcttaaccagaaaaacatttccgtccttcaactgattgaccgggaggattcatacagttcccgtctttcagggctggctttgtgcaccggggatgaggttttttatatcgagaccgggactgcactccccgagaatttgattgcaacagagctgaaagaactgtggcagaatgaaaatattcacaaaatcggacacaatataaaagaatttataacctggctgctgaaacacgatgttgaactgaacggcctttatttcgacactatgattgccgaatacctgatagattccataagaaacggctatcctatagcaagcctttctcacaaatacctgaatcgcagcgttccgtcgctggacgaacttttgggcaagggaaagggagcaaaaaagtactctgaaattccgcccgaaaggctgaaagattacagcgcttataacgtcaaagccatttttgacatatggccgatgcagaaaaaagttcttcaggaaaaccggcaggaggagctttttaatgacatagagcttcctcttataaccgtacttgccagtatggaataccacggtttcaaagttgacgccgcaaaacttcacgaatacggcgaagttcttctgtcacgcataaaagacctggaaaaggtaatttacatgctggccggtgaagaattcaacatcaattcaacgaagcagcttggtaccatattattcgaaaaactgaagcttcccgttgtaaaaagtacaaagaccggatactccaccgacgtcgaggttcttgaagagctttattacaagcatgatataataccatgcataatagaataccgccagcttacaaaactttacaccacctacgccgaaggtcttgaaaaagtgataaatcctgtaaccggtaaaattcattcaagttttaaccagacggttacggctacaggccgcatcagcagtaccgaaccaaatttacagaatatcccagtcagacacgaaatgggaagggaaatacggaaagcttttattccgtcgtcggaaaacgctgtttttgttgatgccgattattcacagatagagcttcgcgtgcttgcccatataacaggcgatgaagccctgataaatgctttcgttaagggggaagatattcatacggccacggcgtcgctggtatttgacgtagctcccgaagatgtgacgccggaactgcgcagaaaggcaaaagccgtaaatttcggcatagtgtacgggatcagtgattacgggctggcacgggatttgggaattacccggaaggaagcaaagcggtatatagacgactattttgccaaataccccaaagtaaaaacctatgtggatgaaattgtgcgggtcggccaggaacaggggtatgtggaaactctgttccacagaagaagataccttcccgagcttgcatctaaaaattttcaccagcgttctttcggacctagggttgcaatgaatacgcccatacagggcactgcagccgatattattaaaattgcgatggtgaaggtatacaaggctttgaaagaatccggccttaaatccaggcttatcctccaggtccatgacgaacttgttattgagacttttgaagacgaactggagactgtcaaggaacttgtcaaaaagtgcatggaagaggccgttgaattgagtgtgccgcttgttgtcgacgtttcaatcgggaaaaactggtatgaagcctcctgatatggatcc

SEQ ID NO: 458 - DNA, 2772 bp, Artificial Sequence
  Description of Artificial Sequence: Synthetic Clostridium stercorarium DNA Polymerase K832S
atgaaatacctgctgccgaccgctgctgctggtctgctgctcctcgctgcccagccggcgatggccatggatccaaaaataatccttatagacggaaacagtattttaaaccgcggtttttatgccctgtcggggcgatccatgctgactacgtccacaggtctgtataccaatgcggttttcgcttttgtaaatatattgaacaaatatatcgaagaggaaaaccctgattatattgccgttgctttcgatcttagggcaaaaactttccggcacggtctatatgagggatacaaagcgcagcggaaaggcatgcccgatgaacttgcaatgcagatacccctcgcgaaggaagtactgagggcgatgaatattgccataatagagcatgaaggttatgaagccgacgatataatcggcagcctttcgttaaaggccgaaaaagagaattttgacgtaataatccttacgggggacagggattctttccagctgatcagcgacagggtgaaagttatcctgccttcgacgaaagccggaaaaacagagaccaacgtatatgataaacaggccatcattgacaaatacggagttttaccccatcagcttattgacgttaaaggcttaatgggagattcgtcagataatatacccggcgttccgggagtgggtgagaaaacggcgttaagccttatttcagcctacggtacactggaaggtgtttacgagcatattgatgaaataaaacagcctaagctgaaagcatcgctgattgaatataaggatcaggcgtttttaagccgtaagctgggtactattgtaagaaatctggagctgtgtgcttcgctggaggatctgaaaagaaaagaaataaaccgcaaagagcttttgaatgttttcagaaaactcgaatttgaaagtatcatatcaaaaatgaatcttgcttccgctgaggtgacagaattacctcccgcgccggaagagcttaaaataacccatatttcagcggcagaggatcttaagaaatggattgcttacctgcttaaccagaaaaacatttccgtccttcaactgattgaccgggaggattcatacagttcccgtctttcagggctggctttgtgcaccggggatgaggttttttatatcgagaccgggactgcactccccgagaatttgattgcaacagagctgaaagaactgtggcagaatgaaaatattcacaaaatcggacacaatataaaagaatttataacctggctgctgaaacacgatgttgaactgaacggcctttatttcgacactatgattgccgaatacctgatagattccataagaaacggctatcctatagcaagcctttctcacaaatacctgaatcgcagcgttccgtcgctggacgaacttttgggcaagggaaagggagcaaaaaagtactctgaaattccgcccgaaaggctgaaagattacagcgcttataacgtcaaagccatttttgacatatggccgatgcagaaaaaagttcttcaggaaaaccggcaggaggagctttttaatgacatagagcttcctcttataaccgtacttgccagtatggaataccacggtttcaaagttgacgccgcaaaacttcacgaatacggcgaagttcttctgtcacgcataaaagacctggaaaaggtaatttacatgctggccggtgaagaattcaacatcaattcaacgaagcagcttggtaccatattattcgaaaaactgaagcttcccgttgtaaaaagtacaaagaccggatactccaccgacgtcgaggttcttgaagagctttattacaagcatgatataataccatgcataatagaataccgccagcttacaaaactttacaccacctacgccgaaggtcttgaaaaagtgataaatcctgtaaccggtaaaattcattcaagttttaaccagacggttacggctacaggccgcatcagcagtaccgaaccaaatttacagaatatcccagtcagacacgaaatgggaagggaaatacggaaagcttttattccgtcgtcggaaaacgctgtttttgttgatgccgattattcacagatagagcttcgcgtgcttgcccatataacaggcgatgaagccctgataaatgctttcgttaagggggaagatattcatacggccacggcgtcgctggtatttgacgtagctcccgaagatgtgacgccggaactgcgcagaaaggcaaaagccgtaaatttcggcatagtgtacgggatcagtgattacgggctggcacgggatttgggaattacccggaaggaagcaaagcggtatatagacgactattttgccaaataccccaaagtaaaaacctatgtggatgaaattgtgcgggtcggccaggaacaggggtatgtggaaactctgttccacagaagaagataccttcccgagcttgcatctaaaaattttcaccagcgttctttcggatctagggttgcaatgaatacgcccatacagggcactgcagccgatattattaaaattgcgatggtgaaggtatacaaggctttgaaagaatccggccttaaatccaggcttatcctccaggtccatgacgaacttgttattgagacttttgaagacgaactggagactgtcaaggaacttgtcaaaaagtgcatggaagaggccgttgaattgagtgtgccgcttgttgtcgacgtttcaatcgggaaaaactggtatgaagcctcctgatatggatcc

SEQ ID NO: 459 - DNA, 2772 bp, Artificial Sequence
  Description of Artificial Sequence: Synthetic Clostridium stercorarium DNA Polymerase K832T
atgaaatacctgctgccgaccgctgctgctggtctgctgctcctcgctgcccagccggcgatggccatggatccaaaaataatccttatagacggaaacagtattttaaaccgcggtttttatgccctgtcggggcgatccatgctgactacgtccacaggtctgtataccaatgcggttttcgcttttgtaaatatattgaacaaatatatcgaagaggaaaaccctgattatattgccgttgctttcgatcttagggcaaaaactttccggcacggtctatatgagggatacaaagcgcagcggaaaggcatgcccgatgaacttgcaatgcagatacccctcgcgaaggaagtactgagggcgatgaatattgccataatagagcatgaaggttatgaagccgacgatataatcggcagcctttcgttaaaggccgaaaaagagaattttgacgtaataatccttacgggggacagggattctttccagctgatcagcgacagggtgaaagttatcctgccttcgacgaaagccggaaaaacagagaccaacgtatatgataaacaggccatcattgacaaatacggagttttaccccatcagcttattgacgttaaaggcttaatgggagattcgtcagataatatacccggcgttccgggagtgggtgagaaaacggcgttaagccttatttcagcctacggtacactggaaggtgtttacgagcatattgatgaaataaaacagcctaagctgaaagcatcgctgattgaatataaggatcaggcgtttttaagccgtaagctgggtactattgtaagaaatctggagctgtgtgcttcgctggaggatctgaaaagaaaagaaataaaccgcaaagagcttttgaatgttttcagaaaactcgaatttgaaagtatcatatcaaaaatgaatcttgcttccgctgaggtgacagaattacctcccgcgccggaagagcttaaaataacccatatttcagcggcagaggatcttaagaaatggattgcttacctgcttaaccagaaaaacatttccgtccttcaactgattgaccgggaggattcatacagttcccgtctttcagggctggctttgtgcaccggggatgaggttttttatatcgagaccgggactgcactccccgagaatttgattgcaacagagctgaaagaactgtggcagaatgaaaatattcacaaaatcggacacaatataaaagaatttataacctggctgctgaaacacgatgttgaactgaacggcctttatttcgacactatgattgccgaatacctgatagattccataagaaacggctatcctatagcaagcctttctcacaaatacctgaatcgcagcgttccgtcgctggacgaacttttgggcaagggaaagggagcaaaaaagtactctgaaattccgcccgaaaggctgaaagattacagcgcttataacgtcaaagccatttttgacatatggccgatgcagaaaaaagttcttcaggaaaaccggcaggaggagctttttaatgacatagagcttcctcttataaccgtacttgccagtatggaataccacggtttcaaagttgacgccgcaaaacttcacgaatacggcgaagttcttctgtcacgcataaaagacctggaaaaggtaatttacatgctggccggtgaagaattcaacatcaattcaacgaagcagcttggtaccatattattcgaaaaactgaagcttcccgttgtaaaaagtacaaagaccggatactccaccgacgtcgaggttcttgaagagctttattacaagcatgatataataccatgcataatagaataccgccagcttacaaaactttacaccacctacgccgaaggtcttgaaaaagtgataaatcctgtaaccggtaaaattcattcaagttttaaccagacggttacggctacaggccgcatcagcagtaccgaaccaaatttacagaatatcccagtcagacacgaaatgggaagggaaatacggaaagcttttattccgtcgtcggaaaacgctgtttttgttgatgccgattattcacagatagagcttcgcgtgcttgcccatataacaggcgatgaagccctgataaatgctttcgttaagggggaagatattcatacggccacggcgtcgctggtatttgacgtagctcccgaagatgtgacgccggaactgcgcagaaaggcaaaagccgtaaatttcggcatagtgtacgggatcagtgattacgggctggcacgggatttgggaattacccggaaggaagcaaagcggtatatagacgactattttgccaaataccccaaagtaaaaacctatgtggatgaaattgtgcgggtcggccaggaacaggggtatgtggaaactctgttccacagaagaagataccttcccgagcttgcatctaaaaattttcaccagcgttctttcggaactagggttgcaatgaatacgcccatacagggcactgcagccgatattattaaaattgcgatggtgaaggtatacaaggctttgaaagaatccggccttaaatccaggcttatcctccaggtccatgacgaacttgttattgagacttttgaagacgaactggagactgtcaaggaacttgtcaaaaagtgcatggaagaggccgttgaattgagtgtgccgcttgttgtcgacgtttcaatcgggaaaaactggtatgaagcctcctgatatggatcc

SEQ ID NO: 460 - DNA, 2772 bp, Artificial Sequence
  Description of Artificial Sequence: Synthetic Clostridium stercorarium DNA Polymerase K832W
atgaaatacctgctgccgaccgctgctgctggtctgctgctcctcgctgcccagccggcgatggccatggatccaaaaataatccttatagacggaaacagtattttaaaccgcggtttttatgccctgtcggggcgatccatgctgactacgtccacaggtctgtataccaatgcggttttcgcttttgtaaatatattgaacaaatatatcgaagaggaaaaccctgattatattgccgttgctttcgatcttagggcaaaaactttccggcacggtctatatgagggatacaaagcgcagcggaaaggcatgcccgatgaacttgcaatgcagatacccctcgcgaaggaagtactgagggcgatgaatattgccataatagagcatgaaggttatgaagccgacgatataatcggcagcctttcgttaaaggccgaaaaagagaattttgacgtaataatccttacgggggacagggattctttccagctgatcagcgacagggtgaaagttatcctgccttcgacgaaagccggaaaaacagagaccaacgtatatgataaacaggccatcattgacaaatacggagttttaccccatcagcttattgacgttaaaggcttaatgggagattcgtcagataatatacccggcgttccgggagtgggtgagaaaacggcgttaagccttatttcagcctacggtacactggaaggtgtttacgagcatattgatgaaataaaacagcctaagctgaaagcatcgctgattgaatataaggatcaggcgtttttaagccgtaagctgggtactattgtaagaaatctggagctgtgtgcttcgctggaggatctgaaaagaaaagaaataaaccgcaaagagcttttgaatgttttcagaaaactcgaatttgaaagtatcatatcaaaaatgaatcttgcttccgctgaggtgacagaattacctcccgcgccggaagagcttaaaataacccatatttcagcggcagaggatcttaagaaatggattgcttacctgcttaaccagaaaaacatttccgtccttcaactgattgaccgggaggattcatacagttcccgtctttcagggctggctttgtgcaccggggatgaggttttttatatcgagaccgggactgcactccccgagaatttgattgcaacagagctgaaagaactgtggcagaatgaaaatattcacaaaatcggacacaatataaaagaatttataacctggctgctgaaacacgatgttgaactgaacggcctttatttcgacactatgattgccgaatacctgatagattccataagaaacggctatcctatagcaagcctttctcacaaatacctgaatcgcagcgttccgtcgctggacgaacttttgggcaagggaaagggagcaaaaaagtactctgaaattccgcccgaaaggctgaaagattacagcgcttataacgtcaaagccatttttgacatatggccgatgcagaaaaaagttcttcaggaaaaccggcaggaggagctttttaatgacatagagcttcctcttataaccgtacttgccagtatggaataccacggtttcaaagttgacgccgcaaaacttcacgaatacggcgaagttcttctgtcacgcataaaagacctggaaaaggtaatttacatgctggccggtgaagaattcaacatcaattcaacgaagcagcttggtaccatattattcgaaaaactgaagcttcccgttgtaaaaagtacaaagaccggatactccaccgacgtcgaggttcttgaagagctttattacaagcatgatataataccatgcataatagaataccgccagcttacaaaactttacaccacctacgccgaaggtcttgaaaaagtgataaatcctgtaaccggtaaaattcattcaagttttaaccagacggttacggctacaggccgcatcagcagtaccgaaccaaatttacagaatatcccagtcagacacgaaatgggaagggaaatacggaaagcttttattccgtcgtcggaaaacgctgtttttgttgatgccgattattcacagatagagcttcgcgtgcttgcccatataacaggcgatgaagccctgataaatgctttcgttaagggggaagatattcatacggccacggcgtcgctggtatttgacgtagctcccgaagatgtgacgccggaactgcgcagaaaggcaaaagccgtaaatttcggcatagtgtacgggatcagtgattacgggctggcacgggatttgggaattacccggaaggaagcaaagcggtatatagacgactattttgccaaataccccaaagtaaaaacctatgtggatgaaattgtgcgggtcggccaggaacaggggtatgtggaaactctgttccacagaagaagataccttcccgagcttgcatctaaaaattttcaccagcgttctttcggatggagggttgcaatgaatacgcccatacagggcactgcagccgatattattaaaattgcgatggtgaaggtatacaaggctttgaaagaatccggccttaaatccaggcttatcctccaggtccatgacgaacttgttattgagacttttgaagacgaactggagactgtcaaggaacttgtcaaaaagtgcatggaagaggccgttgaattgagtgtgccgcttgttgtcgacgtttcaatcgggaaaaactggtatgaagcctcctgatatggatcc

SEQ ID NO: 461 - DNA, 2772 bp, Artificial Sequence
  Description of Artificial Sequence: Synthetic Clostridium stercorarium DNA Polymerase K832Y
atgaaatacctgctgccgaccgctgctgctggtctgctgctcctcgctgcccagccggcgatggccatggatccaaaaataatccttatagacggaaacagtattttaaaccgcggtttttatgccctgtcggggcgatccatgctgactacgtccacaggtctgtataccaatgcggttttcgcttttgtaaatatattgaacaaatatatcgaagaggaaaaccctgattatattgccgttgctttcgatcttagggcaaaaactttccggcacggtctatatgagggatacaaagcgcagcggaaaggcatgcccgatgaacttgcaatgcagatacccctcgcgaaggaagtactgagggcgatgaatattgccataatagagcatgaaggttatgaagccgacgatataatcggcagcctttcgttaaaggccgaaaaagagaattttgacgtaataatccttacgggggacagggattctttccagctgatcagcgacagggtgaaagttatcctgccttcgacgaaagccggaaaaacagagaccaacgtatatgataaacaggccatcattgacaaatacggagttttaccccatcagcttattgacgttaaaggcttaatgggagattcgtcagataatatacccggcgttccgggagtgggtgagaaaacggcgttaagccttatttcagcctacggtacactggaaggtgtttacgagcatattgatgaaataaaacagcctaagctgaaagcatcgctgattgaatataaggatcaggcgtttttaagccgtaagctgggtactattgtaagaaatctggagctgtgtgcttcgctggaggatctgaaaagaaaagaaataaaccgcaaagagcttttgaatgttttcagaaaactcgaatttgaaagtatcatatcaaaaatgaatcttgcttccgctgaggtgacagaattacctcccgcgccggaagagcttaaaataacccatatttcagcggcagaggatcttaagaaatggattgcttacctgcttaaccagaaaaacatttccgtccttcaactgattgaccgggaggattcatacagttcccgtctttcagggctggctttgtgcaccggggatgaggttttttatatcgagaccgggactgcactccccgagaatttgattgcaacagagctgaaagaactgtggcagaatgaaaatattcacaaaatcggacacaatataaaagaatttataacctggctgctgaaacacgatgttgaactgaacggcctttatttcgacactatgattgccgaatacctgatagattccataagaaacggctatcctatagcaagcctttctcacaaatacctgaatcgcagcgttccgtcgctggacgaacttttgggcaagggaaagggagcaaaaaagtactctgaaattccgcccgaaaggctgaaagattacagcgcttataacgtcaaagccatttttgacatatggccgatgcagaaaaaagttcttcaggaaaaccggcaggaggagctttttaatgacatagagcttcctcttataaccgtacttgccagtatggaataccacggtttcaaagttgacgccgcaaaacttcacgaatacggcgaagttcttctgtcacgcataaaagacctggaaaaggtaatttacatgctggccggtgaagaattcaacatcaattcaacgaagcagcttggtaccatattattcgaaaaactgaagcttcccgttgtaaaaagtacaaagaccggatactccaccgacgtcgaggttcttgaagagctttattacaagcatgatataataccatgcataatagaataccgccagcttacaaaactttacaccacctacgccgaaggtcttgaaaaagtgataaatcctgtaaccggtaaaattcattcaagttttaaccagacggttacggctacaggccgcatcagcagtaccgaaccaaatttacagaatatcccagtcagacacgaaatgggaagggaaatacggaaagcttttattccgtcgtcggaaaacgctgtttttgttgatgccgattattcacagatagagcttcgcgtgcttgcccatataacaggcgatgaagccctgataaatgctttcgttaagggggaagatattcatacggccacggcgtcgctggtatttgacgtagctcccgaagatgtgacgccggaactgcgcagaaaggcaaaagccgtaaatttcggcatagtgtacgggatcagtgattacgggctggcacgggatttgggaattacccggaaggaagcaaagcggtatatagacgactattttgccaaataccccaaagtaaaaacctatgtggatgaaattgtgcgggtcggccaggaacaggggtatgtggaaactctgttccacagaagaagataccttcccgagcttgcatctaaaaattttcaccagcgttctttcggatatagggttgcaatgaatacgcccatacagggcactgcagccgatattattaaaattgcgatggtgaaggtatacaaggctttgaaagaatccggccttaaatccaggcttatcctccaggtccatgacgaacttgttattgagacttttgaagacgaactggagactgtcaaggaacttgtcaaaaagtgcatggaagaggccgttgaattgagtgtgccgcttgttgtcgacgtttcaatcgggaaaaactggtatgaagcctcctgatatggatcc

SEQ ID NO: 462 - DNA, 2772 bp, Artificial Sequence
  Description of Artificial Sequence: Synthetic Clostridium stercorarium DNA Polymerase K832V
atgaaatacctgctgccgaccgctgctgctggtctgctgctcctcgctgcccagccggcgatggccatggatccaaaaataatccttatagacggaaacagtattttaaaccgcggtttttatgccctgtcggggcgatccatgctgactacgtccacaggtctgtataccaatgcggttttcgcttttgtaaatatattgaacaaatatatcgaagaggaaaaccctgattatattgccgttgctttcgatcttagggcaaaaactttccggcacggtctatatgagggatacaaagcgcagcggaaaggcatgcccgatgaacttgcaatgcagatacccctcgcgaaggaagtactgagggcgatgaatattgccataatagagcatgaaggttatgaagccgacgatataatcggcagcctttcgttaaaggccgaaaaagagaattttgacgtaataatccttacgggggacagggattctttccagctgatcagcgacagggtgaaagttatcctgccttcgacgaaagccggaaaaacagagaccaacgtatatgataaacaggccatcattgacaaatacggagttttaccccatcagcttattgacgttaaaggcttaatgggagattcgtcagataatatacccggcgttccgggagtgggtgagaaaacggcgttaagccttatttcagcctacggtacactggaaggtgtttacgagcatattgatgaaataaaacagcctaagctgaaagcatcgctgattgaatataaggatcaggcgtttttaagccgtaagctgggtactattgtaagaaatctggagctgtgtgcttcgctggaggatctgaaaagaaaagaaataaaccgcaaagagcttttgaatgttttcagaaaactcgaatttgaaagtatcatatcaaaaatgaatcttgcttccgctgaggtgacagaattacctcccgcgccggaagagcttaaaataacccatatttcagcggcagaggatcttaagaaatggattgcttacctgcttaaccagaaaaacatttccgtccttcaactgattgaccgggaggattcatacagttcccgtctttcagggctggctttgtgcaccggggatgaggttttttatatcgagaccgggactgcactccccgagaatttgattgcaacagagctgaaagaactgtggcagaatgaaaatattcacaaaatcggacacaatataaaagaatttataacctggctgctgaaacacgatgttgaactgaacggcctttatttcgacactatgattgccgaatacctgatagattccataagaaacggctatcctatagcaagcctttctcacaaatacctgaatcgcagcgttccgtcgctggacgaacttttgggcaagggaaagggagcaaaaaagtactctgaaattccgcccgaaaggctgaaagattacagcgcttataacgtcaaagccatttttgacatatggccgatgcagaaaaaagttcttcaggaaaaccggcaggaggagctttttaatgacatagagcttcctcttataaccgtacttgccagtatggaataccacggtttcaaagttgacgccgcaaaacttcacgaatacggcgaagttcttctgtcacgcataaaagacctggaaaaggtaatttacatgctggccggtgaagaattcaacatcaattcaacgaagcagcttggtaccatattattcgaaaaactgaagcttcccgttgtaaaaagtacaaagaccggatactccaccgacgtcgaggttcttgaagagctttattacaagcatgatataataccatgcataatagaataccgccagcttacaaaactttacaccacctacgccgaaggtcttgaaaaagtgataaatcctgtaaccggtaaaattcattcaagttttaaccagacggttacggctacaggccgcatcagcagtaccgaaccaaatttacagaatatcccagtcagacacgaaatgggaagggaaatacggaaagcttttattccgtcgtcggaaaacgctgtttttgttgatgccgattattcacagatagagcttcgcgtgcttgcccatataacaggcgatgaagccctgataaatgctttcgttaagggggaagatattcatacggccacggcgtcgctggtatttgacgtagctcccgaagatgtgacgccggaactgcgcagaaaggcaaaagccgtaaatttcggcatagtgtacgggatcagtgattacgggctggcacgggatttgggaattacccggaaggaagcaaagcggtatatagacgactattttgccaaataccccaaagtaaaaacctatgtggatgaaattgtgcgggtcggccaggaacaggggtatgtggaaactctgttccacagaagaagataccttcccgagcttgcatctaaaaattttcaccagcgttctttcggagttagggttgcaatgaatacgcccatacagggcactgcagccgatattattaaaattgcgatggtgaaggtatacaaggctttgaaagaatccggccttaaatccaggcttatcctccaggtccatgacgaacttgttattgagacttttgaagacgaactggagactgtcaaggaacttgtcaaaaagtgcatggaagaggccgttgaattgagtgtgccgcttgttgtcgacgtttcaatcgggaaaaactggtatgaagcctcctgatatggatcc

SEQ ID NO: 463 - DNA, 2772 bp, Artificial Sequence
  Description of Artificial Sequence: Synthetic Clostridium stercorarium DNA Polymerase R833A
atgaaatacctgctgccgaccgctgctgctggtctgctgctcctcgctgcccagccggcgatggccatggatccaaaaataatccttatagacggaaacagtattttaaaccgcggtttttatgccctgtcggggcgatccatgctgactacgtccacaggtctgtataccaatgcggttttcgcttttgtaaatatattgaacaaatatatcgaagaggaaaaccctgattatattgccgttgctttcgatcttagggcaaaaactttccggcacggtctatatgagggatacaaagcgcagcggaaaggcatgcccgatgaacttgcaatgcagatacccctcgcgaaggaagtactgagggcgatgaatattgccataatagagcatgaaggttatgaagccgacgatataatcggcagcctttcgttaaaggccgaaaaagagaattttgacgtaataatccttacgggggacagggattctttccagctgatcagcgacagggtgaaagttatcctgccttcgacgaaagccggaaaaacagagaccaacgtatatgataaacaggccatcattgacaaatacggagttttaccccatcagcttattgacgttaaaggcttaatgggagattcgtcagataatatacccggcgttccgggagtgggtgagaaaacggcgttaagccttatttcagcctacggtacactggaaggtgtttacgagcatattgatgaaataaaacagcctaagctgaaagcatcgctgattgaatataaggatcaggcgtttttaagccgtaagctgggtactattgtaagaaatctggagctgtgtgcttcgctggaggatctgaaaagaaaagaaataaaccgcaaagagcttttgaatgttttcagaaaactcgaatttgaaagtatcatatcaaaaatgaatcttgcttccgctgaggtgacagaattacctcccgcgccggaagagcttaaaataacccatatttcagcggcagaggatcttaagaaatggattgcttacctgcttaaccagaaaaacatttccgtccttcaactgattgaccgggaggattcatacagttcccgtctttcagggctggctttgtgcaccggggatgaggttttttatatcgagaccgggactgcactccccgagaatttgattgcaacagagctgaaagaactgtggcagaatgaaaatattcacaaaatcggacacaatataaaagaatttataacctggctgctgaaacacgatgttgaactgaacggcctttatttcgacactatgattgccgaatacctgatagattccataagaaacggctatcctatagcaagcctttctcacaaatacctgaatcgcagcgttccgtcgctggacgaacttttgggcaagggaaagggagcaaaaaagtactctgaaattccgcccgaaaggctgaaagattacagcgcttataacgtcaaagccatttttgacatatggccgatgcagaaaaaagttcttcaggaaaaccggcaggaggagctttttaatgacatagagcttcctcttataaccgtacttgccagtatggaataccacggtttcaaagttgacgccgcaaaacttcacgaatacggcgaagttcttctgtcacgcataaaagacctggaaaaggtaatttacatgctggccggtgaagaattcaacatcaattcaacgaagcagcttggtaccatattattcgaaaaactgaagcttcccgttgtaaaaagtacaaagaccggatactccaccgacgtcgaggttcttgaagagctttattacaagcatgatataataccatgcataatagaataccgccagcttacaaaactttacaccacctacgccgaaggtcttgaaaaagtgataaatcctgtaaccggtaaaattcattcaagttttaaccagacggttacggctacaggccgcatcagcagtaccgaaccaaatttacagaatatcccagtcagacacgaaatgggaagggaaatacggaaagcttttattccgtcgtcggaaaacgctgtttttgttgatgccgattattcacagatagagcttcgcgtgcttgcccatataacaggcgatgaagccctgataaatgctttcgttaagggggaagatattcatacggccacggcgtcgctggtatttgacgtagctcccgaagatgtgacgccggaactgcgcagaaaggcaaaagccgtaaatttcggcatagtgtacgggatcagtgattacgggctggcacgggatttgggaattacccggaaggaagcaaagcggtatatagacgactattttgccaaataccccaaagtaaaaacctatgtggatgaaattgtgcgggtcggccaggaacaggggtatgtggaaactctgttccacagaagaagataccttcccgagcttgcatctaaaaattttcaccagcgttctttcggaaaagctgttgcaatgaatacgcccatacagggcactgcagccgatattattaaaattgcgatggtgaaggtatacaaggctttgaaagaatccggccttaaatccaggcttatcctccaggtccatgacgaacttgttattgagacttttgaagacgaactggagactgtcaaggaacttgtcaaaaagtgcatggaagaggccgttgaattgagtgtgccgcttgttgtcgacgtttcaatcgggaaaaactggtatgaagcctcctgatatggatcc

SEQ ID NO: 464 - DNA, 2772 bp, Artificial Sequence
  Description of Artificial Sequence: Synthetic Clostridium stercorarium DNA Polymerase R833N
atgaaatacctgctgccgaccgctgctgctggtctgctgctcctcgctgcccagccggcgatggccatggatccaaaaataatccttatagacggaaacagtattttaaaccgcggtttttatgccctgtcggggcgatccatgctgactacgtccacaggtctgtataccaatgcggttttcgcttttgtaaatatattgaacaaatatatcgaagaggaaaaccctgattatattgccgttgctttcgatcttagggcaaaaactttccggcacggtctatatgagggatacaaagcgcagcggaaaggcatgcccgatgaacttgcaatgcagatacccctcgcgaaggaagtactgagggcgatgaatattgccataatagagcatgaaggttatgaagccgacgatataatcggcagcctttcgttaaaggccgaaaaagagaattttgacgtaataatccttacgggggacagggattctttccagctgatcagcgacagggtgaaagttatcctgccttcgacgaaagccggaaaaacagagaccaacgtatatgataaacaggccatcattgacaaatacggagttttaccccatcagcttattgacgttaaaggcttaatgggagattcgtcagataatatacccggcgttccgggagtgggtgagaaaacggcgttaagccttatttcagcctacggtacactggaaggtgtttacgagcatattgatgaaataaaacagcctaagctgaaagcatcgctgattgaatataaggatcaggcgtttttaagccgtaagctgggtactattgtaagaaatctggagctgtgtgcttcgctggaggatctgaaaagaaaagaaataaaccgcaaagagcttttgaatgttttcagaaaactcgaatttgaaagtatcatatcaaaaatgaatcttgcttccgctgaggtgacagaattacctcccgcgccggaagagcttaaaataacccatatttcagcggcagaggatcttaagaaatggattgcttacctgcttaaccagaaaaacatttccgtccttcaactgattgaccgggaggattcatacagttcccgtctttcagggctggctttgtgcaccggggatgaggttttttatatcgagaccgggactgcactccccgagaatttgattgcaacagagctgaaagaactgtggcagaatgaaaatattcacaaaatcggacacaatataaaagaatttataacctggctgctgaaacacgatgttgaactgaacggcctttatttcgacactatgattgccgaatacctgatagattccataagaaacggctatcctatagcaagcctttctcacaaatacctgaatcgcagcgttccgtcgctggacgaacttttgggcaagggaaagggagcaaaaaagtactctgaaattccgcccgaaaggctgaaagattacagcgcttataacgtcaaagccatttttgacatatggccgatgcagaaaaaagttcttcaggaaaaccggcaggaggagctttttaatgacatagagcttcctcttataaccgtacttgccagtatggaataccacggtttcaaagttgacgccgcaaaacttcacgaatacggcgaagttcttctgtcacgcataaaagacctggaaaaggtaatttacatgctggccggtgaagaattcaacatcaattcaacgaagcagcttggtaccatattattcgaaaaactgaagcttcccgttgtaaaaagtacaaagaccggatactccaccgacgtcgaggttcttgaagagctttattacaagcatgatataataccatgcataatagaataccgccagcttacaaaactttacaccacctacgccgaaggtcttgaaaaagtgataaatcctgtaaccggtaaaattcattcaagttttaaccagacggttacggctacaggccgcatcagcagtaccgaaccaaatttacagaatatcccagtcagacacgaaatgggaagggaaatacggaaagcttttattccgtcgtcggaaaacgctgtttttgttgatgccgattattcacagatagagcttcgcgtgcttgcccatataacaggcgatgaagccctgataaatgctttcgttaagggggaagatattcatacggccacggcgtcgctggtatttgacgtagctcccgaagatgtgacgccggaactgcgcagaaaggcaaaagccgtaaatttcggcatagtgtacgggatcagtgattacgggctggcacgggatttgggaattacccggaaggaagcaaagcggtatatagacgactattttgccaaataccccaaagtaaaaacctatgtggatgaaattgtgcgggtcggccaggaacaggggtatgtggaaactctgttccacagaagaagataccttcccgagcttgcatctaaaaattttcaccagcgttctttcggaaaaaatgttgcaatgaatacgcccatacagggcactgcagccgatattattaaaattgcgatggtgaaggtatacaaggctttgaaagaatccggccttaaatccaggcttatcctccaggtccatgacgaacttgttattgagacttttgaagacgaactggagactgtcaaggaacttgtcaaaaagtgcatggaagaggccgttgaattgagtgtgccgcttgttgtcgacgtttcaatcgggaaaaactggtatgaagcctcctgatatggatcc

SEQ ID NO: 465 - DNA, 2772 bp, Artificial Sequence
  Description of Artificial Sequence: Synthetic Clostridium stercorarium DNA Polymerase R833D
atgaaatacctgctgccgaccgctgctgctggtctgctgctcctcgctgcccagccggcgatggccatggatccaaaaataatccttatagacggaaacagtattttaaaccgcggtttttatgccctgtcggggcgatccatgctgactacgtccacaggtctgtataccaatgcggttttcgcttttgtaaatatattgaacaaatatatcgaagaggaaaaccctgattatattgccgttgctttcgatcttagggcaaaaactttccggcacggtctatatgagggatacaaagcgcagcggaaaggcatgcccgatgaacttgcaatgcagatacccctcgcgaaggaagtactgagggcgatgaatattgccataatagagcatgaaggttatgaagccgacgatataatcggcagcctttcgttaaaggccgaaaaagagaattttgacgtaataatccttacgggggacagggattctttccagctgatcagcgacagggtgaaagttatcctgccttcgacgaaagccggaaaaacagagaccaacgtatatgataaacaggccatcattgacaaatacggagttttaccccatcagcttattgacgttaaaggcttaatgggagattcgtcagataatatacccggcgttccgggagtgggtgagaaaacggcgttaagccttatttcagcctacggtacactggaaggtgtttacgagcatattgatgaaataaaacagcctaagctgaaagcatcgctgattgaatataaggatcaggcgtttttaagccgtaagctgggtactattgtaagaaatctggagctgtgtgcttcgctggaggatctgaaaagaaaagaaataaaccgcaaagagcttttgaatgttttcagaaaactcgaatttgaaagtatcatatcaaaaatgaatcttgcttccgctgaggtgacagaattacctcccgcgccggaagagcttaaaataacccatatttcagcggcagaggatcttaagaaatggattgcttacctgcttaaccagaaaaacatttccgtccttcaactgattgaccgggaggattcatacagttcccgtctttcagggctggctttgtgcaccggggatgaggttttttatatcgagaccgggactgcactccccgagaatttgattgcaacagagctgaaagaactgtggcagaatgaaaatattcacaaaatcggacacaatataaaagaatttataacctggctgctgaaacacgatgttgaactgaacggcctttatttcgacactatgattgccgaatacctgatagattccataagaaacggctatcctatagcaagcctttctcacaaatacctgaatcgcagcgttccgtcgctggacgaacttttgggcaagggaaagggagcaaaaaagtactctgaaattccgcccgaaaggctgaaagattacagcgcttataacgtcaaagccatttttgacatatggccgatgcagaaaaaagttcttcaggaaaaccggcaggaggagctttttaatgacatagagcttcctcttataaccgtacttgccagtatggaataccacggtttcaaagttgacgccgcaaaacttcacgaatacggcgaagttcttctgtcacgcataaaagacctggaaaaggtaatttacatgctggccggtgaagaattcaacatcaattcaacgaagcagcttggtaccatattattcgaaaaactgaagcttcccgttgtaaaaagtacaaagaccggatactccaccgacgtcgaggttcttgaagagctttattacaagcatgatataataccatgcataatagaataccgccagcttacaaaactttacaccacctacgccgaaggtcttgaaaaagtgataaatcctgtaaccggtaaaattcattcaagttttaaccagacggttacggctacaggccgcatcagcagtaccgaaccaaatttacagaatatcccagtcagacacgaaatgggaagggaaatacggaaagcttttattccgtcgtcggaaaacgctgtttttgttgatgccgattattcacagatagagcttcgcgtgcttgcccatataacaggcgatgaagccctgataaatgctttcgttaagggggaagatattcatacggccacggcgtcgctggtatttgacgtagctcccgaagatgtgacgccggaactgcgcagaaaggcaaaagccgtaaatttcggcatagtgtacgggatcagtgattacgggctggcacgggatttgggaattacccggaaggaagcaaagcggtatatagacgactattttgccaaataccccaaagtaaaaacctatgtggatgaaattgtgcgggtcggccaggaacaggggtatgtggaaactctgttccacagaagaagataccttcccgagcttgcatctaaaaattttcaccagcgttctttcggaaaagatgttgcaatgaatacgcccatacagggcactgcagccgatattattaaaattgcgatggtgaaggtatacaaggctttgaaagaatccggccttaaatccaggcttatcctccaggtccatgacgaacttgttattgagacttttgaagacgaactggagactgtcaaggaacttgtcaaaaagtgcatggaagaggccgttgaattgagtgtgccgcttgttgtcgacgtttcaatcgggaaaaactggtatgaagcctcctgatatggatcc

SEQ ID NO: 466 - DNA, 2772 bp, Artificial Sequence
  Description of Artificial Sequence: Synthetic Clostridium stercorarium DNA Polymerase R833C
atgaaatacctgctgccgaccgctgctgctggtctgctgctcctcgctgcccagccggcgatggccatggatccaaaaataatccttatagacggaaacagtattttaaaccgcggtttttatgccctgtcggggcgatccatgctgactacgtccacaggtctgtataccaatgcggttttcgcttttgtaaatatattgaacaaatatatcgaagaggaaaaccctgattatattgccgttgctttcgatcttagggcaaaaactttccggcacggtctatatgagggatacaaagcgcagcggaaaggcatgcccgatgaacttgcaatgcagatacccctcgcgaaggaagtactgagggcgatgaatattgccataatagagcatgaaggttatgaagccgacgatataatcggcagcctttcgttaaaggccgaaaaagagaattttgacgtaataatccttacgggggacagggattctttccagctgatcagcgacagggtgaaagttatcctgccttcgacgaaagccggaaaaacagagaccaacgtatatgataaacaggccatcattgacaaatacggagttttaccccatcagcttattgacgttaaaggcttaatgggagattcgtcagataatatacccggcgttccgggagtgggtgagaaaacggcgttaagccttatttcagcctacggtacactggaaggtgtttacgagcatattgatgaaataaaacagcctaagctgaaagcatcgctgattgaatataaggatcaggcgtttttaagccgtaagctgggtactattgtaagaaatctggagctgtgtgcttcgctggaggatctgaaaagaaaagaaataaaccgcaaagagcttttgaatgttttcagaaaactcgaatttgaaagtatcatatcaaaaatgaatcttgcttccgctgaggtgacagaattacctcccgcgccggaagagcttaaaataacccatatttcagcggcagaggatcttaagaaatggattgcttacctgcttaaccagaaaaacatttccgtccttcaactgattgaccgggaggattcatacagttcccgtctttcagggctggctttgtgcaccggggatgaggttttttatatcgagaccgggactgcactccccgagaatttgattgcaacagagctgaaagaactgtggcagaatgaaaatattcacaaaatcggacacaatataaaagaatttataacctggctgctgaaacacgatgttgaactgaacggcctttatttcgacactatgattgccgaatacctgatagattccataagaaacggctatcctatagcaagcctttctcacaaatacctgaatcgcagcgttccgtcgctggacgaacttttgggcaagggaaagggagcaaaaaagtactctgaaattccgcccgaaaggctgaaagattacagcgcttataacgtcaaagccatttttgacatatggccgatgcagaaaaaagttcttcaggaaaaccggcaggaggagctttttaatgacatagagcttcctcttataaccgtacttgccagtatggaataccacggtttcaaagttgacgccgcaaaacttcacgaatacggcgaagttcttctgtcacgcataaaagacctggaaaaggtaatttacatgctggccggtgaagaattcaacatcaattcaacgaagcagcttggtaccatattattcgaaaaactgaagcttcccgttgtaaaaagtacaaagaccggatactccaccgacgtcgaggttcttgaagagctttattacaagcatgatataataccatgcataatagaataccgccagcttacaaaactttacaccacctacgccgaaggtcttgaaaaagtgataaatcctgtaaccggtaaaattcattcaagttttaaccagacggttacggctacaggccgcatcagcagtaccgaaccaaatttacagaatatcccagtcagacacgaaatgggaagggaaatacggaaagcttttattccgtcgtcggaaaacgctgtttttgttgatgccgattattcacagatagagcttcgcgtgcttgcccatataacaggcgatgaagccctgataaatgctttcgttaagggggaagatattcatacggccacggcgtcgctggtatttgacgtagctcccgaagatgtgacgccggaactgcgcagaaaggcaaaagccgtaaatttcggcatagtgtacgggatcagtgattacgggctggcacgggatttgggaattacccggaaggaagcaaagcggtatatagacgactattttgccaaataccccaaagtaaaaacctatgtggatgaaattgtgcgggtcggccaggaacaggggtatgtggaaactctgttccacagaagaagataccttcccgagcttgcatctaaaaattttcaccagcgttctttcggaaaatgtgttgcaatgaatacgcccatacagggcactgcagccgatattattaaaattgcgatggtgaaggtatacaaggctttgaaagaatccggccttaaatccaggcttatcctccaggtccatgacgaacttgttattgagacttttgaagacgaactggagactgtcaaggaacttgtcaaaaagtgcatggaagaggccgttgaattgagtgtgccgcttgttgtcgacgtttcaatcgggaaaaactggtatgaagcctcctgatatggatcc

SEQ ID NO: 467 - DNA, 2772 bp, Artificial Sequence
  Description of Artificial Sequence: Synthetic Clostridium stercorarium DNA Polymerase R833E
atgaaatacctgctgccgaccgctgctgctggtctgctgctcctcgctgcccagccggcgatggccatggatccaaaaataatccttatagacggaaacagtattttaaaccgcggtttttatgccctgtcggggcgatccatgctgactacgtccacaggtctgtataccaatgcggttttcgcttttgtaaatatattgaacaaatatatcgaagaggaaaaccctgattatattgccgttgctttcgatcttagggcaaaaactttccggcacggtctatatgagggatacaaagcgcagcggaaaggcatgcccgatgaacttgcaatgcagatacccctcgcgaaggaagtactgagggcgatgaatattgccataatagagcatgaaggttatgaagccgacgatataatcggcagcctttcgttaaaggccgaaaaagagaattttgacgtaataatccttacgggggacagggattctttccagctgatcagcgacagggtgaaagttatcctgccttcgacgaaagccggaaaaacagagaccaacgtatatgataaacaggccatcattgacaaatacggagttttaccccatcagcttattgacgttaaaggcttaatgggagattcgtcagataatatacccggcgttccgggagtgggtgagaaaacggcgttaagccttatttcagcctacggtacactggaaggtgtttacgagcatattgatgaaataaaacagcctaagctgaaagcatcgctgattgaatataaggatcaggcgtttttaagccgtaagctgggtactattgtaagaaatctggagctgtgtgcttcgctggaggatctgaaaagaaaagaaataaaccgcaaagagcttttgaatgttttcagaaaactcgaatttgaaagtatcatatcaaaaatgaatcttgcttccgctgaggtgacagaattacctcccgcgccggaagagcttaaaataacccatatttcagcggcagaggatcttaagaaatggattgcttacctgcttaaccagaaaaacatttccgtccttcaactgattgaccgggaggattcatacagttcccgtctttcagggctggctttgtgcaccggggatgaggttttttatatcgagaccgggactgcactccccgagaatttgattgcaacagagctgaaagaactgtggcagaatgaaaatattcacaaaatcggacacaatataaaagaatttataacctggctgctgaaacacgatgttgaactgaacggcctttatttcgacactatgattgccgaatacctgatagattccataagaaacggctatcctatagcaagcctttctcacaaatacctgaatcgcagcgttccgtcgctggacgaacttttgggcaagggaaagggagcaaaaaagtactctgaaattccgcccgaaaggctgaaagattacagcgcttataacgtcaaagccatttttgacatatggccgatgcagaaaaaagttcttcaggaaaaccggcaggaggagctttttaatgacatagagcttcctcttataaccgtacttgccagtatggaataccacggtttcaaagttgacgccgcaaaacttcacgaatacggcgaagttcttctgtcacgcataaaagacctggaaaaggtaatttacatgctggccggtgaagaattcaacatcaattcaacgaagcagcttggtaccatattattcgaaaaactgaagcttcccgttgtaaaaagtacaaagaccggatactccaccgacgtcgaggttcttgaagagctttattacaagcatgatataataccatgcataatagaataccgccagcttacaaaactttacaccacctacgccgaaggtcttgaaaaagtgataaatcctgtaaccggtaaaattcattcaagttttaaccagacggttacggctacaggccgcatcagcagtaccgaaccaaatttacagaatatcccagtcagacacgaaatgggaagggaaatacggaaagcttttattccgtcgtcggaaaacgctgtttttgttgatgccgattattcacagatagagcttcgcgtgcttgcccatataacaggcgatgaagccctgataaatgctttcgttaagggggaagatattcatacggccacggcgtcgctggtatttgacgtagctcccgaagatgtgacgccggaactgcgcagaaaggcaaaagccgtaaatttcggcatagtgtacgggatcagtgattacgggctggcacgggatttgggaattacccggaaggaagcaaagcggtatatagacgactattttgccaaataccccaaagtaaaaacctatgtggatgaaattgtgcgggtcggccaggaacaggggtatgtggaaactctgttccacagaagaagataccttcccgagcttgcatctaaaaattttcaccagcgttctttcggaaaagaagttgcaatgaatacgcccatacagggcactgcagccgatattattaaaattgcgatggtgaaggtatacaaggctttgaaagaatccggccttaaatccaggcttatcctccaggtccatgacgaacttgttattgagacttttgaagacgaactggagactgtcaaggaacttgtcaaaaagtgcatggaagaggccgttgaattgagtgtgccgcttgttgtcgacgtttcaatcgggaaaaactggtatgaagcctcctgatatggatcc

SEQ ID NO: 468 - DNA, 2772 bp, Artificial Sequence
  Description of Artificial Sequence: Synthetic Clostridium stercorarium DNA Polymerase R833Q
atgaaatacctgctgccgaccgctgctgctggtctgctgctcctcgctgcccagccggcgatggccatggatccaaaaataatccttatagacggaaacagtattttaaaccgcggtttttatgccctgtcggggcgatccatgctgactacgtccacaggtctgtataccaatgcggttttcgcttttgtaaatatattgaacaaatatatcgaagaggaaaaccctgattatattgccgttgctttcgatcttagggcaaaaactttccggcacggtctatatgagggatacaaagcgcagcggaaaggcatgcccgatgaacttgcaatgcagatacccctcgcgaaggaagtactgagggcgatgaatattgccataatagagcatgaaggttatgaagccgacgatataatcggcagcctttcgttaaaggccgaaaaagagaattttgacgtaataatccttacgggggacagggattctttccagctgatcagcgacagggtgaaagttatcctgccttcgacgaaagccggaaaaacagagaccaacgtatatgataaacaggccatcattgacaaatacggagttttaccccatcagcttattgacgttaaaggcttaatgggagattcgtcagataatatacccggcgttccgggagtgggtgagaaaacggcgttaagccttatttcagcctacggtacactggaaggtgtttacgagcatattgatgaaataaaacagcctaagctgaaagcatcgctgattgaatataaggatcaggcgtttttaagccgtaagctgggtactattgtaagaaatctggagctgtgtgcttcgctggaggatctgaaaagaaaagaaataaaccgcaaagagcttttgaatgttttcagaaaactcgaatttgaaagtatcatatcaaaaatgaatcttgcttccgctgaggtgacagaattacctcccgcgccggaagagcttaaaataacccatatttcagcggcagaggatcttaagaaatggattgcttacctgcttaaccagaaaaacatttccgtccttcaactgattgaccgggaggattcatacagttcccgtctttcagggctggctttgtgcaccggggatgaggttttttatatcgagaccgggactgcactccccgagaatttgattgcaacagagctgaaagaactgtggcagaatgaaaatattcacaaaatcggacacaatataaaagaatttataacctggctgctgaaacacgatgttgaactgaacggcctttatttcgacactatgattgccgaatacctgatagattccataagaaacggctatcctatagcaagcctttctcacaaatacctgaatcgcagcgttccgtcgctggacgaacttttgggcaagggaaagggagcaaaaaagtactctgaaattccgcccgaaaggctgaaagattacagcgcttataacgtcaaagccatttttgacatatggccgatgcagaaaaaagttcttcaggaaaaccggcaggaggagctttttaatgacatagagcttcctcttataaccgtacttgccagtatggaataccacggtttcaaagttgacgccgcaaaacttcacgaatacggcgaagttcttctgtcacgcataaaagacctggaaaaggtaatttacatgctggccggtgaagaattcaacatcaattcaacgaagcagcttggtaccatattattcgaaaaactgaagcttcccgttgtaaaaagtacaaagaccggatactccaccgacgtcgaggttcttgaagagctttattacaagcatgatataataccatgcataatagaataccgccagcttacaaaactttacaccacctacgccgaaggtcttgaaaaagtgataaatcctgtaaccggtaaaattcattcaagttttaaccagacggttacggctacaggccgcatcagcagtaccgaaccaaatttacagaatatcccagtcagacacgaaatgggaagggaaatacggaaagcttttattccgtcgtcggaaaacgctgtttttgttgatgccgattattcacagatagagcttcgcgtgcttgcccatataacaggcgatgaagccctgataaatgctttcgttaagggggaagatattcatacggccacggcgtcgctggtatttgacgtagctcccgaagatgtgacgccggaactgcgcagaaaggcaaaagccgtaaatttcggcatagtgtacgggatcagtgattacgggctggcacgggatttgggaattacccggaaggaagcaaagcggtatatagacgactattttgccaaataccccaaagtaaaaacctatgtggatgaaattgtgcgggtcggccaggaacaggggtatgtggaaactctgttccacagaagaagataccttcccgagcttgcatctaaaaattttcaccagcgttctttcggaaaacaagttgcaatgaatacgcccatacagggcactgcagccgatattattaaaattgcgatggtgaaggtatacaaggctttgaaagaatccggccttaaatccaggcttatcctccaggtccatgacgaacttgttattgagacttttgaagacgaactggagactgtcaaggaacttgtcaaaaagtgcatggaagaggccgttgaattgagtgtgccgcttgttgtcgacgtttcaatcgggaaaaactggtatgaagcctcctgatatggatcc

SEQ ID NO: 469 - DNA, 2772 bp, Artificial Sequence
  Description of Artificial Sequence: Synthetic Clostridium stercorarium DNA Polymerase R833G
atgaaatacctgctgccgaccgctgctgctggtctgctgctcctcgctgcccagccggcgatggccatggatccaaaaataatccttatagacggaaacagtattttaaaccgcggtttttatgccctgtcggggcgatccatgctgactacgtccacaggtctgtataccaatgcggttttcgcttttgtaaatatattgaacaaatatatcgaagaggaaaaccctgattatattgccgttgctttcgatcttagggcaaaaactttccggcacggtctatatgagggatacaaagcgcagcggaaaggcatgcccgatgaacttgcaatgcagatacccctcgcgaaggaagtactgagggcgatgaatattgccataatagagcatgaaggttatgaagccgacgatataatcggcagcctttcgttaaaggccgaaaaagagaattttgacgtaataatccttacgggggacagggattctttccagctgatcagcgacagggtgaaagttatcctgccttcgacgaaagccggaaaaacagagaccaacgtatatgataaacaggccatcattgacaaatacggagttttaccccatcagcttattgacgttaaaggcttaatgggagattcgtcagataatatacccggcgttccgggagtgggtgagaaaacggcgttaagccttatttcagcctacggtacactggaaggtgtttacgagcatattgatgaaataaaacagcctaagctgaaagcatcgctgattgaatataaggatcaggcgtttttaagccgtaagctgggtactattgtaagaaatctggagctgtgtgcttcgctggaggatctgaaaagaaaagaaataaaccgcaaagagcttttgaatgttttcagaaaactcgaatttgaaagtatcatatcaaaaatgaatcttgcttccgctgaggtgacagaattacctcccgcgccggaagagcttaaaataacccatatttcagcggcagaggatcttaagaaatggattgcttacctgcttaaccagaaaaacatttccgtccttcaactgattgaccgggaggattcatacagttcccgtctttcagggctggctttgtgcaccggggatgaggttttttatatcgagaccgggactgcactccccgagaatttgattgcaacagagctgaaagaactgtggcagaatgaaaatattcacaaaatcggacacaatataaaagaatttataacctggctgctgaaacacgatgttgaactgaacggcctttatttcgacactatgattgccgaatacctgatagattccataagaaacggctatcctatagcaagcctttctcacaaatacctgaatcgcagcgttccgtcgctggacgaacttttgggcaagggaaagggagcaaaaaagtactctgaaattccgcccgaaaggctgaaagattacagcgcttataacgtcaaagccatttttgacatatggccgatgcagaaaaaagttcttcaggaaaaccggcaggaggagctttttaatgacatagagcttcctcttataaccgtacttgccagtatggaataccacggtttcaaagttgacgccgcaaaacttcacgaatacggcgaagttcttctgtcacgcataaaagacctggaaaaggtaatttacatgctggccggtgaagaattcaacatcaattcaacgaagcagcttggtaccatattattcgaaaaactgaagcttcccgttgtaaaaagtacaaagaccggatactccaccgacgtcgaggttcttgaagagctttattacaagcatgatataataccatgcataatagaataccgccagcttacaaaactttacaccacctacgccgaaggtcttgaaaaagtgataaatcctgtaaccggtaaaattcattcaagttttaaccagacggttacggctacaggccgcatcagcagtaccgaaccaaatttacagaatatcccagtcagacacgaaatgggaagggaaatacggaaagcttttattccgtcgtcggaaaacgctgtttttgttgatgccgattattcacagatagagcttcgcgtgcttgcccatataacaggcgatgaagccctgataaatgctttcgttaagggggaagatattcatacggccacggcgtcgctggtatttgacgtagctcccgaagatgtgacgccggaactgcgcagaaaggcaaaagccgtaaatttcggcatagtgtacgggatcagtgattacgggctggcacgggatttgggaattacccggaaggaagcaaagcggtatatagacgactattttgccaaataccccaaagtaaaaacctatgtggatgaaattgtgcgggtcggccaggaacaggggtatgtggaaactctgttccacagaagaagataccttcccgagcttgcatctaaaaattttcaccagcgttctttcggaaaaggtgttgcaatgaatacgcccatacagggcactgcagccgatattattaaaattgcgatggtgaaggtatacaaggctttgaaagaatccggccttaaatccaggcttatcctccaggtccatgacgaacttgttattgagacttttgaagacgaactggagactgtcaaggaacttgtcaaaaagtgcatggaagaggccgttgaattgagtgtgccgcttgttgtcgacgtttcaatcgggaaaaactggtatgaagcctcctgatatggatcc

SEQ ID NO: 470 - DNA, 2772 bp, Artificial Sequence
  Description of Artificial Sequence: Synthetic Clostridium stercorarium DNA Polymerase R833H
atgaaatacctgctgccgaccgctgctgctggtctgctgctcctcgctgcccagccggcgatggccatggatccaaaaataatccttatagacggaaacagtattttaaaccgcggtttttatgccctgtcggggcgatccatgctgactacgtccacaggtctgtataccaatgcggttttcgcttttgtaaatatattgaacaaatatatcgaagaggaaaaccctgattatattgccgttgctttcgatcttagggcaaaaactttccggcacggtctatatgagggatacaaagcgcagcggaaaggcatgcccgatgaacttgcaatgcagatacccctcgcgaaggaagtactgagggcgatgaatattgccataatagagcatgaaggttatgaagccgacgatataatcggcagcctttcgttaaaggccgaaaaagagaattttgacgtaataatccttacgggggacagggattctttccagctgatcagcgacagggtgaaagttatcctgccttcgacgaaagccggaaaaacagagaccaacgtatatgataaacaggccatcattgacaaatacggagttttaccccatcagcttattgacgttaaaggcttaatgggagattcgtcagataatatacccggcgttccgggagtgggtgagaaaacggcgttaagccttatttcagcctacggtacactggaaggtgtttacgagcatattgatgaaataaaacagcctaagctgaaagcatcgctgattgaatataaggatcaggcgtttttaagccgtaagctgggtactattgtaagaaatctggagctgtgtgcttcgctggaggatctgaaaagaaaagaaataaaccgcaaagagcttttgaatgttttcagaaaactcgaatttgaaagtatcatatcaaaaatgaatcttgcttccgctgaggtgacagaattacctcccgcgccggaagagcttaaaataacccatatttcagcggcagaggatcttaagaaatggattgcttacctgcttaaccagaaaaacatttccgtccttcaactgattgaccgggaggattcatacagttcccgtctttcagggctggctttgtgcaccggggatgaggttttttatatcgagaccgggactgcactccccgagaatttgattgcaacagagctgaaagaactgtggcagaatgaaaatattcacaaaatcggacacaatataaaagaatttataacctggctgctgaaacacgatgttgaactgaacggcctttatttcgacactatgattgccgaatacctgatagattccataagaaacggctatcctatagcaagcctttctcacaaatacctgaatcgcagcgttccgtcgctggacgaacttttgggcaagggaaagggagcaaaaaagtactctgaaattccgcccgaaaggctgaaagattacagcgcttataacgtcaaagccatttttgacatatggccgatgcagaaaaaagttcttcaggaaaaccggcaggaggagctttttaatgacatagagcttcctcttataaccgtacttgccagtatggaataccacggtttcaaagttgacgccgcaaaacttcacgaatacggcgaagttcttctgtcacgcataaaagacctggaaaaggtaatttacatgctggccggtgaagaattcaacatcaattcaacgaagcagcttggtaccatattattcgaaaaactgaagcttcccgttgtaaaaagtacaaagaccggatactccaccgacgtcgaggttcttgaagagctttattacaagcatgatataataccatgcataatagaataccgccagcttacaaaactttacaccacctacgccgaaggtcttgaaaaagtgataaatcctgtaaccggtaaaattcattcaagttttaaccagacggttacggctacaggccgcatcagcagtaccgaaccaaatttacagaatatcccagtcagacacgaaatgggaagggaaatacggaaagcttttattccgtcgtcggaaaacgctgtttttgttgatgccgattattcacagatagagcttcgcgtgcttgcccatataacaggcgatgaagccctgataaatgctttcgttaagggggaagatattcatacggccacggcgtcgctggtatttgacgtagctcccgaagatgtgacgccggaactgcgcagaaaggcaaaagccgtaaatttcggcatagtgtacgggatcagtgattacgggctggcacgggatttgggaattacccggaaggaagcaaagcggtatatagacgactattttgccaaataccccaaagtaaaaacctatgtggatgaaattgtgcgggtcggccaggaacaggggtatgtggaaactctgttccacagaagaagataccttcccgagcttgcatctaaaaattttcaccagcgttctttcggaaaacatgttgcaatgaatacgcccatacagggcactgcagccgatattattaaaattgcgatggtgaaggtatacaaggctttgaaagaatccggccttaaatccaggcttatcctccaggtccatgacgaacttgttattgagacttttgaagacgaactggagactgtcaaggaacttgtcaaaaagtgcatggaagaggccgttgaattgagtgtgccgcttgttgtcgacgtttcaatcgggaaaaactggtatgaagcctcctgatatggatcc

SEQ ID NO: 471 - DNA, 2772 bp, Artificial Sequence
  Description of Artificial Sequence: Synthetic Clostridium stercorarium DNA Polymerase R833I
atgaaatacctgctgccgaccgctgctgctggtctgctgctcctcgctgcccagccggcgatggccatggatccaaaaataatccttatagacggaaacagtattttaaaccgcggtttttatgccctgtcggggcgatccatgctgactacgtccacaggtctgtataccaatgcggttttcgcttttgtaaatatattgaacaaatatatcgaagaggaaaaccctgattatattgccgttgctttcgatcttagggcaaaaactttccggcacggtctatatgagggatacaaagcgcagcggaaaggcatgcccgatgaacttgcaatgcagatacccctcgcgaaggaagtactgagggcgatgaatattgccataatagagcatgaaggttatgaagccgacgatataatcggcagcctttcgttaaaggccgaaaaagagaattttgacgtaataatccttacgggggacagggattctttccagctgatcagcgacagggtgaaagttatcctgccttcgacgaaagccggaaaaacagagaccaacgtatatgataaacaggccatcattgacaaatacggagttttaccccatcagcttattgacgttaaaggcttaatgggagattcgtcagataatatacccggcgttccgggagtgggtgagaaaacggcgttaagccttatttcagcctacggtacactggaaggtgtttacgagcatattgatgaaataaaacagcctaagctgaaagcatcgctgattgaatataaggatcaggcgtttttaagccgtaagctgggtactattgtaagaaatctggagctgtgtgcttcgctggaggatctgaaaagaaaagaaataaaccgcaaagagcttttgaatgttttcagaaaactcgaatttgaaagtatcatatcaaaaatgaatcttgcttccgctgaggtgacagaattacctcccgcgccggaagagcttaaaataacccatatttcagcggcagaggatcttaagaaatggattgcttacctgcttaaccagaaaaacatttccgtccttcaactgattgaccgggaggattcatacagttcccgtctttcagggctggctttgtgcaccggggatgaggttttttatatcgagaccgggactgcactccccgagaatttgattgcaacagagctgaaagaactgtggcagaatgaaaatattcacaaaatcggacacaatataaaagaatttataacctggctgctgaaacacgatgttgaactgaacggcctttatttcgacactatgattgccgaatacctgatagattccataagaaacggctatcctatagcaagcctttctcacaaatacctgaatcgcagcgttccgtcgctggacgaacttttgggcaagggaaagggagcaaaaaagtactctgaaattccgcccgaaaggctgaaagattacagcgcttataacgtcaaagccatttttgacatatggccgatgcagaaaaaagttcttcaggaaaaccggcaggaggagctttttaatgacatagagcttcctcttataaccgtacttgccagtatggaataccacggtttcaaagttgacgccgcaaaacttcacgaatacggcgaagttcttctgtcacgcataaaagacctggaaaaggtaatttacatgctggccggtgaagaattcaacatcaattcaacgaagcagcttggtaccatattattcgaaaaactgaagcttcccgttgtaaaaagtacaaagaccggatactccaccgacgtcgaggttcttgaagagctttattacaagcatgatataataccatgcataatagaataccgccagcttacaaaactttacaccacctacgccgaaggtcttgaaaaagtgataaatcctgtaaccggtaaaattcattcaagttttaaccagacggttacggctacaggccgcatcagcagtaccgaaccaaatttacagaatatcccagtcagacacgaaatgggaagggaaatacggaaagcttttattccgtcgtcggaaaacgctgtttttgttgatgccgattattcacagatagagcttcgcgtgcttgcccatataacaggcgatgaagccctgataaatgctttcgttaagggggaagatattcatacggccacggcgtcgctggtatttgacgtagctcccgaagatgtgacgccggaactgcgcagaaaggcaaaagccgtaaatttcggcatagtgtacgggatcagtgattacgggctggcacgggatttgggaattacccggaaggaagcaaagcggtatatagacgactattttgccaaataccccaaagtaaaaacctatgtggatgaaattgtgcgggtcggccaggaacaggggtatgtggaaactctgttccacagaagaagataccttcccgagcttgcatctaaaaattttcaccagcgttctttcggaaaaattgttgcaatgaatacgcccatacagggcactgcagccgatattattaaaattgcgatggtgaaggtatacaaggctttgaaagaatccggccttaaatccaggcttatcctccaggtccatgacgaacttgttattgagacttttgaagacgaactggagactgtcaaggaacttgtcaaaaagtgcatggaagaggccgttgaattgagtgtgccgcttgttgtcgacgtttcaatcgggaaaaactggtatgaagcctcctgatatggatcc

SEQ ID NO: 472 - DNA, 2772 bp, Artificial Sequence
  Description of Artificial Sequence: Synthetic Clostridium stercorarium DNA Polymerase R833L
atgaaatacctgctgccgaccgctgctgctggtctgctgctcctcgctgcccagccggcgatggccatggatccaaaaataatccttatagacggaaacagtattttaaaccgcggtttttatgccctgtcggggcgatccatgctgactacgtccacaggtctgtataccaatgcggttttcgcttttgtaaatatattgaacaaatatatcgaagaggaaaaccctgattatattgccgttgctttcgatcttagggcaaaaactttccggcacggtctatatgagggatacaaagcgcagcggaaaggcatgcccgatgaacttgcaatgcagatacccctcgcgaaggaagtactgagggcgatgaatattgccataatagagcatgaaggttatgaagccgacgatataatcggcagcctttcgttaaaggccgaaaaagagaattttgacgtaataatccttacgggggacagggattctttccagctgatcagcgacagggtgaaagttatcctgccttcgacgaaagccggaaaaacagagaccaacgtatatgataaacaggccatcattgacaaatacggagttttaccccatcagcttattgacgttaaaggcttaatgggagattcgtcagataatatacccggcgttccgggagtgggtgagaaaacggcgttaagccttatttcagcctacggtacactggaaggtgtttacgagcatattgatgaaataaaacagcctaagctgaaagcatcgctgattgaatataaggatcaggcgtttttaagccgtaagctgggtactattgtaagaaatctggagctgtgtgcttcgctggaggatctgaaaagaaaagaaataaaccgcaaagagcttttgaatgttttcagaaaactcgaatttgaaagtatcatatcaaaaatgaatcttgcttccgctgaggtgacagaattacctcccgcgccggaagagcttaaaataacccatatttcagcggcagaggatcttaagaaatggattgcttacctgcttaaccagaaaaacatttccgtccttcaactgattgaccgggaggattcatacagttcccgtctttcagggctggctttgtgcaccggggatgaggttttttatatcgagaccgggactgcactccccgagaatttgattgcaacagagctgaaagaactgtggcagaatgaaaatattcacaaaatcggacacaatataaaagaatttataacctggctgctgaaacacgatgttgaactgaacggcctttatttcgacactatgattgccgaatacctgatagattccataagaaacggctatcctatagcaagcctttctcacaaatacctgaatcgcagcgttccgtcgctggacgaacttttgggcaagggaaagggagcaaaaaagtactctgaaattccgcccgaaaggctgaaagattacagcgcttataacgtcaaagccatttttgacatatggccgatgcagaaaaaagttcttcaggaaaaccggcaggaggagctttttaatgacatagagcttcctcttataaccgtacttgccagtatggaataccacggtttcaaagttgacgccgcaaaacttcacgaatacggcgaagttcttctgtcacgcataaaagacctggaaaaggtaatttacatgctggccggtgaagaattcaacatcaattcaacgaagcagcttggtaccatattattcgaaaaactgaagcttcccgttgtaaaaagtacaaagaccggatactccaccgacgtcgaggttcttgaagagctttattacaagcatgatataataccatgcataatagaataccgccagcttacaaaactttacaccacctacgccgaaggtcttgaaaaagtgataaatcctgtaaccggtaaaattcattcaagttttaaccagacggttacggctacaggccgcatcagcagtaccgaaccaaatttacagaatatcccagtcagacacgaaatgggaagggaaatacggaaagcttttattccgtcgtcggaaaacgctgtttttgttgatgccgattattcacagatagagcttcgcgtgcttgcccatataacaggcgatgaagccctgataaatgctttcgttaagggggaagatattcatacggccacggcgtcgctggtatttgacgtagctcccgaagatgtgacgccggaactgcgcagaaaggcaaaagccgtaaatttcggcatagtgtacgggatcagtgattacgggctggcacgggatttgggaattacccggaaggaagcaaagcggtatatagacgactattttgccaaataccccaaagtaaaaacctatgtggatgaaattgtgcgggtcggccaggaacaggggtatgtggaaactctgttccacagaagaagataccttcccgagcttgcatctaaaaattttcaccagcgttctttcggaaaacttgttgcaatgaatacgcccatacagggcactgcagccgatattattaaaattgcgatggtgaaggtatacaaggctttgaaagaatccggccttaaatccaggcttatcctccaggtccatgacgaacttgttattgagacttttgaagacgaactggagactgtcaaggaacttgtcaaaaagtgcatggaagaggccgttgaattgagtgtgccgcttgttgtcgacgtttcaatcgggaaaaactggtatgaagcctcctgatatggatcc

SEQ ID NO: 473 - DNA, 2772 bp, Artificial Sequence
  Description of Artificial Sequence: Synthetic Clostridium stercorarium DNA Polymerase R833K
atgaaatacctgctgccgaccgctgctgctggtctgctgctcctcgctgcccagccggcgatggccatggatccaaaaataatccttatagacggaaacagtattttaaaccgcggtttttatgccctgtcggggcgatccatgctgactacgtccacaggtctgtataccaatgcggttttcgcttttgtaaatatattgaacaaatatatcgaagaggaaaaccctgattatattgccgttgctttcgatcttagggcaaaaactttccggcacggtctatatgagggatacaaagcgcagcggaaaggcatgcccgatgaacttgcaatgcagatacccctcgcgaaggaagtactgagggcgatgaatattgccataatagagcatgaaggttatgaagccgacgatataatcggcagcctttcgttaaaggccgaaaaagagaattttgacgtaataatccttacgggggacagggattctttccagctgatcagcgacagggtgaaagttatcctgccttcgacgaaagccggaaaaacagagaccaacgtatatgataaacaggccatcattgacaaatacggagttttaccccatcagcttattgacgttaaaggcttaatgggagattcgtcagataatatacccggcgttccgggagtgggtgagaaaacggcgttaagccttatttcagcctacggtacactggaaggtgtttacgagcatattgatgaaataaaacagcctaagctgaaagcatcgctgattgaatataaggatcaggcgtttttaagccgtaagctgggtactattgtaagaaatctggagctgtgtgcttcgctggaggatctgaaaagaaaagaaataaaccgcaaagagcttttgaatgttttcagaaaactcgaatttgaaagtatcatatcaaaaatgaatcttgcttccgctgaggtgacagaattacctcccgcgccggaagagcttaaaataacccatatttcagcggcagaggatcttaagaaatggattgcttacctgcttaaccagaaaaacatttccgtccttcaactgattgaccgggaggattcatacagttcccgtctttcagggctggctttgtgcaccggggatgaggttttttatatcgagaccgggactgcactccccgagaatttgattgcaacagagctgaaagaactgtggcagaatgaaaatattcacaaaatcggacacaatataaaagaatttataacctggctgctgaaacacgatgttgaactgaacggcctttatttcgacactatgattgccgaatacctgatagattccataagaaacggctatcctatagcaagcctttctcacaaatacctgaatcgcagcgttccgtcgctggacgaacttttgggcaagggaaagggagcaaaaaagtactctgaaattccgcccgaaaggctgaaagattacagcgcttataacgtcaaagccatttttgacatatggccgatgcagaaaaaagttcttcaggaaaaccggcaggaggagctttttaatgacatagagcttcctcttataaccgtacttgccagtatggaataccacggtttcaaagttgacgccgcaaaacttcacgaatacggcgaagttcttctgtcacgcataaaagacctggaaaaggtaatttacatgctggccggtgaagaattcaacatcaattcaacgaagcagcttggtaccatattattcgaaaaactgaagcttcccgttgtaaaaagtacaaagaccggatactccaccgacgtcgaggttcttgaagagctttattacaagcatgatataataccatgcataatagaataccgccagcttacaaaactttacaccacctacgccgaaggtcttgaaaaagtgataaatcctgtaaccggtaaaattcattcaagttttaaccagacggttacggctacaggccgcatcagcagtaccgaaccaaatttacagaatatcccagtcagacacgaaatgggaagggaaatacggaaagcttttattccgtcgtcggaaaacgctgtttttgttgatgccgattattcacagatagagcttcgcgtgcttgcccatataacaggcgatgaagccctgataaatgctttcgttaagggggaagatattcatacggccacggcgtcgctggtatttgacgtagctcccgaagatgtgacgccggaactgcgcagaaaggcaaaagccgtaaatttcggcatagtgtacgggatcagtgattacgggctggcacgggatttgggaattacccggaaggaagcaaagcggtatatagacgactattttgccaaataccccaaagtaaaaacctatgtggatgaaattgtgcgggtcggccaggaacaggggtatgtggaaactctgttccacagaagaagataccttcccgagcttgcatctaaaaattttcaccagcgttctttcggaaaaaaagttgcaatgaatacgcccatacagggcactgcagccgatattattaaaattgcgatggtgaaggtatacaaggctttgaaagaatccggccttaaatccaggcttatcctccaggtccatgacgaacttgttattgagacttttgaagacgaactggagactgtcaaggaacttgtcaaaaagtgcatggaagaggccgttgaattgagtgtgccgcttgttgtcgacgtttcaatcgggaaaaactggtatgaagcctcctgatatggatcc

SEQ ID NO: 474 - DNA, 2772 bp, Artificial Sequence
  Description of Artificial Sequence: Synthetic Clostridium stercorarium DNA Polymerase R833M
atgaaatacctgctgccgaccgctgctgctggtctgctgctcctcgctgcccagccggcgatggccatggatccaaaaataatccttatagacggaaacagtattttaaaccgcggtttttatgccctgtcggggcgatccatgctgactacgtccacaggtctgtataccaatgcggttttcgcttttgtaaatatattgaacaaatatatcgaagaggaaaaccctgattatattgccgttgctttcgatcttagggcaaaaactttccggcacggtctatatgagggatacaaagcgcagcggaaaggcatgcccgatgaacttgcaatgcagatacccctcgcgaaggaagtactgagggcgatgaatattgccataatagagcatgaaggttatgaagccgacgatataatcggcagcctttcgttaaaggccgaaaaagagaattttgacgtaataatccttacgggggacagggattctttccagctgatcagcgacagggtgaaagttatcctgccttcgacgaaagccggaaaaacagagaccaacgtatatgataaacaggccatcattgacaaatacggagttttaccccatcagcttattgacgttaaaggcttaatgggagattcgtcagataatatacccggcgttccgggagtgggtgagaaaacggcgttaagccttatttcagcctacggtacactggaaggtgtttacgagcatattgatgaaataaaacagcctaagctgaaagcatcgctgattgaatataaggatcaggcgtttttaagccgtaagctgggtactattgtaagaaatctggagctgtgtgcttcgctggaggatctgaaaagaaaagaaataaaccgcaaagagcttttgaatgttttcagaaaactcgaatttgaaagtatcatatcaaaaatgaatcttgcttccgctgaggtgacagaattacctcccgcgccggaagagcttaaaataacccatatttcagcggcagaggatcttaagaaatggattgcttacctgcttaaccagaaaaacatttccgtccttcaactgattgaccgggaggattcatacagttcccgtctttcagggctggctttgtgcaccggggatgaggttttttatatcgagaccgggactgcactccccgagaatttgattgcaacagagctgaaagaactgtggcagaatgaaaatattcacaaaatcggacacaatataaaagaatttataacctggctgctgaaacacgatgttgaactgaacggcctttatttcgacactatgattgccgaatacctgatagattccataagaaacggctatcctatagcaagcctttctcacaaatacctgaatcgcagcgttccgtcgctggacgaacttttgggcaagggaaagggagcaaaaaagtactctgaaattccgcccgaaaggctgaaagattacagcgcttataacgtcaaagccatttttgacatatggccgatgcagaaaaaagttcttcaggaaaaccggcaggaggagctttttaatgacatagagcttcctcttataaccgtacttgccagtatggaataccacggtttcaaagttgacgccgcaaaacttcacgaatacggcgaagttcttctgtcacgcataaaagacctggaaaaggtaatttacatgctggccggtgaagaattcaacatcaattcaacgaagcagcttggtaccatattattcgaaaaactgaagcttcccgttgtaaaaagtacaaagaccggatactccaccgacgtcgaggttcttgaagagctttattacaagcatgatataataccatgcataatagaataccgccagcttacaaaactttacaccacctacgccgaaggtcttgaaaaagtgataaatcctgtaaccggtaaaattcattcaagttttaaccagacggttacggctacaggccgcatcagcagtaccgaaccaaatttacagaatatcccagtcagacacgaaatgggaagggaaatacggaaagcttttattccgtcgtcggaaaacgctgtttttgttgatgccgattattcacagatagagcttcgcgtgcttgcccatataacaggcgatgaagccctgataaatgctttcgttaagggggaagatattcatacggccacggcgtcgctggtatttgacgtagctcccgaagatgtgacgccggaactgcgcagaaaggcaaaagccgtaaatttcggcatagtgtacgggatcagtgattacgggctggcacgggatttgggaattacccggaaggaagcaaagcggtatatagacgactattttgccaaataccccaaagtaaaaacctatgtggatgaaattgtgcgggtcggccaggaacaggggtatgtggaaactctgttccacagaagaagataccttcccgagcttgcatctaaaaattttcaccagcgttctttcggaaaaatggttgcaatgaatacgcccatacagggcactgcagccgatattattaaaattgcgatggtgaaggtatacaaggctttgaaagaatccggccttaaatccaggcttatcctccaggtccatgacgaacttgttattgagacttttgaagacgaactggagactgtcaaggaacttgtcaaaaagtgcatggaagaggccgttgaattgagtgtgccgcttgttgtcgacgtttcaatcgggaaaaactggtatgaagcctcctgatatggatcc

SEQ ID NO: 475 - DNA, 2772 bp, Artificial Sequence
  Description of Artificial Sequence: Synthetic Clostridium stercorarium DNA Polymerase R833F
atgaaatacctgctgccgaccgctgctgctggtctgctgctcctcgctgcccagccggcgatggccatggatccaaaaataatccttatagacggaaacagtattttaaaccgcggtttttatgccctgtcggggcgatccatgctgactacgtccacaggtctgtataccaatgcggttttcgcttttgtaaatatattgaacaaatatatcgaagaggaaaaccctgattatattgccgttgctttcgatcttagggcaaaaactttccggcacggtctatatgagggatacaaagcgcagcggaaaggcatgcccgatgaacttgcaatgcagatacccctcgcgaaggaagtactgagggcgatgaatattgccataatagagcatgaaggttatgaagccgacgatataatcggcagcctttcgttaaaggccgaaaaagagaattttgacgtaataatccttacgggggacagggattctttccagctgatcagcgacagggtgaaagttatcctgccttcgacgaaagccggaaaaacagagaccaacgtatatgataaacaggccatcattgacaaatacggagttttaccccatcagcttattgacgttaaaggcttaatgggagattcgtcagataatatacccggcgttccgggagtgggtgagaaaacggcgttaagccttatttcagcctacggtacactggaaggtgtttacgagcatattgatgaaataaaacagcctaagctgaaagcatcgctgattgaatataaggatcaggcgtttttaagccgtaagctgggtactattgtaagaaatctggagctgtgtgcttcgctggaggatctgaaaagaaaagaaataaaccgcaaagagcttttgaatgttttcagaaaactcgaatttgaaagtatcatatcaaaaatgaatcttgcttccgctgaggtgacagaattacctcccgcgccggaagagcttaaaataacccatatttcagcggcagaggatcttaagaaatggattgcttacctgcttaaccagaaaaacatttccgtccttcaactgattgaccgggaggattcatacagttcccgtctttcagggctggctttgtgcaccggggatgaggttttttatatcgagaccgggactgcactccccgagaatttgattgcaacagagctgaaagaactgtggcagaatgaaaatattcacaaaatcggacacaatataaaagaatttataacctggctgctgaaacacgatgttgaactgaacggcctttatttcgacactatgattgccgaatacctgatagattccataagaaacggctatcctatagcaagcctttctcacaaatacctgaatcgcagcgttccgtcgctggacgaacttttgggcaagggaaagggagcaaaaaagtactctgaaattccgcccgaaaggctgaaagattacagcgcttataacgtcaaagccatttttgacatatggccgatgcagaaaaaagttcttcaggaaaaccggcaggaggagctttttaatgacatagagcttcctcttataaccgtacttgccagtatggaataccacggtttcaaagttgacgccgcaaaacttcacgaatacggcgaagttcttctgtcacgcataaaagacctggaaaaggtaatttacatgctggccggtgaagaattcaacatcaattcaacgaagcagcttggtaccatattattcgaaaaactgaagcttcccgttgtaaaaagtacaaagaccggatactccaccgacgtcgaggttcttgaagagctttattacaagcatgatataataccatgcataatagaataccgccagcttacaaaactttacaccacctacgccgaaggtcttgaaaaagtgataaatcctgtaaccggtaaaattcattcaagttttaaccagacggttacggctacaggccgcatcagcagtaccgaaccaaatttacagaatatcccagtcagacacgaaatgggaagggaaatacggaaagcttttattccgtcgtcggaaaacgctgtttttgttgatgccgattattcacagatagagcttcgcgtgcttgcccatataacaggcgatgaagccctgataaatgctttcgttaagggggaagatattcatacggccacggcgtcgctggtatttgacgtagctcccgaagatgtgacgccggaactgcgcagaaaggcaaaagccgtaaatttcggcatagtgtacgggatcagtgattacgggctggcacgggatttgggaattacccggaaggaagcaaagcggtatatagacgactattttgccaaataccccaaagtaaaaacctatgtggatgaaattgtgcgggtcggccaggaacaggggtatgtggaaactctgttccacagaagaagataccttcccgagcttgcatctaaaaattttcaccagcgttctttcggaaaatttgttgcaatgaatacgcccatacagggcactgcagccgatattattaaaattgcgatggtgaaggtatacaaggctttgaaagaatccggccttaaatccaggcttatcctccaggtccatgacgaacttgttattgagacttttgaagacgaactggagactgtcaaggaacttgtcaaaaagtgcatggaagaggccgttgaattgagtgtgccgcttgttgtcgacgtttcaatcgggaaaaactggtatgaagcctcctgatatggatcc

SEQ ID NO: 476 - DNA, 2772 bp, Artificial Sequence
  Description of Artificial Sequence: Synthetic Clostridium stercorarium DNA Polymerase R833P
atgaaatacctgctgccgaccgctgctgctggtctgctgctcctcgctgcccagccggcgatggccatggatccaaaaataatccttatagacggaaacagtattttaaaccgcggtttttatgccctgtcggggcgatccatgctgactacgtccacaggtctgtataccaatgcggttttcgcttttgtaaatatattgaacaaatatatcgaagaggaaaaccctgattatattgccgttgctttcgatcttagggcaaaaactttccggcacggtctatatgagggatacaaagcgcagcggaaaggcatgcccgatgaacttgcaatgcagatacccctcgcgaaggaagtactgagggcgatgaatattgccataatagagcatgaaggttatgaagccgacgatataatcggcagcctttcgttaaaggccgaaaaagagaattttgacgtaataatccttacgggggacagggattctttccagctgatcagcgacagggtgaaagttatcctgccttcgacgaaagccggaaaaacagagaccaacgtatatgataaacaggccatcattgacaaatacggagttttaccccatcagcttattgacgttaaaggcttaatgggagattcgtcagataatatacccggcgttccgggagtgggtgagaaaacggcgttaagccttatttcagcctacggtacactggaaggtgtttacgagcatattgatgaaataaaacagcctaagctgaaagcatcgctgattgaatataaggatcaggcgtttttaagccgtaagctgggtactattgtaagaaatctggagctgtgtgcttcgctggaggatctgaaaagaaaagaaataaaccgcaaagagcttttgaatgttttcagaaaactcgaatttgaaagtatcatatcaaaaatgaatcttgcttccgctgaggtgacagaattacctcccgcgccggaagagcttaaaataacccatatttcagcggcagaggatcttaagaaatggattgcttacctgcttaaccagaaaaacatttccgtccttcaactgattgaccgggaggattcatacagttcccgtctttcagggctggctttgtgcaccggggatgaggttttttatatcgagaccgggactgcactccccgagaatttgattgcaacagagctgaaagaactgtggcagaatgaaaatattcacaaaatcggacacaatataaaagaatttataacctggctgctgaaacacgatgttgaactgaacggcctttatttcgacactatgattgccgaatacctgatagattccataagaaacggctatcctatagcaagcctttctcacaaatacctgaatcgcagcgttccgtcgctggacgaacttttgggcaagggaaagggagcaaaaaagtactctgaaattccgcccgaaaggctgaaagattacagcgcttataacgtcaaagccatttttgacatatggccgatgcagaaaaaagttcttcaggaaaaccggcaggaggagctttttaatgacatagagcttcctcttataaccgtacttgccagtatggaataccacggtttcaaagttgacgccgcaaaacttcacgaatacggcgaagttcttctgtcacgcataaaagacctggaaaaggtaatttacatgctggccggtgaagaattcaacatcaattcaacgaagcagcttggtaccatattattcgaaaaactgaagcttcccgttgtaaaaagtacaaagaccggatactccaccgacgtcgaggttcttgaagagctttattacaagcatgatataataccatgcataatagaataccgccagcttacaaaactttacaccacctacgccgaaggtcttgaaaaagtgataaatcctgtaaccggtaaaattcattcaagttttaaccagacggttacggctacaggccgcatcagcagtaccgaaccaaatttacagaatatcccagtcagacacgaaatgggaagggaaatacggaaagcttttattccgtcgtcggaaaacgctgtttttgttgatgccgattattcacagatagagcttcgcgtgcttgcccatataacaggcgatgaagccctgataaatgctttcgttaagggggaagatattcatacggccacggcgtcgctggtatttgacgtagctcccgaagatgtgacgccggaactgcgcagaaaggcaaaagccgtaaatttcggcatagtgtacgggatcagtgattacgggctggcacgggatttgggaattacccggaaggaagcaaagcggtatatagacgactattttgccaaataccccaaagtaaaaacctatgtggatgaaattgtgcgggtcggccaggaacaggggtatgtggaaactctgttccacagaagaagataccttcccgagcttgcatctaaaaattttcaccagcgttctttcggaaaacctgttgcaatgaatacgcccatacagggcactgcagccgatattattaaaattgcgatggtgaaggtatacaaggctttgaaagaatccggccttaaatccaggcttatcctccaggtccatgacgaacttgttattgagacttttgaagacgaactggagactgtcaaggaacttgtcaaaaagtgcatggaagaggccgttgaattgagtgtgccgcttgttgtcgacgtttcaatcgggaaaaactggtatgaagcctcctgatatggatcc

SEQ ID NO: 477 - DNA, 2772 bp, Artificial Sequence
  Description of Artificial Sequence: Synthetic Clostridium stercorarium DNA Polymerase R833S
atgaaatacctgctgccgaccgctgctgctggtctgctgctcctcgctgcccagccggcgatggccatggatccaaaaataatccttatagacggaaacagtattttaaaccgcggtttttatgccctgtcggggcgatccatgctgactacgtccacaggtctgtataccaatgcggttttcgcttttgtaaatatattgaacaaatatatcgaagaggaaaaccctgattatattgccgttgctttcgatcttagggcaaaaactttccggcacggtctatatgagggatacaaagcgcagcggaaaggcatgcccgatgaacttgcaatgcagatacccctcgcgaaggaagtactgagggcgatgaatattgccataatagagcatgaaggttatgaagccgacgatataatcggcagcctttcgttaaaggccgaaaaagagaattttgacgtaataatccttacgggggacagggattctttccagctgatcagcgacagggtgaaagttatcctgccttcgacgaaagccggaaaaacagagaccaacgtatatgataaacaggccatcattgacaaatacggagttttaccccatcagcttattgacgttaaaggcttaatgggagattcgtcagataatatacccggcgttccgggagtgggtgagaaaacggcgttaagccttatttcagcctacggtacactggaaggtgtttacgagcatattgatgaaataaaacagcctaagctgaaagcatcgctgattgaatataaggatcaggcgtttttaagccgtaagctgggtactattgtaagaaatctggagctgtgtgcttcgctggaggatctgaaaagaaaagaaataaaccgcaaagagcttttgaatgttttcagaaaactcgaatttgaaagtatcatatcaaaaatgaatcttgcttccgctgaggtgacagaattacctcccgcgccggaagagcttaaaataacccatatttcagcggcagaggatcttaagaaatggattgcttacctgcttaaccagaaaaacatttccgtccttcaactgattgaccgggaggattcatacagttcccgtctttcagggctggctttgtgcaccggggatgaggttttttatatcgagaccgggactgcactccccgagaatttgattgcaacagagctgaaagaactgtggcagaatgaaaatattcacaaaatcggacacaatataaaagaatttataacctggctgctgaaacacgatgttgaactgaacggcctttatttcgacactatgattgccgaatacctgatagattccataagaaacggctatcctatagcaagcctttctcacaaatacctgaatcgcagcgttccgtcgctggacgaacttttgggcaagggaaagggagcaaaaaagtactctgaaattccgcccgaaaggctgaaagattacagcgcttataacgtcaaagccatttttgacatatggccgatgcagaaaaaagttcttcaggaaaaccggcaggaggagctttttaatgacatagagcttcctcttataaccgtacttgccagtatggaataccacggtttcaaagttgacgccgcaaaacttcacgaatacggcgaagttcttctgtcacgcataaaagacctggaaaaggtaatttacatgctggccggtgaagaattcaacatcaattcaacgaagcagcttggtaccatattattcgaaaaactgaagcttcccgttgtaaaaagtacaaagaccggatactccaccgacgtcgaggttcttgaagagctttattacaagcatgatataataccatgcataatagaataccgccagcttacaaaactttacaccacctacgccgaaggtcttgaaaaagtgataaatcctgtaaccggtaaaattcattcaagttttaaccagacggttacggctacaggccgcatcagcagtaccgaaccaaatttacagaatatcccagtcagacacgaaatgggaagggaaatacggaaagcttttattccgtcgtcggaaaacgctgtttttgttgatgccgattattcacagatagagcttcgcgtgcttgcccatataacaggcgatgaagccctgataaatgctttcgttaagggggaagatattcatacggccacggcgtcgctggtatttgacgtagctcccgaagatgtgacgccggaactgcgcagaaaggcaaaagccgtaaatttcggcatagtgtacgggatcagtgattacgggctggcacgggatttgggaattacccggaaggaagcaaagcggtatatagacgactattttgccaaataccccaaagtaaaaacctatgtggatgaaattgtgcgggtcggccaggaacaggggtatgtggaaactctgttccacagaagaagataccttcccgagcttgcatctaaaaattttcaccagcgttctttcggaaaatctgttgcaatgaatacgcccatacagggcactgcagccgatattattaaaattgcgatggtgaaggtatacaaggctttgaaagaatccggccttaaatccaggcttatcctccaggtccatgacgaacttgttattgagacttttgaagacgaactggagactgtcaaggaacttgtcaaaaagtgcatggaagaggccgttgaattgagtgtgccgcttgttgtcgacgtttcaatcgggaaaaactggtatgaagcctcctgatatggatcc

SEQ ID NO: 478 - DNA, 2772 bp, Artificial Sequence
  Description of Artificial Sequence: Synthetic Clostridium stercorarium DNA Polymerase R833T
atgaaatacctgctgccgaccgctgctgctggtctgctgctcctcgctgcccagccggcgatggccatggatccaaaaataatccttatagacggaaacagtattttaaaccgcggtttttatgccctgtcggggcgatccatgctgactacgtccacaggtctgtataccaatgcggttttcgcttttgtaaatatattgaacaaatatatcgaagaggaaaaccctgattatattgccgttgctttcgatcttagggcaaaaactttccggcacggtctatatgagggatacaaagcgcagcggaaaggcatgcccgatgaacttgcaatgcagatacccctcgcgaaggaagtactgagggcgatgaatattgccataatagagcatgaaggttatgaagccgacgatataatcggcagcctttcgttaaaggccgaaaaagagaattttgacgtaataatccttacgggggacagggattctttccagctgatcagcgacagggtgaaagttatcctgccttcgacgaaagccggaaaaacagagaccaacgtatatgataaacaggccatcattgacaaatacggagttttaccccatcagcttattgacgttaaaggcttaatgggagattcgtcagataatatacccggcgttccgggagtgggtgagaaaacggcgttaagccttatttcagcctacggtacactggaaggtgtttacgagcatattgatgaaataaaacagcctaagctgaaagcatcgctgattgaatataaggatcaggcgtttttaagccgtaagctgggtactattgtaagaaatctggagctgtgtgcttcgctggaggatctgaaaagaaaagaaataaaccgcaaagagcttttgaatgttttcagaaaactcgaatttgaaagtatcatatcaaaaatgaatcttgcttccgctgaggtgacagaattacctcccgcgccggaagagcttaaaataacccatatttcagcggcagaggatcttaagaaatggattgcttacctgcttaaccagaaaaacatttccgtccttcaactgattgaccgggaggattcatacagttcccgtctttcagggctggctttgtgcaccggggatgaggttttttatatcgagaccgggactgcactccccgagaatttgattgcaacagagctgaaagaactgtggcagaatgaaaatattcacaaaatcggacacaatataaaagaatttataacctggctgctgaaacacgatgttgaactgaacggcctttatttcgacactatgattgccgaatacctgatagattccataagaaacggctatcctatagcaagcctttctcacaaatacctgaatcgcagcgttccgtcgctggacgaacttttgggcaagggaaagggagcaaaaaagtactctgaaattccgcccgaaaggctgaaagattacagcgcttataacgtcaaagccatttttgacatatggccgatgcagaaaaaagttcttcaggaaaaccggcaggaggagctttttaatgacatagagcttcctcttataaccgtacttgccagtatggaataccacggtttcaaagttgacgccgcaaaacttcacgaatacggcgaagttcttctgtcacgcataaaagacctggaaaaggtaatttacatgctggccggtgaagaattcaacatcaattcaacgaagcagcttggtaccatattattcgaaaaactgaagcttcccgttgtaaaaagtacaaagaccggatactccaccgacgtcgaggttcttgaagagctttattacaagcatgatataataccatgcataatagaataccgccagcttacaaaactttacaccacctacgccgaaggtcttgaaaaagtgataaatcctgtaaccggtaaaattcattcaagttttaaccagacggttacggctacaggccgcatcagcagtaccgaaccaaatttacagaatatcccagtcagacacgaaatgggaagggaaatacggaaagcttttattccgtcgtcggaaaacgctgtttttgttgatgccgattattcacagatagagcttcgcgtgcttgcccatataacaggcgatgaagccctgataaatgctttcgttaagggggaagatattcatacggccacggcgtcgctggtatttgacgtagctcccgaagatgtgacgccggaactgcgcagaaaggcaaaagccgtaaatttcggcatagtgtacgggatcagtgattacgggctggcacgggatttgggaattacccggaaggaagcaaagcggtatatagacgactattttgccaaataccccaaagtaaaaacctatgtggatgaaattgtgcgggtcggccaggaacaggggtatgtggaaactctgttccacagaagaagataccttcccgagcttgcatctaaaaattttcaccagcgttctttcggaaaaactgttgcaatgaatacgcccatacagggcactgcagccgatattattaaaattgcgatggtgaaggtatacaaggctttgaaagaatccggccttaaatccaggcttatcctccaggtccatgacgaacttgttattgagacttttgaagacgaactggagactgtcaaggaacttgtcaaaaagtgcatggaagaggccgttgaattgagtgtgccgcttgttgtcgacgtttcaatcgggaaaaactggtatgaagcctcctgatatggatcc

SEQ ID NO: 479 - DNA, 2772 bp, Artificial Sequence
  Description of Artificial Sequence: Synthetic Clostridium stercorarium DNA Polymerase R833W
atgaaatacctgctgccgaccgctgctgctggtctgctgctcctcgctgcccagccggcgatggccatggatccaaaaataatccttatagacggaaacagtattttaaaccgcggtttttatgccctgtcggggcgatccatgctgactacgtccacaggtctgtataccaatgcggttttcgcttttgtaaatatattgaacaaatatatcgaagaggaaaaccctgattatattgccgttgctttcgatcttagggcaaaaactttccggcacggtctatatgagggatacaaagcgcagcggaaaggcatgcccgatgaacttgcaatgcagatacccctcgcgaaggaagtactgagggcgatgaatattgccataatagagcatgaaggttatgaagccgacgatataatcggcagcctttcgttaaaggccgaaaaagagaattttgacgtaataatccttacgggggacagggattctttccagctgatcagcgacagggtgaaagttatcctgccttcgacgaaagccggaaaaacagagaccaacgtatatgataaacaggccatcattgacaaatacggagttttaccccatcagcttattgacgttaaaggcttaatgggagattcgtcagataatatacccggcgttccgggagtgggtgagaaaacggcgttaagccttatttcagcctacggtacactggaaggtgtttacgagcatattgatgaaataaaacagcctaagctgaaagcatcgctgattgaatataaggatcaggcgtttttaagccgtaagctgggtactattgtaagaaatctggagctgtgtgcttcgctggaggatctgaaaagaaaagaaataaaccgcaaagagcttttgaatgttttcagaaaactcgaatttgaaagtatcatatcaaaaatgaatcttgcttccgctgaggtgacagaattacctcccgcgccggaagagcttaaaataacccatatttcagcggcagaggatcttaagaaatggattgcttacctgcttaaccagaaaaacatttccgtccttcaactgattgaccgggaggattcatacagttcccgtctttcagggctggctttgtgcaccggggatgaggttttttatatcgagaccgggactgcactccccgagaatttgattgcaacagagctgaaagaactgtggcagaatgaaaatattcacaaaatcggacacaatataaaagaatttataacctggctgctgaaacacgatgttgaactgaacggcctttatttcgacactatgattgccgaatacctgatagattccataagaaacggctatcctatagcaagcctttctcacaaatacctgaatcgcagcgttccgtcgctggacgaacttttgggcaagggaaagggagcaaaaaagtactctgaaattccgcccgaaaggctgaaagattacagcgcttataacgtcaaagccatttttgacatatggccgatgcagaaaaaagttcttcaggaaaaccggcaggaggagctttttaatgacatagagcttcctcttataaccgtacttgccagtatggaataccacggtttcaaagttgacgccgcaaaacttcacgaatacggcgaagttcttctgtcacgcataaaagacctggaaaaggtaatttacatgctggccggtgaagaattcaacatcaattcaacgaagcagcttggtaccatattattcgaaaaactgaagcttcccgttgtaaaaagtacaaagaccggatactccaccgacgtcgaggttcttgaagagctttattacaagcatgatataataccatgcataatagaataccgccagcttacaaaactttacaccacctacgccgaaggtcttgaaaaagtgataaatcctgtaaccggtaaaattcattcaagttttaaccagacggttacggctacaggccgcatcagcagtaccgaaccaaatttacagaatatcccagtcagacacgaaatgggaagggaaatacggaaagcttttattccgtcgtcggaaaacgctgtttttgttgatgccgattattcacagatagagcttcgcgtgcttgcccatataacaggcgatgaagccctgataaatgctttcgttaagggggaagatattcatacggccacggcgtcgctggtatttgacgtagctcccgaagatgtgacgccggaactgcgcagaaaggcaaaagccgtaaatttcggcatagtgtacgggatcagtgattacgggctggcacgggatttgggaattacccggaaggaagcaaagcggtatatagacgactattttgccaaataccccaaagtaaaaacctatgtggatgaaattgtgcgggtcggccaggaacaggggtatgtggaaactctgttccacagaagaagataccttcccgagcttgcatctaaaaattttcaccagcgttctttcggaaaatgggttgcaatgaatacgcccatacagggcactgcagccgatattattaaaattgcgatggtgaaggtatacaaggctttgaaagaatccggccttaaatccaggcttatcctccaggtccatgacgaacttgttattgagacttttgaagacgaactggagactgtcaaggaacttgtcaaaaagtgcatggaagaggccgttgaattgagtgtgccgcttgttgtcgacgtttcaatcgggaaaaactggtatgaagcctcctgatatggatcc

SEQ ID NO: 480 - DNA, 2772 bp, Artificial Sequence
  Description of Artificial Sequence: Synthetic Clostridium stercorarium DNA Polymerase R833Y
atgaaatacctgctgccgaccgctgctgctggtctgctgctcctcgctgcccagccggcgatggccatggatccaaaaataatccttatagacggaaacagtattttaaaccgcggtttttatgccctgtcggggcgatccatgctgactacgtccacaggtctgtataccaatgcggttttcgcttttgtaaatatattgaacaaatatatcgaagaggaaaaccctgattatattgccgttgctttcgatcttagggcaaaaactttccggcacggtctatatgagggatacaaagcgcagcggaaaggcatgcccgatgaacttgcaatgcagatacccctcgcgaaggaagtactgagggcgatgaatattgccataatagagcatgaaggttatgaagccgacgatataatcggcagcctttcgttaaaggccgaaaaagagaattttgacgtaataatccttacgggggacagggattctttccagctgatcagcgacagggtgaaagttatcctgccttcgacgaaagccggaaaaacagagaccaacgtatatgataaacaggccatcattgacaaatacggagttttaccccatcagcttattgacgttaaaggcttaatgggagattcgtcagataatatacccggcgttccgggagtgggtgagaaaacggcgttaagccttatttcagcctacggtacactggaaggtgtttacgagcatattgatgaaataaaacagcctaagctgaaagcatcgctgattgaatataaggatcaggcgtttttaagccgtaagctgggtactattgtaagaaatctggagctgtgtgcttcgctggaggatctgaaaagaaaagaaataaaccgcaaagagcttttgaatgttttcagaaaactcgaatttgaaagtatcatatcaaaaatgaatcttgcttccgctgaggtgacagaattacctcccgcgccggaagagcttaaaataacccatatttcagcggcagaggatcttaagaaatggattgcttacctgcttaaccagaaaaacatttccgtccttcaactgattgaccgggaggattcatacagttcccgtctttcagggctggctttgtgcaccggggatgaggttttttatatcgagaccgggactgcactccccgagaatttgattgcaacagagctgaaagaactgtggcagaatgaaaatattcacaaaatcggacacaatataaaagaatttataacctggctgctgaaacacgatgttgaactgaacggcctttatttcgacactatgattgccgaatacctgatagattccataagaaacggctatcctatagcaagcctttctcacaaatacctgaatcgcagcgttccgtcgctggacgaacttttgggcaagggaaagggagcaaaaaagtactctgaaattccgcccgaaaggctgaaagattacagcgcttataacgtcaaagccatttttgacatatggccgatgcagaaaaaagttcttcaggaaaaccggcaggaggagctttttaatgacatagagcttcctcttataaccgtacttgccagtatggaataccacggtttcaaagttgacgccgcaaaacttcacgaatacggcgaagttcttctgtcacgcataaaagacctggaaaaggtaatttacatgctggccggtgaagaattcaacatcaattcaacgaagcagcttggtaccatattattcgaaaaactgaagcttcccgttgtaaaaagtacaaagaccggatactccaccgacgtcgaggttcttgaagagctttattacaagcatgatataataccatgcataatagaataccgccagcttacaaaactttacaccacctacgccgaaggtcttgaaaaagtgataaatcctgtaaccggtaaaattcattcaagttttaaccagacggttacggctacaggccgcatcagcagtaccgaaccaaatttacagaatatcccagtcagacacgaaatgggaagggaaatacggaaagcttttattccgtcgtcggaaaacgctgtttttgttgatgccgattattcacagatagagcttcgcgtgcttgcccatataacaggcgatgaagccctgataaatgctttcgttaagggggaagatattcatacggccacggcgtcgctggtatttgacgtagctcccgaagatgtgacgccggaactgcgcagaaaggcaaaagccgtaaatttcggcatagtgtacgggatcagtgattacgggctggcacgggatttgggaattacccggaaggaagcaaagcggtatatagacgactattttgccaaataccccaaagtaaaaacctatgtggatgaaattgtgcgggtcggccaggaacaggggtatgtggaaactctgttccacagaagaagataccttcccgagcttgcatctaaaaattttcaccagcgttctttcggaaaatatgttgcaatgaatacgcccatacagggcactgcagccgatattattaaaattgcgatggtgaaggtatacaaggctttgaaagaatccggccttaaatccaggcttatcctccaggtccatgacgaacttgttattgagacttttgaagacgaactggagactgtcaaggaacttgtcaaaaagtgcatggaagaggccgttgaattgagtgtgccgcttgttgtcgacgtttcaatcgggaaaaactggtatgaagcctcctgatatggatcc

SEQ ID NO: 481 - DNA, 2772 bp, Artificial Sequence
  Description of Artificial Sequence: Synthetic Clostridium stercorarium DNA Polymerase R833V
atgaaatacctgctgccgaccgctgctgctggtctgctgctcctcgctgcccagccggcgatggccatggatccaaaaataatccttatagacggaaacagtattttaaaccgcggtttttatgccctgtcggggcgatccatgctgactacgtccacaggtctgtataccaatgcggttttcgcttttgtaaatatattgaacaaatatatcgaagaggaaaaccctgattatattgccgttgctttcgatcttagggcaaaaactttccggcacggtctatatgagggatacaaagcgcagcggaaaggcatgcccgatgaacttgcaatgcagatacccctcgcgaaggaagtactgagggcgatgaatattgccataatagagcatgaaggttatgaagccgacgatataatcggcagcctttcgttaaaggccgaaaaagagaattttgacgtaataatccttacgggggacagggattctttccagctgatcagcgacagggtgaaagttatcctgccttcgacgaaagccggaaaaacagagaccaacgtatatgataaacaggccatcattgacaaatacggagttttaccccatcagcttattgacgttaaaggcttaatgggagattcgtcagataatatacccggcgttccgggagtgggtgagaaaacggcgttaagccttatttcagcctacggtacactggaaggtgtttacgagcatattgatgaaataaaacagcctaagctgaaagcatcgctgattgaatataaggatcaggcgtttttaagccgtaagctgggtactattgtaagaaatctggagctgtgtgcttcgctggaggatctgaaaagaaaagaaataaaccgcaaagagcttttgaatgttttcagaaaactcgaatttgaaagtatcatatcaaaaatgaatcttgcttccgctgaggtgacagaattacctcccgcgccggaagagcttaaaataacccatatttcagcggcagaggatcttaagaaatggattgcttacctgcttaaccagaaaaacatttccgtccttcaactgattgaccgggaggattcatacagttcccgtctttcagggctggctttgtgcaccggggatgaggttttttatatcgagaccgggactgcactccccgagaatttgattgcaacagagctgaaagaactgtggcagaatgaaaatattcacaaaatcggacacaatataaaagaatttataacctggctgctgaaacacgatgttgaactgaacggcctttatttcgacactatgattgccgaatacctgatagattccataagaaacggctatcctatagcaagcctttctcacaaatacctgaatcgcagcgttccgtcgctggacgaacttttgggcaagggaaagggagcaaaaaagtactctgaaattccgcccgaaaggctgaaagattacagcgcttataacgtcaaagccatttttgacatatggccgatgcagaaaaaagttcttcaggaaaaccggcaggaggagctttttaatgacatagagcttcctcttataaccgtacttgccagtatggaataccacggtttcaaagttgacgccgcaaaacttcacgaatacggcgaagttcttctgtcacgcataaaagacctggaaaaggtaatttacatgctggccggtgaagaattcaacatcaattcaacgaagcagcttggtaccatattattcgaaaaactgaagcttcccgttgtaaaaagtacaaagaccggatactccaccgacgtcgaggttcttgaagagctttattacaagcatgatataataccatgcataatagaataccgccagcttacaaaactttacaccacctacgccgaaggtcttgaaaaagtgataaatcctgtaaccggtaaaattcattcaagttttaaccagacggttacggctacaggccgcatcagcagtaccgaaccaaatttacagaatatcccagtcagacacgaaatgggaagggaaatacggaaagcttttattccgtcgtcggaaaacgctgtttttgttgatgccgattattcacagatagagcttcgcgtgcttgcccatataacaggcgatgaagccctgataaatgctttcgttaagggggaagatattcatacggccacggcgtcgctggtatttgacgtagctcccgaagatgtgacgccggaactgcgcagaaaggcaaaagccgtaaatttcggcatagtgtacgggatcagtgattacgggctggcacgggatttgggaattacccggaaggaagcaaagcggtatatagacgactattttgccaaataccccaaagtaaaaacctatgtggatgaaattgtgcgggtcggccaggaacaggggtatgtggaaactctgttccacagaagaagataccttcccgagcttgcatctaaaaattttcaccagcgttctttcggaaaagttgttgcaatgaatacgcccatacagggcactgcagccgatattattaaaattgcgatggtgaaggtatacaaggctttgaaagaatccggccttaaatccaggcttatcctccaggtccatgacgaacttgttattgagacttttgaagacgaactggagactgtcaaggaacttgtcaaaaagtgcatggaagaggccgttgaattgagtgtgccgcttgttgtcgacgtttcaatcgggaaaaactggtatgaagcctcctgatatggatcc

SEQ ID NO: 482 - DNA, 2772 bp, Artificial Sequence
  Description of Artificial Sequence: Synthetic Clostridium stercorarium DNA Polymerase Q623A
atgaaatacctgctgccgaccgctgctgctggtctgctgctcctcgctgcccagccggcgatggccatggatccaaaaataatccttatagacggaaacagtattttaaaccgcggtttttatgccctgtcggggcgatccatgctgactacgtccacaggtctgtataccaatgcggttttcgcttttgtaaatatattgaacaaatatatcgaagaggaaaaccctgattatattgccgttgctttcgatcttagggcaaaaactttccggcacggtctatatgagggatacaaagcgcagcggaaaggcatgcccgatgaacttgcaatgcagatacccctcgcgaaggaagtactgagggcgatgaatattgccataatagagcatgaaggttatgaagccgacgatataatcggcagcctttcgttaaaggccgaaaaagagaattttgacgtaataatccttacgggggacagggattctttccagctgatcagcgacagggtgaaagttatcctgccttcgacgaaagccggaaaaacagagaccaacgtatatgataaacaggccatcattgacaaatacggagttttaccccatcagcttattgacgttaaaggcttaatgggagattcgtcagataatatacccggcgttccgggagtgggtgagaaaacggcgttaagccttatttcagcctacggtacactggaaggtgtttacgagcatattgatgaaataaaacagcctaagctgaaagcatcgctgattgaatataaggatcaggcgtttttaagccgtaagctgggtactattgtaagaaatctggagctgtgtgcttcgctggaggatctgaaaagaaaagaaataaaccgcaaagagcttttgaatgttttcagaaaactcgaatttgaaagtatcatatcaaaaatgaatcttgcttccgctgaggtgacagaattacctcccgcgccggaagagcttaaaataacccatatttcagcggcagaggatcttaagaaatggattgcttacctgcttaaccagaaaaacatttccgtccttcaactgattgaccgggaggattcatacagttcccgtctttcagggctggctttgtgcaccggggatgaggttttttatatcgagaccgggactgcactccccgagaatttgattgcaacagagctgaaagaactgtggcagaatgaaaatattcacaaaatcggacacaatataaaagaatttataacctggctgctgaaacacgatgttgaactgaacggcctttatttcgacactatgattgccgaatacctgatagattccataagaaacggctatcctatagcaagcctttctcacaaatacctgaatcgcagcgttccgtcgctggacgaacttttgggcaagggaaagggagcaaaaaagtactctgaaattccgcccgaaaggctgaaagattacagcgcttataacgtcaaagccatttttgacatatggccgatgcagaaaaaagttcttcaggaaaaccggcaggaggagctttttaatgacatagagcttcctcttataaccgtacttgccagtatggaataccacggtttcaaagttgacgccgcaaaacttcacgaatacggcgaagttcttctgtcacgcataaaagacctggaaaaggtaatttacatgctggccggtgaagaattcaacatcaattcaacgaagcagcttggtaccatattattcgaaaaactgaagcttcccgttgtaaaaagtacaaagaccggatactccaccgacgtcgaggttcttgaagagctttattacaagcatgatataataccatgcataatagaataccgcgctcttacaaaactttacaccacctacgccgaaggtcttgaaaaagtgataaatcctgtaaccggtaaaattcattcaagttttaaccagacggttacggctacaggccgcatcagcagtaccgaaccaaatttacagaatatcccagtcagacacgaaatgggaagggaaatacggaaagcttttattccgtcgtcggaaaacgctgtttttgttgatgccgattattcacagatagagcttcgcgtgcttgcccatataacaggcgatgaagccctgataaatgctttcgttaagggggaagatattcatacggccacggcgtcgctggtatttgacgtagctcccgaagatgtgacgccggaactgcgcagaaaggcaaaagccgtaaatttcggcatagtgtacgggatcagtgattacgggctggcacgggatttgggaattacccggaaggaagcaaagcggtatatagacgactattttgccaaataccccaaagtaaaaacctatgtggatgaaattgtgcgggtcggccaggaacaggggtatgtggaaactctgttccacagaagaagataccttcccgagcttgcatctaaaaattttcaccagcgttctttcggaaaaagggttgcaatgaatacgcccatacagggcactgcagccgatattattaaaattgcgatggtgaaggtatacaaggctttgaaagaatccggccttaaatccaggcttatcctccaggtccatgacgaacttgttattgagacttttgaagacgaactggagactgtcaaggaacttgtcaaaaagtgcatggaagaggccgttgaattgagtgtgccgcttgttgtcgacgtttcaatcgggaaaaactggtatgaagcctcctgatatggatcc

SEQ ID NO: 483 - DNA, 2772 bp, Artificial Sequence
  Description of Artificial Sequence: Synthetic Clostridium stercorarium DNA Polymerase Q623C
atgaaatacctgctgccgaccgctgctgctggtctgctgctcctcgctgcccagccggcgatggccatggatccaaaaataatccttatagacggaaacagtattttaaaccgcggtttttatgccctgtcggggcgatccatgctgactacgtccacaggtctgtataccaatgcggttttcgcttttgtaaatatattgaacaaatatatcgaagaggaaaaccctgattatattgccgttgctttcgatcttagggcaaaaactttccggcacggtctatatgagggatacaaagcgcagcggaaaggcatgcccgatgaacttgcaatgcagatacccctcgcgaaggaagtactgagggcgatgaatattgccataatagagcatgaaggttatgaagccgacgatataatcggcagcctttcgttaaaggccgaaaaagagaattttgacgtaataatccttacgggggacagggattctttccagctgatcagcgacagggtgaaagttatcctgccttcgacgaaagccggaaaaacagagaccaacgtatatgataaacaggccatcattgacaaatacggagttttaccccatcagcttattgacgttaaaggcttaatgggagattcgtcagataatatacccggcgttccgggagtgggtgagaaaacggcgttaagccttatttcagcctacggtacactggaaggtgtttacgagcatattgatgaaataaaacagcctaagctgaaagcatcgctgattgaatataaggatcaggcgtttttaagccgtaagctgggtactattgtaagaaatctggagctgtgtgcttcgctggaggatctgaaaagaaaagaaataaaccgcaaagagcttttgaatgttttcagaaaactcgaatttgaaagtatcatatcaaaaatgaatcttgcttccgctgaggtgacagaattacctcccgcgccggaagagcttaaaataacccatatttcagcggcagaggatcttaagaaatggattgcttacctgcttaaccagaaaaacatttccgtccttcaactgattgaccgggaggattcatacagttcccgtctttcagggctggctttgtgcaccggggatgaggttttttatatcgagaccgggactgcactccccgagaatttgattgcaacagagctgaaagaactgtggcagaatgaaaatattcacaaaatcggacacaatataaaagaatttataacctggctgctgaaacacgatgttgaactgaacggcctttatttcgacactatgattgccgaatacctgatagattccataagaaacggctatcctatagcaagcctttctcacaaatacctgaatcgcagcgttccgtcgctggacgaacttttgggcaagggaaagggagcaaaaaagtactctgaaattccgcccgaaaggctgaaagattacagcgcttataacgtcaaagccatttttgacatatggccgatgcagaaaaaagttcttcaggaaaaccggcaggaggagctttttaatgacatagagcttcctcttataaccgtacttgccagtatggaataccacggtttcaaagttgacgccgcaaaacttcacgaatacggcgaagttcttctgtcacgcataaaagacctggaaaaggtaatttacatgctggccggtgaagaattcaacatcaattcaacgaagcagcttggtaccatattattcgaaaaactgaagcttcccgttgtaaaaagtacaaagaccggatactccaccgacgtcgaggttcttgaagagctttattacaagcatgatataataccatgcataatagaataccgctgtcttacaaaactttacaccacctacgccgaaggtcttgaaaaagtgataaatcctgtaaccggtaaaattcattcaagttttaaccagacggttacggctacaggccgcatcagcagtaccgaaccaaatttacagaatatcccagtcagacacgaaatgggaagggaaatacggaaagcttttattccgtcgtcggaaaacgctgtttttgttgatgccgattattcacagatagagcttcgcgtgcttgcccatataacaggcgatgaagccctgataaatgctttcgttaagggggaagatattcatacggccacggcgtcgctggtatttgacgtagctcccgaagatgtgacgccggaactgcgcagaaaggcaaaagccgtaaatttcggcatagtgtacgggatcagtgattacgggctggcacgggatttgggaattacccggaaggaagcaaagcggtatatagacgactattttgccaaataccccaaagtaaaaacctatgtggatgaaattgtgcgggtcggccaggaacaggggtatgtggaaactctgttccacagaagaagataccttcccgagcttgcatctaaaaattttcaccagcgttctttcggaaaaagggttgcaatgaatacgcccatacagggcactgcagccgatattattaaaattgcgatggtgaaggtatacaaggctttgaaagaatccggccttaaatccaggcttatcctccaggtccatgacgaacttgttattgagacttttgaagacgaactggagactgtcaaggaacttgtcaaaaagtgcatggaagaggccgttgaattgagtgtgccgcttgttgtcgacgtttcaatcgggaaaaactggtatgaagcctcctgatatggatcc

SEQ ID NO: 484 - DNA, 2772 bp, Artificial Sequence
  Description of Artificial Sequence: Synthetic Clostridium stercorarium DNA Polymerase Q623D
atgaaatacctgctgccgaccgctgctgctggtctgctgctcctcgctgcccagccggcgatggccatggatccaaaaataatccttatagacggaaacagtattttaaaccgcggtttttatgccctgtcggggcgatccatgctgactacgtccacaggtctgtataccaatgcggttttcgcttttgtaaatatattgaacaaatatatcgaagaggaaaaccctgattatattgccgttgctttcgatcttagggcaaaaactttccggcacggtctatatgagggatacaaagcgcagcggaaaggcatgcccgatgaacttgcaatgcagatacccctcgcgaaggaagtactgagggcgatgaatattgccataatagagcatgaaggttatgaagccgacgatataatcggcagcctttcgttaaaggccgaaaaagagaattttgacgtaataatccttacgggggacagggattctttccagctgatcagcgacagggtgaaagttatcctgccttcgacgaaagccggaaaaacagagaccaacgtatatgataaacaggccatcattgacaaatacggagttttaccccatcagcttattgacgttaaaggcttaatgggagattcgtcagataatatacccggcgttccgggagtgggtgagaaaacggcgttaagccttatttcagcctacggtacactggaaggtgtttacgagcatattgatgaaataaaacagcctaagctgaaagcatcgctgattgaatataaggatcaggcgtttttaagccgtaagctgggtactattgtaagaaatctggagctgtgtgcttcgctggaggatctgaaaagaaaagaaataaaccgcaaagagcttttgaatgttttcagaaaactcgaatttgaaagtatcatatcaaaaatgaatcttgcttccgctgaggtgacagaattacctcccgcgccggaagagcttaaaataacccatatttcagcggcagaggatcttaagaaatggattgcttacctgcttaaccagaaaaacatttccgtccttcaactgattgaccgggaggattcatacagttcccgtctttcagggctggctttgtgcaccggggatgaggttttttatatcgagaccgggactgcactccccgagaatttgattgcaacagagctgaaagaactgtggcagaatgaaaatattcacaaaatcggacacaatataaaagaatttataacctggctgctgaaacacgatgttgaactgaacggcctttatttcgacactatgattgccgaatacctgatagattccataagaaacggctatcctatagcaagcctttctcacaaatacctgaatcgcagcgttccgtcgctggacgaacttttgggcaagggaaagggagcaaaaaagtactctgaaattccgcccgaaaggctgaaagattacagcgcttataacgtcaaagccatttttgacatatggccgatgcagaaaaaagttcttcaggaaaaccggcaggaggagctttttaatgacatagagcttcctcttataaccgtacttgccagtatggaataccacggtttcaaagttgacgccgcaaaacttcacgaatacggcgaagttcttctgtcacgcataaaagacctggaaaaggtaatttacatgctggccggtgaagaattcaacatcaattcaacgaagcagcttggtaccatattattcgaaaaactgaagcttcccgttgtaaaaagtacaaagaccggatactccaccgacgtcgaggttcttgaagagctttattacaagcatgatataataccatgcataatagaataccgcgatcttacaaaactttacaccacctacgccgaaggtcttgaaaaagtgataaatcctgtaaccggtaaaattcattcaagttttaaccagacggttacggctacaggccgcatcagcagtaccgaaccaaatttacagaatatcccagtcagacacgaaatgggaagggaaatacggaaagcttttattccgtcgtcggaaaacgctgtttttgttgatgccgattattcacagatagagcttcgcgtgcttgcccatataacaggcgatgaagccctgataaatgctttcgttaagggggaagatattcatacggccacggcgtcgctggtatttgacgtagctcccgaagatgtgacgccggaactgcgcagaaaggcaaaagccgtaaatttcggcatagtgtacgggatcagtgattacgggctggcacgggatttgggaattacccggaaggaagcaaagcggtatatagacgactattttgccaaataccccaaagtaaaaacctatgtggatgaaattgtgcgggtcggccaggaacaggggtatgtggaaactctgttccacagaagaagataccttcccgagcttgcatctaaaaattttcaccagcgttctttcggaaaaagggttgcaatgaatacgcccatacagggcactgcagccgatattattaaaattgcgatggtgaaggtatacaaggctttgaaagaatccggccttaaatccaggcttatcctccaggtccatgacgaacttgttattgagacttttgaagacgaactggagactgtcaaggaacttgtcaaaaagtgcatggaagaggccgttgaattgagtgtgccgcttgttgtcgacgtttcaatcgggaaaaactggtatgaagcctcctgatatggatcc

SEQ ID NO: 485 - DNA, 2772 bp, Artificial Sequence
  Description of Artificial Sequence: Synthetic Clostridium stercorarium DNA Polymerase Q623F
atgaaatacctgctgccgaccgctgctgctggtctgctgctcctcgctgcccagccggcgatggccatggatccaaaaataatccttatagacggaaacagtattttaaaccgcggtttttatgccctgtcggggcgatccatgctgactacgtccacaggtctgtataccaatgcggttttcgcttttgtaaatatattgaacaaatatatcgaagaggaaaaccctgattatattgccgttgctttcgatcttagggcaaaaactttccggcacggtctatatgagggatacaaagcgcagcggaaaggcatgcccgatgaacttgcaatgcagatacccctcgcgaaggaagtactgagggcgatgaatattgccataatagagcatgaaggttatgaagccgacgatataatcggcagcctttcgttaaaggccgaaaaagagaattttgacgtaataatccttacgggggacagggattctttccagctgatcagcgacagggtgaaagttatcctgccttcgacgaaagccggaaaaacagagaccaacgtatatgataaacaggccatcattgacaaatacggagttttaccccatcagcttattgacgttaaaggcttaatgggagattcgtcagataatatacccggcgttccgggagtgggtgagaaaacggcgttaagccttatttcagcctacggtacactggaaggtgtttacgagcatattgatgaaataaaacagcctaagctgaaagcatcgctgattgaatataaggatcaggcgtttttaagccgtaagctgggtactattgtaagaaatctggagctgtgtgcttcgctggaggatctgaaaagaaaagaaataaaccgcaaagagcttttgaatgttttcagaaaactcgaatttgaaagtatcatatcaaaaatgaatcttgcttccgctgaggtgacagaattacctcccgcgccggaagagcttaaaataacccatatttcagcggcagaggatcttaagaaatggattgcttacctgcttaaccagaaaaacatttccgtccttcaactgattgaccgggaggattcatacagttcccgtctttcagggctggctttgtgcaccggggatgaggttttttatatcgagaccgggactgcactccccgagaatttgattgcaacagagctgaaagaactgtggcagaatgaaaatattcacaaaatcggacacaatataaaagaatttataacctggctgctgaaacacgatgttgaactgaacggcctttatttcgacactatgattgccgaatacctgatagattccataagaaacggctatcctatagcaagcctttctcacaaatacctgaatcgcagcgttccgtcgctggacgaacttttgggcaagggaaagggagcaaaaaagtactctgaaattccgcccgaaaggctgaaagattacagcgcttataacgtcaaagccatttttgacatatggccgatgcagaaaaaagttcttcaggaaaaccggcaggaggagctttttaatgacatagagcttcctcttataaccgtacttgccagtatggaataccacggtttcaaagttgacgccgcaaaacttcacgaatacggcgaagttcttctgtcacgcataaaagacctggaaaaggtaatttacatgctggccggtgaagaattcaacatcaattcaacgaagcagcttggtaccatattattcgaaaaactgaagcttcccgttgtaaaaagtacaaagaccggatactccaccgacgtcgaggttcttgaagagctttattacaagcatgatataataccatgcataatagaataccgctttcttacaaaactttacaccacctacgccgaaggtcttgaaaaagtgataaatcctgtaaccggtaaaattcattcaagttttaaccagacggttacggctacaggccgcatcagcagtaccgaaccaaatttacagaatatcccagtcagacacgaaatgggaagggaaatacggaaagcttttattccgtcgtcggaaaacgctgtttttgttgatgccgattattcacagatagagcttcgcgtgcttgcccatataacaggcgatgaagccctgataaatgctttcgttaagggggaagatattcatacggccacggcgtcgctggtatttgacgtagctcccgaagatgtgacgccggaactgcgcagaaaggcaaaagccgtaaatttcggcatagtgtacgggatcagtgattacgggctggcacgggatttgggaattacccggaaggaagcaaagcggtatatagacgactattttgccaaataccccaaagtaaaaacctatgtggatgaaattgtgcgggtcggccaggaacaggggtatgtggaaactctgttccacagaagaagataccttcccgagcttgcatctaaaaattttcaccagcgttctttcggaaaaagggttgcaatgaatacgcccatacagggcactgcagccgatattattaaaattgcgatggtgaaggtatacaaggctttgaaagaatccggccttaaatccaggcttatcctccaggtccatgacgaacttgttattgagacttttgaagacgaactggagactgtcaaggaacttgtcaaaaagtgcatggaagaggccgttgaattgagtgtgccgcttgttgtcgacgtttcaatcgggaaaaactggtatgaagcctcctgatatggatcc

SEQ ID NO: 486 - DNA, 2772 bp, Artificial Sequence
  Description of Artificial Sequence: Synthetic Clostridium stercorarium DNA Polymerase Q623G
atgaaatacctgctgccgaccgctgctgctggtctgctgctcctcgctgcccagccggcgatggccatggatccaaaaataatccttatagacggaaacagtattttaaaccgcggtttttatgccctgtcggggcgatccatgctgactacgtccacaggtctgtataccaatgcggttttcgcttttgtaaatatattgaacaaatatatcgaagaggaaaaccctgattatattgccgttgctttcgatcttagggcaaaaactttccggcacggtctatatgagggatacaaagcgcagcggaaaggcatgcccgatgaacttgcaatgcagatacccctcgcgaaggaagtactgagggcgatgaatattgccataatagagcatgaaggttatgaagccgacgatataatcggcagcctttcgttaaaggccgaaaaagagaattttgacgtaataatccttacgggggacagggattctttccagctgatcagcgacagggtgaaagttatcctgccttcgacgaaagccggaaaaacagagaccaacgtatatgataaacaggccatcattgacaaatacggagttttaccccatcagcttattgacgttaaaggcttaatgggagattcgtcagataatatacccggcgttccgggagtgggtgagaaaacggcgttaagccttatttcagcctacggtacactggaaggtgtttacgagcatattgatgaaataaaacagcctaagctgaaagcatcgctgattgaatataaggatcaggcgtttttaagccgtaagctgggtactattgtaagaaatctggagctgtgtgcttcgctggaggatctgaaaagaaaagaaataaaccgcaaagagcttttgaatgttttcagaaaactcgaatttgaaagtatcatatcaaaaatgaatcttgcttccgctgaggtgacagaattacctcccgcgccggaagagcttaaaataacccatatttcagcggcagaggatcttaagaaatggattgcttacctgcttaaccagaaaaacatttccgtccttcaactgattgaccgggaggattcatacagttcccgtctttcagggctggctttgtgcaccggggatgaggttttttatatcgagaccgggactgcactccccgagaatttgattgcaacagagctgaaagaactgtggcagaatgaaaatattcacaaaatcggacacaatataaaagaatttataacctggctgctgaaacacgatgttgaactgaacggcctttatttcgacactatgattgccgaatacctgatagattccataagaaacggctatcctatagcaagcctttctcacaaatacctgaatcgcagcgttccgtcgctggacgaacttttgggcaagggaaagggagcaaaaaagtactctgaaattccgcccgaaaggctgaaagattacagcgcttataacgtcaaagccatttttgacatatggccgatgcagaaaaaagttcttcaggaaaaccggcaggaggagctttttaatgacatagagcttcctcttataaccgtacttgccagtatggaataccacggtttcaaagttgacgccgcaaaacttcacgaatacggcgaagttcttctgtcacgcataaaagacctggaaaaggtaatttacatgctggccggtgaagaattcaacatcaattcaacgaagcagcttggtaccatattattcgaaaaactgaagcttcccgttgtaaaaagtacaaagaccggatactccaccgacgtcgaggttcttgaagagctttattacaagcatgatataataccatgcataatagaataccgcggtcttacaaaactttacaccacctacgccgaaggtcttgaaaaagtgataaatcctgtaaccggtaaaattcattcaagttttaaccagacggttacggctacaggccgcatcagcagtaccgaaccaaatttacagaatatcccagtcagacacgaaatgggaagggaaatacggaaagcttttattccgtcgtcggaaaacgctgtttttgttgatgccgattattcacagatagagcttcgcgtgcttgcccatataacaggcgatgaagccctgataaatgctttcgttaagggggaagatattcatacggccacggcgtcgctggtatttgacgtagctcccgaagatgtgacgccggaactgcgcagaaaggcaaaagccgtaaatttcggcatagtgtacgggatcagtgattacgggctggcacgggatttgggaattacccggaaggaagcaaagcggtatatagacgactattttgccaaataccccaaagtaaaaacctatgtggatgaaattgtgcgggtcggccaggaacaggggtatgtggaaactctgttccacagaagaagataccttcccgagcttgcatctaaaaattttcaccagcgttctttcggaaaaagggttgcaatgaatacgcccatacagggcactgcagccgatattattaaaattgcgatggtgaaggtatacaaggctttgaaagaatccggccttaaatccaggcttatcctccaggtccatgacgaacttgttattgagacttttgaagacgaactggagactgtcaaggaacttgtcaaaaagtgcatggaagaggccgttgaattgagtgtgccgcttgttgtcgacgtttcaatcgggaaaaactggtatgaagcctcctgatatggatcc

SEQ ID NO: 487 - DNA, 2772 bp, Artificial Sequence
  Description of Artificial Sequence: Synthetic Clostridium stercorarium DNA Polymerase Q623H
atgaaatacctgctgccgaccgctgctgctggtctgctgctcctcgctgcccagccggcgatggccatggatccaaaaataatccttatagacggaaacagtattttaaaccgcggtttttatgccctgtcggggcgatccatgctgactacgtccacaggtctgtataccaatgcggttttcgcttttgtaaatatattgaacaaatatatcgaagaggaaaaccctgattatattgccgttgctttcgatcttagggcaaaaactttccggcacggtctatatgagggatacaaagcgcagcggaaaggcatgcccgatgaacttgcaatgcagatacccctcgcgaaggaagtactgagggcgatgaatattgccataatagagcatgaaggttatgaagccgacgatataatcggcagcctttcgttaaaggccgaaaaagagaattttgacgtaataatccttacgggggacagggattctttccagctgatcagcgacagggtgaaagttatcctgccttcgacgaaagccggaaaaacagagaccaacgtatatgataaacaggccatcattgacaaatacggagttttaccccatcagcttattgacgttaaaggcttaatgggagattcgtcagataatatacccggcgttccgggagtgggtgagaaaacggcgttaagccttatttcagcctacggtacactggaaggtgtttacgagcatattgatgaaataaaacagcctaagctgaaagcatcgctgattgaatataaggatcaggcgtttttaagccgtaagctgggtactattgtaagaaatctggagctgtgtgcttcgctggaggatctgaaaagaaaagaaataaaccgcaaagagcttttgaatgttttcagaaaactcgaatttgaaagtatcatatcaaaaatgaatcttgcttccgctgaggtgacagaattacctcccgcgccggaagagcttaaaataacccatatttcagcggcagaggatcttaagaaatggattgcttacctgcttaaccagaaaaacatttccgtccttcaactgattgaccgggaggattcatacagttcccgtctttcagggctggctttgtgcaccggggatgaggttttttatatcgagaccgggactgcactccccgagaatttgattgcaacagagctgaaagaactgtggcagaatgaaaatattcacaaaatcggacacaatataaaagaatttataacctggctgctgaaacacgatgttgaactgaacggcctttatttcgacactatgattgccgaatacctgatagattccataagaaacggctatcctatagcaagcctttctcacaaatacctgaatcgcagcgttccgtcgctggacgaacttttgggcaagggaaagggagcaaaaaagtactctgaaattccgcccgaaaggctgaaagattacagcgcttataacgtcaaagccatttttgacatatggccgatgcagaaaaaagttcttcaggaaaaccggcaggaggagctttttaatgacatagagcttcctcttataaccgtacttgccagtatggaataccacggtttcaaagttgacgccgcaaaacttcacgaatacggcgaagttcttctgtcacgcataaaagacctggaaaaggtaatttacatgctggccggtgaagaattcaacatcaattcaacgaagcagcttggtaccatattattcgaaaaactgaagcttcccgttgtaaaaagtacaaagaccggatactccaccgacgtcgaggttcttgaagagctttattacaagcatgatataataccatgcataatagaataccgccatcttacaaaactttacaccacctacgccgaaggtcttgaaaaagtgataaatcctgtaaccggtaaaattcattcaagttttaaccagacggttacggctacaggccgcatcagcagtaccgaaccaaatttacagaatatcccagtcagacacgaaatgggaagggaaatacggaaagcttttattccgtcgtcggaaaacgctgtttttgttgatgccgattattcacagatagagcttcgcgtgcttgcccatataacaggcgatgaagccctgataaatgctttcgttaagggggaagatattcatacggccacggcgtcgctggtatttgacgtagctcccgaagatgtgacgccggaactgcgcagaaaggcaaaagccgtaaatttcggcatagtgtacgggatcagtgattacgggctggcacgggatttgggaattacccggaaggaagcaaagcggtatatagacgactattttgccaaataccccaaagtaaaaacctatgtggatgaaattgtgcgggtcggccaggaacaggggtatgtggaaactctgttccacagaagaagataccttcccgagcttgcatctaaaaattttcaccagcgttctttcggaaaaagggttgcaatgaatacgcccatacagggcactgcagccgatattattaaaattgcgatggtgaaggtatacaaggctttgaaagaatccggccttaaatccaggcttatcctccaggtccatgacgaacttgttattgagacttttgaagacgaactggagactgtcaaggaacttgtcaaaaagtgcatggaagaggccgttgaattgagtgtgccgcttgttgtcgacgtttcaatcgggaaaaactggtatgaagcctcctgatatggatcc

SEQ ID NO: 488 - DNA, 2772 bp, Artificial Sequence
  Description of Artificial Sequence: Synthetic Clostridium stercorarium DNA Polymerase Q623I
atgaaatacctgctgccgaccgctgctgctggtctgctgctcctcgctgcccagccggcgatggccatggatccaaaaataatccttatagacggaaacagtattttaaaccgcggtttttatgccctgtcggggcgatccatgctgactacgtccacaggtctgtataccaatgcggttttcgcttttgtaaatatattgaacaaatatatcgaagaggaaaaccctgattatattgccgttgctttcgatcttagggcaaaaactttccggcacggtctatatgagggatacaaagcgcagcggaaaggcatgcccgatgaacttgcaatgcagatacccctcgcgaaggaagtactgagggcgatgaatattgccataatagagcatgaaggttatgaagccgacgatataatcggcagcctttcgttaaaggccgaaaaagagaattttgacgtaataatccttacgggggacagggattctttccagctgatcagcgacagggtgaaagttatcctgccttcgacgaaagccggaaaaacagagaccaacgtatatgataaacaggccatcattgacaaatacggagttttaccccatcagcttattgacgttaaaggcttaatgggagattcgtcagataatatacccggcgttccgggagtgggtgagaaaacggcgttaagccttatttcagcctacggtacactggaaggtgtttacgagcatattgatgaaataaaacagcctaagctgaaagcatcgctgattgaatataaggatcaggcgtttttaagccgtaagctgggtactattgtaagaaatctggagctgtgtgcttcgctggaggatctgaaaagaaaagaaataaaccgcaaagagcttttgaatgttttcagaaaactcgaatttgaaagtatcatatcaaaaatgaatcttgcttccgctgaggtgacagaattacctcccgcgccggaagagcttaaaataacccatatttcagcggcagaggatcttaagaaatggattgcttacctgcttaaccagaaaaacatttccgtccttcaactgattgaccgggaggattcatacagttcccgtctttcagggctggctttgtgcaccggggatgaggttttttatatcgagaccgggactgcactccccgagaatttgattgcaacagagctgaaagaactgtggcagaatgaaaatattcacaaaatcggacacaatataaaagaatttataacctggctgctgaaacacgatgttgaactgaacggcctttatttcgacactatgattgccgaatacctgatagattccataagaaacggctatcctatagcaagcctttctcacaaatacctgaatcgcagcgttccgtcgctggacgaacttttgggcaagggaaagggagcaaaaaagtactctgaaattccgcccgaaaggctgaaagattacagcgcttataacgtcaaagccatttttgacatatggccgatgcagaaaaaagttcttcaggaaaaccggcaggaggagctttttaatgacatagagcttcctcttataaccgtacttgccagtatggaataccacggtttcaaagttgacgccgcaaaacttcacgaatacggcgaagttcttctgtcacgcataaaagacctggaaaaggtaatttacatgctggccggtgaagaattcaacatcaattcaacgaagcagcttggtaccatattattcgaaaaactgaagcttcccgttgtaaaaagtacaaagaccggatactccaccgacgtcgaggttcttgaagagctttattacaagcatgatataataccatgcataatagaataccgcattcttacaaaactttacaccacctacgccgaaggtcttgaaaaagtgataaatcctgtaaccggtaaaattcattcaagttttaaccagacggttacggctacaggccgcatcagcagtaccgaaccaaatttacagaatatcccagtcagacacgaaatgggaagggaaatacggaaagcttttattccgtcgtcggaaaacgctgtttttgttgatgccgattattcacagatagagcttcgcgtgcttgcccatataacaggcgatgaagccctgataaatgctttcgttaagggggaagatattcatacggccacggcgtcgctggtatttgacgtagctcccgaagatgtgacgccggaactgcgcagaaaggcaaaagccgtaaatttcggcatagtgtacgggatcagtgattacgggctggcacgggatttgggaattacccggaaggaagcaaagcggtatatagacgactattttgccaaataccccaaagtaaaaacctatgtggatgaaattgtgcgggtcggccaggaacaggggtatgtggaaactctgttccacagaagaagataccttcccgagcttgcatctaaaaattttcaccagcgttctttcggaaaaagggttgcaatgaatacgcccatacagggcactgcagccgatattattaaaattgcgatggtgaaggtatacaaggctttgaaagaatccggccttaaatccaggcttatcctccaggtccatgacgaacttgttattgagacttttgaagacgaactggagactgtcaaggaacttgtcaaaaagtgcatggaagaggccgttgaattgagtgtgccgcttgttgtcgacgtttcaatcgggaaaaactggtatgaagcctcctgatatggatcc

SEQ ID NO: 489 - DNA, 2772 bp, Artificial Sequence
  Description of Artificial Sequence: Synthetic Clostridium stercorarium DNA Polymerase Q623L
atgaaatacctgctgccgaccgctgctgctggtctgctgctcctcgctgcccagccggcgatggccatggatccaaaaataatccttatagacggaaacagtattttaaaccgcggtttttatgccctgtcggggcgatccatgctgactacgtccacaggtctgtataccaatgcggttttcgcttttgtaaatatattgaacaaatatatcgaagaggaaaaccctgattatattgccgttgctttcgatcttagggcaaaaactttccggcacggtctatatgagggatacaaagcgcagcggaaaggcatgcccgatgaacttgcaatgcagatacccctcgcgaaggaagtactgagggcgatgaatattgccataatagagcatgaaggttatgaagccgacgatataatcggcagcctttcgttaaaggccgaaaaagagaattttgacgtaataatccttacgggggacagggattctttccagctgatcagcgacagggtgaaagttatcctgccttcgacgaaagccggaaaaacagagaccaacgtatatgataaacaggccatcattgacaaatacggagttttaccccatcagcttattgacgttaaaggcttaatgggagattcgtcagataatatacccggcgttccgggagtgggtgagaaaacggcgttaagccttatttcagcctacggtacactggaaggtgtttacgagcatattgatgaaataaaacagcctaagctgaaagcatcgctgattgaatataaggatcaggcgtttttaagccgtaagctgggtactattgtaagaaatctggagctgtgtgcttcgctggaggatctgaaaagaaaagaaataaaccgcaaagagcttttgaatgttttcagaaaactcgaatttgaaagtatcatatcaaaaatgaatcttgcttccgctgaggtgacagaattacctcccgcgccggaagagcttaaaataacccatatttcagcggcagaggatcttaagaaatggattgcttacctgcttaaccagaaaaacatttccgtccttcaactgattgaccgggaggattcatacagttcccgtctttcagggctggctttgtgcaccggggatgaggttttttatatcgagaccgggactgcactccccgagaatttgattgcaacagagctgaaagaactgtggcagaatgaaaatattcacaaaatcggacacaatataaaagaatttataacctggctgctgaaacacgatgttgaactgaacggcctttatttcgacactatgattgccgaatacctgatagattccataagaaacggctatcctatagcaagcctttctcacaaatacctgaatcgcagcgttccgtcgctggacgaacttttgggcaagggaaagggagcaaaaaagtactctgaaattccgcccgaaaggctgaaagattacagcgcttataacgtcaaagccatttttgacatatggccgatgcagaaaaaagttcttcaggaaaaccggcaggaggagctttttaatgacatagagcttcctcttataaccgtacttgccagtatggaataccacggtttcaaagttgacgccgcaaaacttcacgaatacggcgaagttcttctgtcacgcataaaagacctggaaaaggtaatttacatgctggccggtgaagaattcaacatcaattcaacgaagcagcttggtaccatattattcgaaaaactgaagcttcccgttgtaaaaagtacaaagaccggatactccaccgacgtcgaggttcttgaagagctttattacaagcatgatataataccatgcataatagaataccgccttcttacaaaactttacaccacctacgccgaaggtcttgaaaaagtgataaatcctgtaaccggtaaaattcattcaagttttaaccagacggttacggctacaggccgcatcagcagtaccgaaccaaatttacagaatatcccagtcagacacgaaatgggaagggaaatacggaaagcttttattccgtcgtcggaaaacgctgtttttgttgatgccgattattcacagatagagcttcgcgtgcttgcccatataacaggcgatgaagccctgataaatgctttcgttaagggggaagatattcatacggccacggcgtcgctggtatttgacgtagctcccgaagatgtgacgccggaactgcgcagaaaggcaaaagccgtaaatttcggcatagtgtacgggatcagtgattacgggctggcacgggatttgggaattacccggaaggaagcaaagcggtatatagacgactattttgccaaataccccaaagtaaaaacctatgtggatgaaattgtgcgggtcggccaggaacaggggtatgtggaaactctgttccacagaagaagataccttcccgagcttgcatctaaaaattttcaccagcgttctttcggaaaaagggttgcaatgaatacgcccatacagggcactgcagccgatattattaaaattgcgatggtgaaggtatacaaggctttgaaagaatccggccttaaatccaggcttatcctccaggtccatgacgaacttgttattgagacttttgaagacgaactggagactgtcaaggaacttgtcaaaaagtgcatggaagaggccgttgaattgagtgtgccgcttgttgtcgacgtttcaatcgggaaaaactggtatgaagcctcctgatatggatcc

SEQ ID NO: 490 - DNA, 2772 bp, Artificial Sequence
  Description of Artificial Sequence: Synthetic Clostridium stercorarium DNA Polymerase Q623M
atgaaatacctgctgccgaccgctgctgctggtctgctgctcctcgctgcccagccggcgatggccatggatccaaaaataatccttatagacggaaacagtattttaaaccgcggtttttatgccctgtcggggcgatccatgctgactacgtccacaggtctgtataccaatgcggttttcgcttttgtaaatatattgaacaaatatatcgaagaggaaaaccctgattatattgccgttgctttcgatcttagggcaaaaactttccggcacggtctatatgagggatacaaagcgcagcggaaaggcatgcccgatgaacttgcaatgcagatacccctcgcgaaggaagtactgagggcgatgaatattgccataatagagcatgaaggttatgaagccgacgatataatcggcagcctttcgttaaaggccgaaaaagagaattttgacgtaataatccttacgggggacagggattctttccagctgatcagcgacagggtgaaagttatcctgccttcgacgaaagccggaaaaacagagaccaacgtatatgataaacaggccatcattgacaaatacggagttttaccccatcagcttattgacgttaaaggcttaatgggagattcgtcagataatatacccggcgttccgggagtgggtgagaaaacggcgttaagccttatttcagcctacggtacactggaaggtgtttacgagcatattgatgaaataaaacagcctaagctgaaagcatcgctgattgaatataaggatcaggcgtttttaagccgtaagctgggtactattgtaagaaatctggagctgtgtgcttcgctggaggatctgaaaagaaaagaaataaaccgcaaagagcttttgaatgttttcagaaaactcgaatttgaaagtatcatatcaaaaatgaatcttgcttccgctgaggtgacagaattacctcccgcgccggaagagcttaaaataacccatatttcagcggcagaggatcttaagaaatggattgcttacctgcttaaccagaaaaacatttccgtccttcaactgattgaccgggaggattcatacagttcccgtctttcagggctggctttgtgcaccggggatgaggttttttatatcgagaccgggactgcactccccgagaatttgattgcaacagagctgaaagaactgtggcagaatgaaaatattcacaaaatcggacacaatataaaagaatttataacctggctgctgaaacacgatgttgaactgaacggcctttatttcgacactatgattgccgaatacctgatagattccataagaaacggctatcctatagcaagcctttctcacaaatacctgaatcgcagcgttccgtcgctggacgaacttttgggcaagggaaagggagcaaaaaagtactctgaaattccgcccgaaaggctgaaagattacagcgcttataacgtcaaagccatttttgacatatggccgatgcagaaaaaagttcttcaggaaaaccggcaggaggagctttttaatgacatagagcttcctcttataaccgtacttgccagtatggaataccacggtttcaaagttgacgccgcaaaacttcacgaatacggcgaagttcttctgtcacgcataaaagacctggaaaaggtaatttacatgctggccggtgaagaattcaacatcaattcaacgaagcagcttggtaccatattattcgaaaaactgaagcttcccgttgtaaaaagtacaaagaccggatactccaccgacgtcgaggttcttgaagagctttattacaagcatgatataataccatgcataatagaataccgcatgcttacaaaactttacaccacctacgccgaaggtcttgaaaaagtgataaatcctgtaaccggtaaaattcattcaagttttaaccagacggttacggctacaggccgcatcagcagtaccgaaccaaatttacagaatatcccagtcagacacgaaatgggaagggaaatacggaaagcttttattccgtcgtcggaaaacgctgtttttgttgatgccgattattcacagatagagcttcgcgtgcttgcccatataacaggcgatgaagccctgataaatgctttcgttaagggggaagatattcatacggccacggcgtcgctggtatttgacgtagctcccgaagatgtgacgccggaactgcgcagaaaggcaaaagccgtaaatttcggcatagtgtacgggatcagtgattacgggctggcacgggatttgggaattacccggaaggaagcaaagcggtatatagacgactattttgccaaataccccaaagtaaaaacctatgtggatgaaattgtgcgggtcggccaggaacaggggtatgtggaaactctgttccacagaagaagataccttcccgagcttgcatctaaaaattttcaccagcgttctttcggaaaaagggttgcaatgaatacgcccatacagggcactgcagccgatattattaaaattgcgatggtgaaggtatacaaggctttgaaagaatccggccttaaatccaggcttatcctccaggtccatgacgaacttgttattgagacttttgaagacgaactggagactgtcaaggaacttgtcaaaaagtgcatggaagaggccgttgaattgagtgtgccgcttgttgtcgacgtttcaatcgggaaaaactggtatgaagcctcctgatatggatcc

SEQ ID NO: 491 - DNA, 2772 bp, Artificial Sequence
  Description of Artificial Sequence: Synthetic Clostridium stercorarium DNA Polymerase Q623N
atgaaatacctgctgccgaccgctgctgctggtctgctgctcctcgctgcccagccggcgatggccatggatccaaaaataatccttatagacggaaacagtattttaaaccgcggtttttatgccctgtcggggcgatccatgctgactacgtccacaggtctgtataccaatgcggttttcgcttttgtaaatatattgaacaaatatatcgaagaggaaaaccctgattatattgccgttgctttcgatcttagggcaaaaactttccggcacggtctatatgagggatacaaagcgcagcggaaaggcatgcccgatgaacttgcaatgcagatacccctcgcgaaggaagtactgagggcgatgaatattgccataatagagcatgaaggttatgaagccgacgatataatcggcagcctttcgttaaaggccgaaaaagagaattttgacgtaataatccttacgggggacagggattctttccagctgatcagcgacagggtgaaagttatcctgccttcgacgaaagccggaaaaacagagaccaacgtatatgataaacaggccatcattgacaaatacggagttttaccccatcagcttattgacgttaaaggcttaatgggagattcgtcagataatatacccggcgttccgggagtgggtgagaaaacggcgttaagccttatttcagcctacggtacactggaaggtgtttacgagcatattgatgaaataaaacagcctaagctgaaagcatcgctgattgaatataaggatcaggcgtttttaagccgtaagctgggtactattgtaagaaatctggagctgtgtgcttcgctggaggatctgaaaagaaaagaaataaaccgcaaagagcttttgaatgttttcagaaaactcgaatttgaaagtatcatatcaaaaatgaatcttgcttccgctgaggtgacagaattacctcccgcgccggaagagcttaaaataacccatatttcagcggcagaggatcttaagaaatggattgcttacctgcttaaccagaaaaacatttccgtccttcaactgattgaccgggaggattcatacagttcccgtctttcagggctggctttgtgcaccggggatgaggttttttatatcgagaccgggactgcactccccgagaatttgattgcaacagagctgaaagaactgtggcagaatgaaaatattcacaaaatcggacacaatataaaagaatttataacctggctgctgaaacacgatgttgaactgaacggcctttatttcgacactatgattgccgaatacctgatagattccataagaaacggctatcctatagcaagcctttctcacaaatacctgaatcgcagcgttccgtcgctggacgaacttttgggcaagggaaagggagcaaaaaagtactctgaaattccgcccgaaaggctgaaagattacagcgcttataacgtcaaagccatttttgacatatggccgatgcagaaaaaagttcttcaggaaaaccggcaggaggagctttttaatgacatagagcttcctcttataaccgtacttgccagtatggaataccacggtttcaaagttgacgccgcaaaacttcacgaatacggcgaagttcttctgtcacgcataaaagacctggaaaaggtaatttacatgctggccggtgaagaattcaacatcaattcaacgaagcagcttggtaccatattattcgaaaaactgaagcttcccgttgtaaaaagtacaaagaccggatactccaccgacgtcgaggttcttgaagagctttattacaagcatgatataataccatgcataatagaataccgcaatcttacaaaactttacaccacctacgccgaaggtcttgaaaaagtgataaatcctgtaaccggtaaaattcattcaagttttaaccagacggttacggctacaggccgcatcagcagtaccgaaccaaatttacagaatatcccagtcagacacgaaatgggaagggaaatacggaaagcttttattccgtcgtcggaaaacgctgtttttgttgatgccgattattcacagatagagcttcgcgtgcttgcccatataacaggcgatgaagccctgataaatgctttcgttaagggggaagatattcatacggccacggcgtcgctggtatttgacgtagctcccgaagatgtgacgccggaactgcgcagaaaggcaaaagccgtaaatttcggcatagtgtacgggatcagtgattacgggctggcacgggatttgggaattacccggaaggaagcaaagcggtatatagacgactattttgccaaataccccaaagtaaaaacctatgtggatgaaattgtgcgggtcggccaggaacaggggtatgtggaaactctgttccacagaagaagataccttcccgagcttgcatctaaaaattttcaccagcgttctttcggaaaaagggttgcaatgaatacgcccatacagggcactgcagccgatattattaaaattgcgatggtgaaggtatacaaggctttgaaagaatccggccttaaatccaggcttatcctccaggtccatgacgaacttgttattgagacttttgaagacgaactggagactgtcaaggaacttgtcaaaaagtgcatggaagaggccgttgaattgagtgtgccgcttgttgtcgacgtttcaatcgggaaaaactggtatgaagcctcctgatatggatcc

SEQ ID NO: 492 - DNA, 2772 bp, Artificial Sequence
  Description of Artificial Sequence: Synthetic Clostridium stercorarium DNA Polymerase Q623P
atgaaatacctgctgccgaccgctgctgctggtctgctgctcctcgctgcccagccggcgatggccatggatccaaaaataatccttatagacggaaacagtattttaaaccgcggtttttatgccctgtcggggcgatccatgctgactacgtccacaggtctgtataccaatgcggttttcgcttttgtaaatatattgaacaaatatatcgaagaggaaaaccctgattatattgccgttgctttcgatcttagggcaaaaactttccggcacggtctatatgagggatacaaagcgcagcggaaaggcatgcccgatgaacttgcaatgcagatacccctcgcgaaggaagtactgagggcgatgaatattgccataatagagcatgaaggttatgaagccgacgatataatcggcagcctttcgttaaaggccgaaaaagagaattttgacgtaataatccttacgggggacagggattctttccagctgatcagcgacagggtgaaagttatcctgccttcgacgaaagccggaaaaacagagaccaacgtatatgataaacaggccatcattgacaaatacggagttttaccccatcagcttattgacgttaaaggcttaatgggagattcgtcagataatatacccggcgttccgggagtgggtgagaaaacggcgttaagccttatttcagcctacggtacactggaaggtgtttacgagcatattgatgaaataaaacagcctaagctgaaagcatcgctgattgaatataaggatcaggcgtttttaagccgtaagctgggtactattgtaagaaatctggagctgtgtgcttcgctggaggatctgaaaagaaaagaaataaaccgcaaagagcttttgaatgttttcagaaaactcgaatttgaaagtatcatatcaaaaatgaatcttgcttccgctgaggtgacagaattacctcccgcgccggaagagcttaaaataacccatatttcagcggcagaggatcttaagaaatggattgcttacctgcttaaccagaaaaacatttccgtccttcaactgattgaccgggaggattcatacagttcccgtctttcagggctggctttgtgcaccggggatgaggttttttatatcgagaccgggactgcactccccgagaatttgattgcaacagagctgaaagaactgtggcagaatgaaaatattcacaaaatcggacacaatataaaagaatttataacctggctgctgaaacacgatgttgaactgaacggcctttatttcgacactatgattgccgaatacctgatagattccataagaaacggctatcctatagcaagcctttctcacaaatacctgaatcgcagcgttccgtcgctggacgaacttttgggcaagggaaagggagcaaaaaagtactctgaaattccgcccgaaaggctgaaagattacagcgcttataacgtcaaagccatttttgacatatggccgatgcagaaaaaagttcttcaggaaaaccggcaggaggagctttttaatgacatagagcttcctcttataaccgtacttgccagtatggaataccacggtttcaaagttgacgccgcaaaacttcacgaatacggcgaagttcttctgtcacgcataaaagacctggaaaaggtaatttacatgctggccggtgaagaattcaacatcaattcaacgaagcagcttggtaccatattattcgaaaaactgaagcttcccgttgtaaaaagtacaaagaccggatactccaccgacgtcgaggttcttgaagagctttattacaagcatgatataataccatgcataatagaataccgccctcttacaaaactttacaccacctacgccgaaggtcttgaaaaagtgataaatcctgtaaccggtaaaattcattcaagttttaaccagacggttacggctacaggccgcatcagcagtaccgaaccaaatttacagaatatcccagtcagacacgaaatgggaagggaaatacggaaagcttttattccgtcgtcggaaaacgctgtttttgttgatgccgattattcacagatagagcttcgcgtgcttgcccatataacaggcgatgaagccctgataaatgctttcgttaagggggaagatattcatacggccacggcgtcgctggtatttgacgtagctcccgaagatgtgacgccggaactgcgcagaaaggcaaaagccgtaaatttcggcatagtgtacgggatcagtgattacgggctggcacgggatttgggaattacccggaaggaagcaaagcggtatatagacgactattttgccaaataccccaaagtaaaaacctatgtggatgaaattgtgcgggtcggccaggaacaggggtatgtggaaactctgttccacagaagaagataccttcccgagcttgcatctaaaaattttcaccagcgttctttcggaaaaagggttgcaatgaatacgcccatacagggcactgcagccgatattattaaaattgcgatggtgaaggtatacaaggctttgaaagaatccggccttaaatccaggcttatcctccaggtccatgacgaacttgttattgagacttttgaagacgaactggagactgtcaaggaacttgtcaaaaagtgcatggaagaggccgttgaattgagtgtgccgcttgttgtcgacgtttcaatcgggaaaaactggtatgaagcctcctgatatggatcc

SEQ ID NO: 493 - DNA, 2772 bp, Artificial Sequence
  Description of Artificial Sequence: Synthetic Clostridium stercorarium DNA Polymerase Q623R
atgaaatacctgctgccgaccgctgctgctggtctgctgctcctcgctgcccagccggcgatggccatggatccaaaaataatccttatagacggaaacagtattttaaaccgcggtttttatgccctgtcggggcgatccatgctgactacgtccacaggtctgtataccaatgcggttttcgcttttgtaaatatattgaacaaatatatcgaagaggaaaaccctgattatattgccgttgctttcgatcttagggcaaaaactttccggcacggtctatatgagggatacaaagcgcagcggaaaggcatgcccgatgaacttgcaatgcagatacccctcgcgaaggaagtactgagggcgatgaatattgccataatagagcatgaaggttatgaagccgacgatataatcggcagcctttcgttaaaggccgaaaaagagaattttgacgtaataatccttacgggggacagggattctttccagctgatcagcgacagggtgaaagttatcctgccttcgacgaaagccggaaaaacagagaccaacgtatatgataaacaggccatcattgacaaatacggagttttaccccatcagcttattgacgttaaaggcttaatgggagattcgtcagataatatacccggcgttccgggagtgggtgagaaaacggcgttaagccttatttcagcctacggtacactggaaggtgtttacgagcatattgatgaaataaaacagcctaagctgaaagcatcgctgattgaatataaggatcaggcgtttttaagccgtaagctgggtactattgtaagaaatctggagctgtgtgcttcgctggaggatctgaaaagaaaagaaataaaccgcaaagagcttttgaatgttttcagaaaactcgaatttgaaagtatcatatcaaaaatgaatcttgcttccgctgaggtgacagaattacctcccgcgccggaagagcttaaaataacccatatttcagcggcagaggatcttaagaaatggattgcttacctgcttaaccagaaaaacatttccgtccttcaactgattgaccgggaggattcatacagttcccgtctttcagggctggctttgtgcaccggggatgaggttttttatatcgagaccgggactgcactccccgagaatttgattgcaacagagctgaaagaactgtggcagaatgaaaatattcacaaaatcggacacaatataaaagaatttataacctggctgctgaaacacgatgttgaactgaacggcctttatttcgacactatgattgccgaatacctgatagattccataagaaacggctatcctatagcaagcctttctcacaaatacctgaatcgcagcgttccgtcgctggacgaacttttgggcaagggaaagggagcaaaaaagtactctgaaattccgcccgaaaggctgaaagattacagcgcttataacgtcaaagccatttttgacatatggccgatgcagaaaaaagttcttcaggaaaaccggcaggaggagctttttaatgacatagagcttcctcttataaccgtacttgccagtatggaataccacggtttcaaagttgacgccgcaaaacttcacgaatacggcgaagttcttctgtcacgcataaaagacctggaaaaggtaatttacatgctggccggtgaagaattcaacatcaattcaacgaagcagcttggtaccatattattcgaaaaactgaagcttcccgttgtaaaaagtacaaagaccggatactccaccgacgtcgaggttcttgaagagctttattacaagcatgatataataccatgcataatagaataccgccgtcttacaaaactttacaccacctacgccgaaggtcttgaaaaagtgataaatcctgtaaccggtaaaattcattcaagttttaaccagacggttacggctacaggccgcatcagcagtaccgaaccaaatttacagaatatcccagtcagacacgaaatgggaagggaaatacggaaagcttttattccgtcgtcggaaaacgctgtttttgttgatgccgattattcacagatagagcttcgcgtgcttgcccatataacaggcgatgaagccctgataaatgctttcgttaagggggaagatattcatacggccacggcgtcgctggtatttgacgtagctcccgaagatgtgacgccggaactgcgcagaaaggcaaaagccgtaaatttcggcatagtgtacgggatcagtgattacgggctggcacgggatttgggaattacccggaaggaagcaaagcggtatatagacgactattttgccaaataccccaaagtaaaaacctatgtggatgaaattgtgcgggtcggccaggaacaggggtatgtggaaactctgttccacagaagaagataccttcccgagcttgcatctaaaaattttcaccagcgttctttcggaaaaagggttgcaatgaatacgcccatacagggcactgcagccgatattattaaaattgcgatggtgaaggtatacaaggctttgaaagaatccggccttaaatccaggcttatcctccaggtccatgacgaacttgttattgagacttttgaagacgaactggagactgtcaaggaacttgtcaaaaagtgcatggaagaggccgttgaattgagtgtgccgcttgttgtcgacgtttcaatcgggaaaaactggtatgaagcctcctgatatggatcc

SEQ ID NO: 494 - DNA, 2772 bp, Artificial Sequence
  Description of Artificial Sequence: Synthetic Clostridium stercorarium DNA Polymerase Q623S
atgaaatacctgctgccgaccgctgctgctggtctgctgctcctcgctgcccagccggcgatggccatggatccaaaaataatccttatagacggaaacagtattttaaaccgcggtttttatgccctgtcggggcgatccatgctgactacgtccacaggtctgtataccaatgcggttttcgcttttgtaaatatattgaacaaatatatcgaagaggaaaaccctgattatattgccgttgctttcgatcttagggcaaaaactttccggcacggtctatatgagggatacaaagcgcagcggaaaggcatgcccgatgaacttgcaatgcagatacccctcgcgaaggaagtactgagggcgatgaatattgccataatagagcatgaaggttatgaagccgacgatataatcggcagcctttcgttaaaggccgaaaaagagaattttgacgtaataatccttacgggggacagggattctttccagctgatcagcgacagggtgaaagttatcctgccttcgacgaaagccggaaaaacagagaccaacgtatatgataaacaggccatcattgacaaatacggagttttaccccatcagcttattgacgttaaaggcttaatgggagattcgtcagataatatacccggcgttccgggagtgggtgagaaaacggcgttaagccttatttcagcctacggtacactggaaggtgtttacgagcatattgatgaaataaaacagcctaagctgaaagcatcgctgattgaatataaggatcaggcgtttttaagccgtaagctgggtactattgtaagaaatctggagctgtgtgcttcgctggaggatctgaaaagaaaagaaataaaccgcaaagagcttttgaatgttttcagaaaactcgaatttgaaagtatcatatcaaaaatgaatcttgcttccgctgaggtgacagaattacctcccgcgccggaagagcttaaaataacccatatttcagcggcagaggatcttaagaaatggattgcttacctgcttaaccagaaaaacatttccgtccttcaactgattgaccgggaggattcatacagttcccgtctttcagggctggctttgtgcaccggggatgaggttttttatatcgagaccgggactgcactccccgagaatttgattgcaacagagctgaaagaactgtggcagaatgaaaatattcacaaaatcggacacaatataaaagaatttataacctggctgctgaaacacgatgttgaactgaacggcctttatttcgacactatgattgccgaatacctgatagattccataagaaacggctatcctatagcaagcctttctcacaaatacctgaatcgcagcgttccgtcgctggacgaacttttgggcaagggaaagggagcaaaaaagtactctgaaattccgcccgaaaggctgaaagattacagcgcttataacgtcaaagccatttttgacatatggccgatgcagaaaaaagttcttcaggaaaaccggcaggaggagctttttaatgacatagagcttcctcttataaccgtacttgccagtatggaataccacggtttcaaagttgacgccgcaaaacttcacgaatacggcgaagttcttctgtcacgcataaaagacctggaaaaggtaatttacatgctggccggtgaagaattcaacatcaattcaacgaagcagcttggtaccatattattcgaaaaactgaagcttcccgttgtaaaaagtacaaagaccggatactccaccgacgtcgaggttcttgaagagctttattacaagcatgatataataccatgcataatagaataccgctctcttacaaaactttacaccacctacgccgaaggtcttgaaaaagtgataaatcctgtaaccggtaaaattcattcaagttttaaccagacggttacggctacaggccgcatcagcagtaccgaaccaaatttacagaatatcccagtcagacacgaaatgggaagggaaatacggaaagcttttattccgtcgtcggaaaacgctgtttttgttgatgccgattattcacagatagagcttcgcgtgcttgcccatataacaggcgatgaagccctgataaatgctttcgttaagggggaagatattcatacggccacggcgtcgctggtatttgacgtagctcccgaagatgtgacgccggaactgcgcagaaaggcaaaagccgtaaatttcggcatagtgtacgggatcagtgattacgggctggcacgggatttgggaattacccggaaggaagcaaagcggtatatagacgactattttgccaaataccccaaagtaaaaacctatgtggatgaaattgtgcgggtcggccaggaacaggggtatgtggaaactctgttccacagaagaagataccttcccgagcttgcatctaaaaattttcaccagcgttctttcggaaaaagggttgcaatgaatacgcccatacagggcactgcagccgatattattaaaattgcgatggtgaaggtatacaaggctttgaaagaatccggccttaaatccaggcttatcctccaggtccatgacgaacttgttattgagacttttgaagacgaactggagactgtcaaggaacttgtcaaaaagtgcatggaagaggccgttgaattgagtgtgccgcttgttgtcgacgtttcaatcgggaaaaactggtatgaagcctcctgatatggatcc

SEQ ID NO: 495 - DNA, 2772 bp, Artificial Sequence
  Description of Artificial Sequence: Synthetic Clostridium stercorarium DNA Polymerase Q623T
atgaaatacctgctgccgaccgctgctgctggtctgctgctcctcgctgcccagccggcgatggccatggatccaaaaataatccttatagacggaaacagtattttaaaccgcggtttttatgccctgtcggggcgatccatgctgactacgtccacaggtctgtataccaatgcggttttcgcttttgtaaatatattgaacaaatatatcgaagaggaaaaccctgattatattgccgttgctttcgatcttagggcaaaaactttccggcacggtctatatgagggatacaaagcgcagcggaaaggcatgcccgatgaacttgcaatgcagatacccctcgcgaaggaagtactgagggcgatgaatattgccataatagagcatgaaggttatgaagccgacgatataatcggcagcctttcgttaaaggccgaaaaagagaattttgacgtaataatccttacgggggacagggattctttccagctgatcagcgacagggtgaaagttatcctgccttcgacgaaagccggaaaaacagagaccaacgtatatgataaacaggccatcattgacaaatacggagttttaccccatcagcttattgacgttaaaggcttaatgggagattcgtcagataatatacccggcgttccgggagtgggtgagaaaacggcgttaagccttatttcagcctacggtacactggaaggtgtttacgagcatattgatgaaataaaacagcctaagctgaaagcatcgctgattgaatataaggatcaggcgtttttaagccgtaagctgggtactattgtaagaaatctggagctgtgtgcttcgctggaggatctgaaaagaaaagaaataaaccgcaaagagcttttgaatgttttcagaaaactcgaatttgaaagtatcatatcaaaaatgaatcttgcttccgctgaggtgacagaattacctcccgcgccggaagagcttaaaataacccatatttcagcggcagaggatcttaagaaatggattgcttacctgcttaaccagaaaaacatttccgtccttcaactgattgaccgggaggattcatacagttcccgtctttcagggctggctttgtgcaccggggatgaggttttttatatcgagaccgggactgcactccccgagaatttgattgcaacagagctgaaagaactgtggcagaatgaaaatattcacaaaatcggacacaatataaaagaatttataacctggctgctgaaacacgatgttgaactgaacggcctttatttcgacactatgattgccgaatacctgatagattccataagaaacggctatcctatagcaagcctttctcacaaatacctgaatcgcagcgttccgtcgctggacgaacttttgggcaagggaaagggagcaaaaaagtactctgaaattccgcccgaaaggctgaaagattacagcgcttataacgtcaaagccatttttgacatatggccgatgcagaaaaaagttcttcaggaaaaccggcaggaggagctttttaatgacatagagcttcctcttataaccgtacttgccagtatggaataccacggtttcaaagttgacgccgcaaaacttcacgaatacggcgaagttcttctgtcacgcataaaagacctggaaaaggtaatttacatgctggccggtgaagaattcaacatcaattcaacgaagcagcttggtaccatattattcgaaaaactgaagcttcccgttgtaaaaagtacaaagaccggatactccaccgacgtcgaggttcttgaagagctttattacaagcatgatataataccatgcataatagaataccgcactcttacaaaactttacaccacctacgccgaaggtcttgaaaaagtgataaatcctgtaaccggtaaaattcattcaagttttaaccagacggttacggctacaggccgcatcagcagtaccgaaccaaatttacagaatatcccagtcagacacgaaatgggaagggaaatacggaaagcttttattccgtcgtcggaaaacgctgtttttgttgatgccgattattcacagatagagcttcgcgtgcttgcccatataacaggcgatgaagccctgataaatgctttcgttaagggggaagatattcatacggccacggcgtcgctggtatttgacgtagctcccgaagatgtgacgccggaactgcgcagaaaggcaaaagccgtaaatttcggcatagtgtacgggatcagtgattacgggctggcacgggatttgggaattacccggaaggaagcaaagcggtatatagacgactattttgccaaataccccaaagtaaaaacctatgtggatgaaattgtgcgggtcggccaggaacaggggtatgtggaaactctgttccacagaagaagataccttcccgagcttgcatctaaaaattttcaccagcgttctttcggaaaaagggttgcaatgaatacgcccatacagggcactgcagccgatattattaaaattgcgatggtgaaggtatacaaggctttgaaagaatccggccttaaatccaggcttatcctccaggtccatgacgaacttgttattgagacttttgaagacgaactggagactgtcaaggaacttgtcaaaaagtgcatggaagaggccgttgaattgagtgtgccgcttgttgtcgacgtttcaatcgggaaaaactggtatgaagcctcctgatatggatcc

SEQ ID NO: 496 - DNA, 2772 bp, Artificial Sequence
  Description of Artificial Sequence: Synthetic Clostridium stercorarium DNA Polymerase Q623V
atgaaatacctgctgccgaccgctgctgctggtctgctgctcctcgctgcccagccggcgatggccatggatccaaaaataatccttatagacggaaacagtattttaaaccgcggtttttatgccctgtcggggcgatccatgctgactacgtccacaggtctgtataccaatgcggttttcgcttttgtaaatatattgaacaaatatatcgaagaggaaaaccctgattatattgccgttgctttcgatcttagggcaaaaactttccggcacggtctatatgagggatacaaagcgcagcggaaaggcatgcccgatgaacttgcaatgcagatacccctcgcgaaggaagtactgagggcgatgaatattgccataatagagcatgaaggttatgaagccgacgatataatcggcagcctttcgttaaaggccgaaaaagagaattttgacgtaataatccttacgggggacagggattctttccagctgatcagcgacagggtgaaagttatcctgccttcgacgaaagccggaaaaacagagaccaacgtatatgataaacaggccatcattgacaaatacggagttttaccccatcagcttattgacgttaaaggcttaatgggagattcgtcagataatatacccggcgttccgggagtgggtgagaaaacggcgttaagccttatttcagcctacggtacactggaaggtgtttacgagcatattgatgaaataaaacagcctaagctgaaagcatcgctgattgaatataaggatcaggcgtttttaagccgtaagctgggtactattgtaagaaatctggagctgtgtgcttcgctggaggatctgaaaagaaaagaaataaaccgcaaagagcttttgaatgttttcagaaaactcgaatttgaaagtatcatatcaaaaatgaatcttgcttccgctgaggtgacagaattacctcccgcgccggaagagcttaaaataacccatatttcagcggcagaggatcttaagaaatggattgcttacctgcttaaccagaaaaacatttccgtccttcaactgattgaccgggaggattcatacagttcccgtctttcagggctggctttgtgcaccggggatgaggttttttatatcgagaccgggactgcactccccgagaatttgattgcaacagagctgaaagaactgtggcagaatgaaaatattcacaaaatcggacacaatataaaagaatttataacctggctgctgaaacacgatgttgaactgaacggcctttatttcgacactatgattgccgaatacctgatagattccataagaaacggctatcctatagcaagcctttctcacaaatacctgaatcgcagcgttccgtcgctggacgaacttttgggcaagggaaagggagcaaaaaagtactctgaaattccgcccgaaaggctgaaagattacagcgcttataacgtcaaagccatttttgacatatggccgatgcagaaaaaagttcttcaggaaaaccggcaggaggagctttttaatgacatagagcttcctcttataaccgtacttgccagtatggaataccacggtttcaaagttgacgccgcaaaacttcacgaatacggcgaagttcttctgtcacgcataaaagacctggaaaaggtaatttacatgctggccggtgaagaattcaacatcaattcaacgaagcagcttggtaccatattattcgaaaaactgaagcttcccgttgtaaaaagtacaaagaccggatactccaccgacgtcgaggttcttgaagagctttattacaagcatgatataataccatgcataatagaataccgcgttcttacaaaactttacaccacctacgccgaaggtcttgaaaaagtgataaatcctgtaaccggtaaaattcattcaagttttaaccagacggttacggctacaggccgcatcagcagtaccgaaccaaatttacagaatatcccagtcagacacgaaatgggaagggaaatacggaaagcttttattccgtcgtcggaaaacgctgtttttgttgatgccgattattcacagatagagcttcgcgtgcttgcccatataacaggcgatgaagccctgataaatgctttcgttaagggggaagatattcatacggccacggcgtcgctggtatttgacgtagctcccgaagatgtgacgccggaactgcgcagaaaggcaaaagccgtaaatttcggcatagtgtacgggatcagtgattacgggctggcacgggatttgggaattacccggaaggaagcaaagcggtatatagacgactattttgccaaataccccaaagtaaaaacctatgtggatgaaattgtgcgggtcggccaggaacaggggtatgtggaaactctgttccacagaagaagataccttcccgagcttgcatctaaaaattttcaccagcgttctttcggaaaaagggttgcaatgaatacgcccatacagggcactgcagccgatattattaaaattgcgatggtgaaggtatacaaggctttgaaagaatccggccttaaatccaggcttatcctccaggtccatgacgaacttgttattgagacttttgaagacgaactggagactgtcaaggaacttgtcaaaaagtgcatggaagaggccgttgaattgagtgtgccgcttgttgtcgacgtttcaatcgggaaaaactggtatgaagcctcctgatatggatcc

SEQ ID NO: 497 - DNA, 2772 bp, Artificial Sequence
  Description of Artificial Sequence: Synthetic Clostridium stercorarium DNA Polymerase Q623W
atgaaatacctgctgccgaccgctgctgctggtctgctgctcctcgctgcccagccggcgatggccatggatccaaaaataatccttatagacggaaacagtattttaaaccgcggtttttatgccctgtcggggcgatccatgctgactacgtccacaggtctgtataccaatgcggttttcgcttttgtaaatatattgaacaaatatatcgaagaggaaaaccctgattatattgccgttgctttcgatcttagggcaaaaactttccggcacggtctatatgagggatacaaagcgcagcggaaaggcatgcccgatgaacttgcaatgcagatacccctcgcgaaggaagtactgagggcgatgaatattgccataatagagcatgaaggttatgaagccgacgatataatcggcagcctttcgttaaaggccgaaaaagagaattttgacgtaataatccttacgggggacagggattctttccagctgatcagcgacagggtgaaagttatcctgccttcgacgaaagccggaaaaacagagaccaacgtatatgataaacaggccatcattgacaaatacggagttttaccccatcagcttattgacgttaaaggcttaatgggagattcgtcagataatatacccggcgttccgggagtgggtgagaaaacggcgttaagccttatttcagcctacggtacactggaaggtgtttacgagcatattgatgaaataaaacagcctaagctgaaagcatcgctgattgaatataaggatcaggcgtttttaagccgtaagctgggtactattgtaagaaatctggagctgtgtgcttcgctggaggatctgaaaagaaaagaaataaaccgcaaagagcttttgaatgttttcagaaaactcgaatttgaaagtatcatatcaaaaatgaatcttgcttccgctgaggtgacagaattacctcccgcgccggaagagcttaaaataacccatatttcagcggcagaggatcttaagaaatggattgcttacctgcttaaccagaaaaacatttccgtccttcaactgattgaccgggaggattcatacagttcccgtctttcagggctggctttgtgcaccggggatgaggttttttatatcgagaccgggactgcactccccgagaatttgattgcaacagagctgaaagaactgtggcagaatgaaaatattcacaaaatcggacacaatataaaagaatttataacctggctgctgaaacacgatgttgaactgaacggcctttatttcgacactatgattgccgaatacctgatagattccataagaaacggctatcctatagcaagcctttctcacaaatacctgaatcgcagcgttccgtcgctggacgaacttttgggcaagggaaagggagcaaaaaagtactctgaaattccgcccgaaaggctgaaagattacagcgcttataacgtcaaagccatttttgacatatggccgatgcagaaaaaagttcttcaggaaaaccggcaggaggagctttttaatgacatagagcttcctcttataaccgtacttgccagtatggaataccacggtttcaaagttgacgccgcaaaacttcacgaatacggcgaagttcttctgtcacgcataaaagacctggaaaaggtaatttacatgctggccggtgaagaattcaacatcaattcaacgaagcagcttggtaccatattattcgaaaaactgaagcttcccgttgtaaaaagtacaaagaccggatactccaccgacgtcgaggttcttgaagagctttattacaagcatgatataataccatgcataatagaataccgctggcttacaaaactttacaccacctacgccgaaggtcttgaaaaagtgataaatcctgtaaccggtaaaattcattcaagttttaaccagacggttacggctacaggccgcatcagcagtaccgaaccaaatttacagaatatcccagtcagacacgaaatgggaagggaaatacggaaagcttttattccgtcgtcggaaaacgctgtttttgttgatgccgattattcacagatagagcttcgcgtgcttgcccatataacaggcgatgaagccctgataaatgctttcgttaagggggaagatattcatacggccacggcgtcgctggtatttgacgtagctcccgaagatgtgacgccggaactgcgcagaaaggcaaaagccgtaaatttcggcatagtgtacgggatcagtgattacgggctggcacgggatttgggaattacccggaaggaagcaaagcggtatatagacgactattttgccaaataccccaaagtaaaaacctatgtggatgaaattgtgcgggtcggccaggaacaggggtatgtggaaactctgttccacagaagaagataccttcccgagcttgcatctaaaaattttcaccagcgttctttcggaaaaagggttgcaatgaatacgcccatacagggcactgcagccgatattattaaaattgcgatggtgaaggtatacaaggctttgaaagaatccggccttaaatccaggcttatcctccaggtccatgacgaacttgttattgagacttttgaagacgaactggagactgtcaaggaacttgtcaaaaagtgcatggaagaggccgttgaattgagtgtgccgcttgttgtcgacgtttcaatcgggaaaaactggtatgaagcctcctgatatggatcc

SEQ ID NO: 498 - DNA, 2772 bp, Artificial Sequence
  Description of Artificial Sequence: Synthetic Clostridium stercorarium DNA Polymerase Q623Y
atgaaatacctgctgccgaccgctgctgctggtctgctgctcctcgctgcccagccggcgatggccatggatccaaaaataatccttatagacggaaacagtattttaaaccgcggtttttatgccctgtcggggcgatccatgctgactacgtccacaggtctgtataccaatgcggttttcgcttttgtaaatatattgaacaaatatatcgaagaggaaaaccctgattatattgccgttgctttcgatcttagggcaaaaactttccggcacggtctatatgagggatacaaagcgcagcggaaaggcatgcccgatgaacttgcaatgcagatacccctcgcgaaggaagtactgagggcgatgaatattgccataatagagcatgaaggttatgaagccgacgatataatcggcagcctttcgttaaaggccgaaaaagagaattttgacgtaataatccttacgggggacagggattctttccagctgatcagcgacagggtgaaagttatcctgccttcgacgaaagccggaaaaacagagaccaacgtatatgataaacaggccatcattgacaaatacggagttttaccccatcagcttattgacgttaaaggcttaatgggagattcgtcagataatatacccggcgttccgggagtgggtgagaaaacggcgttaagccttatttcagcctacggtacactggaaggtgtttacgagcatattgatgaaataaaacagcctaagctgaaagcatcgctgattgaatataaggatcaggcgtttttaagccgtaagctgggtactattgtaagaaatctggagctgtgtgcttcgctggaggatctgaaaagaaaagaaataaaccgcaaagagcttttgaatgttttcagaaaactcgaatttgaaagtatcatatcaaaaatgaatcttgcttccgctgaggtgacagaattacctcccgcgccggaagagcttaaaataacccatatttcagcggcagaggatcttaagaaatggattgcttacctgcttaaccagaaaaacatttccgtccttcaactgattgaccgggaggattcatacagttcccgtctttcagggctggctttgtgcaccggggatgaggttttttatatcgagaccgggactgcactccccgagaatttgattgcaacagagctgaaagaactgtggcagaatgaaaatattcacaaaatcggacacaatataaaagaatttataacctggctgctgaaacacgatgttgaactgaacggcctttatttcgacactatgattgccgaatacctgatagattccataagaaacggctatcctatagcaagcctttctcacaaatacctgaatcgcagcgttccgtcgctggacgaacttttgggcaagggaaagggagcaaaaaagtactctgaaattccgcccgaaaggctgaaagattacagcgcttataacgtcaaagccatttttgacatatggccgatgcagaaaaaagttcttcaggaaaaccggcaggaggagctttttaatgacatagagcttcctcttataaccgtacttgccagtatggaataccacggtttcaaagttgacgccgcaaaacttcacgaatacggcgaagttcttctgtcacgcataaaagacctggaaaaggtaatttacatgctggccggtgaagaattcaacatcaattcaacgaagcagcttggtaccatattattcgaaaaactgaagcttcccgttgtaaaaagtacaaagaccggatactccaccgacgtcgaggttcttgaagagctttattacaagcatgatataataccatgcataatagaataccgctatcttacaaaactttacaccacctacgccgaaggtcttgaaaaagtgataaatcctgtaaccggtaaaattcattcaagttttaaccagacggttacggctacaggccgcatcagcagtaccgaaccaaatttacagaatatcccagtcagacacgaaatgggaagggaaatacggaaagcttttattccgtcgtcggaaaacgctgtttttgttgatgccgattattcacagatagagcttcgcgtgcttgcccatataacaggcgatgaagccctgataaatgctttcgttaagggggaagatattcatacggccacggcgtcgctggtatttgacgtagctcccgaagatgtgacgccggaactgcgcagaaaggcaaaagccgtaaatttcggcatagtgtacgggatcagtgattacgggctggcacgggatttgggaattacccggaaggaagcaaagcggtatatagacgactattttgccaaataccccaaagtaaaaacctatgtggatgaaattgtgcgggtcggccaggaacaggggtatgtggaaactctgttccacagaagaagataccttcccgagcttgcatctaaaaattttcaccagcgttctttcggaaaaagggttgcaatgaatacgcccatacagggcactgcagccgatattattaaaattgcgatggtgaaggtatacaaggctttgaaagaatccggccttaaatccaggcttatcctccaggtccatgacgaacttgttattgagacttttgaagacgaactggagactgtcaaggaacttgtcaaaaagtgcatggaagaggccgttgaattgagtgtgccgcttgttgtcgacgtttcaatcgggaaaaactggtatgaagcctcctgatatggatcc

SEQ ID NO: 499 - DNA, 2772 bp, Artificial Sequence
  Description of Artificial Sequence: Synthetic Clostridium stercorarium DNA Polymerase V654A
atgaaatacctgctgccgaccgctgctgctggtctgctgctcctcgctgcccagccggcgatggccatggatccaaaaataatccttatagacggaaacagtattttaaaccgcggtttttatgccctgtcggggcgatccatgctgactacgtccacaggtctgtataccaatgcggttttcgcttttgtaaatatattgaacaaatatatcgaagaggaaaaccctgattatattgccgttgctttcgatcttagggcaaaaactttccggcacggtctatatgagggatacaaagcgcagcggaaaggcatgcccgatgaacttgcaatgcagatacccctcgcgaaggaagtactgagggcgatgaatattgccataatagagcatgaaggttatgaagccgacgatataatcggcagcctttcgttaaaggccgaaaaagagaattttgacgtaataatccttacgggggacagggattctttccagctgatcagcgacagggtgaaagttatcctgccttcgacgaaagccggaaaaacagagaccaacgtatatgataaacaggccatcattgacaaatacggagttttaccccatcagcttattgacgttaaaggcttaatgggagattcgtcagataatatacccggcgttccgggagtgggtgagaaaacggcgttaagccttatttcagcctacggtacactggaaggtgtttacgagcatattgatgaaataaaacagcctaagctgaaagcatcgctgattgaatataaggatcaggcgtttttaagccgtaagctgggtactattgtaagaaatctggagctgtgtgcttcgctggaggatctgaaaagaaaagaaataaaccgcaaagagcttttgaatgttttcagaaaactcgaatttgaaagtatcatatcaaaaatgaatcttgcttccgctgaggtgacagaattacctcccgcgccggaagagcttaaaataacccatatttcagcggcagaggatcttaagaaatggattgcttacctgcttaaccagaaaaacatttccgtccttcaactgattgaccgggaggattcatacagttcccgtctttcagggctggctttgtgcaccggggatgaggttttttatatcgagaccgggactgcactccccgagaatttgattgcaacagagctgaaagaactgtggcagaatgaaaatattcacaaaatcggacacaatataaaagaatttataacctggctgctgaaacacgatgttgaactgaacggcctttatttcgacactatgattgccgaatacctgatagattccataagaaacggctatcctatagcaagcctttctcacaaatacctgaatcgcagcgttccgtcgctggacgaacttttgggcaagggaaagggagcaaaaaagtactctgaaattccgcccgaaaggctgaaagattacagcgcttataacgtcaaagccatttttgacatatggccgatgcagaaaaaagttcttcaggaaaaccggcaggaggagctttttaatgacatagagcttcctcttataaccgtacttgccagtatggaataccacggtttcaaagttgacgccgcaaaacttcacgaatacggcgaagttcttctgtcacgcataaaagacctggaaaaggtaatttacatgctggccggtgaagaattcaacatcaattcaacgaagcagcttggtaccatattattcgaaaaactgaagcttcccgttgtaaaaagtacaaagaccggatactccaccgacgtcgaggttcttgaagagctttattacaagcatgatataataccatgcataatagaataccgccagcttacaaaactttacaccacctacgccgaaggtcttgaaaaagtgataaatcctgtaaccggtaaaattcattcaagttttaaccagacggctacggctacaggccgcatcagcagtaccgaaccaaatttacagaatatcccagtcagacacgaaatgggaagggaaatacggaaagcttttattccgtcgtcggaaaacgctgtttttgttgatgccgattattcacagatagagcttcgcgtgcttgcccatataacaggcgatgaagccctgataaatgctttcgttaagggggaagatattcatacggccacggcgtcgctggtatttgacgtagctcccgaagatgtgacgccggaactgcgcagaaaggcaaaagccgtaaatttcggcatagtgtacgggatcagtgattacgggctggcacgggatttgggaattacccggaaggaagcaaagcggtatatagacgactattttgccaaataccccaaagtaaaaacctatgtggatgaaattgtgcgggtcggccaggaacaggggtatgtggaaactctgttccacagaagaagataccttcccgagcttgcatctaaaaattttcaccagcgttctttcggaaaaagggttgcaatgaatacgcccatacagggcactgcagccgatattattaaaattgcgatggtgaaggtatacaaggctttgaaagaatccggccttaaatccaggcttatcctccaggtccatgacgaacttgttattgagacttttgaagacgaactggagactgtcaaggaacttgtcaaaaagtgcatggaagaggccgttgaattgagtgtgccgcttgttgtcgacgtttcaatcgggaaaaactggtatgaagcctcctgatatggatcc

SEQ ID NO: 500 - DNA, 2772 bp, Artificial Sequence
  Description of Artificial Sequence: Synthetic Clostridium stercorarium DNA Polymerase V654C
atgaaatacctgctgccgaccgctgctgctggtctgctgctcctcgctgcccagccggcgatggccatggatccaaaaataatccttatagacggaaacagtattttaaaccgcggtttttatgccctgtcggggcgatccatgctgactacgtccacaggtctgtataccaatgcggttttcgcttttgtaaatatattgaacaaatatatcgaagaggaaaaccctgattatattgccgttgctttcgatcttagggcaaaaactttccggcacggtctatatgagggatacaaagcgcagcggaaaggcatgcccgatgaacttgcaatgcagatacccctcgcgaaggaagtactgagggcgatgaatattgccataatagagcatgaaggttatgaagccgacgatataatcggcagcctttcgttaaaggccgaaaaagagaattttgacgtaataatccttacgggggacagggattctttccagctgatcagcgacagggtgaaagttatcctgccttcgacgaaagccggaaaaacagagaccaacgtatatgataaacaggccatcattgacaaatacggagttttaccccatcagcttattgacgttaaaggcttaatgggagattcgtcagataatatacccggcgttccgggagtgggtgagaaaacggcgttaagccttatttcagcctacggtacactggaaggtgtttacgagcatattgatgaaataaaacagcctaagctgaaagcatcgctgattgaatataaggatcaggcgtttttaagccgtaagctgggtactattgtaagaaatctggagctgtgtgcttcgctggaggatctgaaaagaaaagaaataaaccgcaaagagcttttgaatgttttcagaaaactcgaatttgaaagtatcatatcaaaaatgaatcttgcttccgctgaggtgacagaattacctcccgcgccggaagagcttaaaataacccatatttcagcggcagaggatcttaagaaatggattgcttacctgcttaaccagaaaaacatttccgtccttcaactgattgaccgggaggattcatacagttcccgtctttcagggctggctttgtgcaccggggatgaggttttttatatcgagaccgggactgcactccccgagaatttgattgcaacagagctgaaagaactgtggcagaatgaaaatattcacaaaatcggacacaatataaaagaatttataacctggctgctgaaacacgatgttgaactgaacggcctttatttcgacactatgattgccgaatacctgatagattccataagaaacggctatcctatagcaagcctttctcacaaatacctgaatcgcagcgttccgtcgctggacgaacttttgggcaagggaaagggagcaaaaaagtactctgaaattccgcccgaaaggctgaaagattacagcgcttataacgtcaaagccatttttgacatatggccgatgcagaaaaaagttcttcaggaaaaccggcaggaggagctttttaatgacatagagcttcctcttataaccgtacttgccagtatggaataccacggtttcaaagttgacgccgcaaaacttcacgaatacggcgaagttcttctgtcacgcataaaagacctggaaaaggtaatttacatgctggccggtgaagaattcaacatcaattcaacgaagcagcttggtaccatattattcgaaaaactgaagcttcccgttgtaaaaagtacaaagaccggatactccaccgacgtcgaggttcttgaagagctttattacaagcatgatataataccatgcataatagaataccgccagcttacaaaactttacaccacctacgccgaaggtcttgaaaaagtgataaatcctgtaaccggtaaaattcattcaagttttaaccagacgtgtacggctacaggccgcatcagcagtaccgaaccaaatttacagaatatcccagtcagacacgaaatgggaagggaaatacggaaagcttttattccgtcgtcggaaaacgctgtttttgttgatgccgattattcacagatagagcttcgcgtgcttgcccatataacaggcgatgaagccctgataaatgctttcgttaagggggaagatattcatacggccacggcgtcgctggtatttgacgtagctcccgaagatgtgacgccggaactgcgcagaaaggcaaaagccgtaaatttcggcatagtgtacgggatcagtgattacgggctggcacgggatttgggaattacccggaaggaagcaaagcggtatatagacgactattttgccaaataccccaaagtaaaaacctatgtggatgaaattgtgcgggtcggccaggaacaggggtatgtggaaactctgttccacagaagaagataccttcccgagcttgcatctaaaaattttcaccagcgttctttcggaaaaagggttgcaatgaatacgcccatacagggcactgcagccgatattattaaaattgcgatggtgaaggtatacaaggctttgaaagaatccggccttaaatccaggcttatcctccaggtccatgacgaacttgttattgagacttttgaagacgaactggagactgtcaaggaacttgtcaaaaagtgcatggaagaggccgttgaattgagtgtgccgcttgttgtcgacgtttcaatcgggaaaaactggtatgaagcctcctgatatggatcc

SEQ ID NO: 501 - DNA, 2772 bp, Artificial Sequence
  Description of Artificial Sequence: Synthetic Clostridium stercorarium DNA Polymerase V654D
atgaaatacctgctgccgaccgctgctgctggtctgctgctcctcgctgcccagccggcgatggccatggatccaaaaataatccttatagacggaaacagtattttaaaccgcggtttttatgccctgtcggggcgatccatgctgactacgtccacaggtctgtataccaatgcggttttcgcttttgtaaatatattgaacaaatatatcgaagaggaaaaccctgattatattgccgttgctttcgatcttagggcaaaaactttccggcacggtctatatgagggatacaaagcgcagcggaaaggcatgcccgatgaacttgcaatgcagatacccctcgcgaaggaagtactgagggcgatgaatattgccataatagagcatgaaggttatgaagccgacgatataatcggcagcctttcgttaaaggccgaaaaagagaattttgacgtaataatccttacgggggacagggattctttccagctgatcagcgacagggtgaaagttatcctgccttcgacgaaagccggaaaaacagagaccaacgtatatgataaacaggccatcattgacaaatacggagttttaccccatcagcttattgacgttaaaggcttaatgggagattcgtcagataatatacccggcgttccgggagtgggtgagaaaacggcgttaagccttatttcagcctacggtacactggaaggtgtttacgagcatattgatgaaataaaacagcctaagctgaaagcatcgctgattgaatataaggatcaggcgtttttaagccgtaagctgggtactattgtaagaaatctggagctgtgtgcttcgctggaggatctgaaaagaaaagaaataaaccgcaaagagcttttgaatgttttcagaaaactcgaatttgaaagtatcatatcaaaaatgaatcttgcttccgctgaggtgacagaattacctcccgcgccggaagagcttaaaataacccatatttcagcggcagaggatcttaagaaatggattgcttacctgcttaaccagaaaaacatttccgtccttcaactgattgaccgggaggattcatacagttcccgtctttcagggctggctttgtgcaccggggatgaggttttttatatcgagaccgggactgcactccccgagaatttgattgcaacagagctgaaagaactgtggcagaatgaaaatattcacaaaatcggacacaatataaaagaatttataacctggctgctgaaacacgatgttgaactgaacggcctttatttcgacactatgattgccgaatacctgatagattccataagaaacggctatcctatagcaagcctttctcacaaatacctgaatcgcagcgttccgtcgctggacgaacttttgggcaagggaaagggagcaaaaaagtactctgaaattccgcccgaaaggctgaaagattacagcgcttataacgtcaaagccatttttgacatatggccgatgcagaaaaaagttcttcaggaaaaccggcaggaggagctttttaatgacatagagcttcctcttataaccgtacttgccagtatggaataccacggtttcaaagttgacgccgcaaaacttcacgaatacggcgaagttcttctgtcacgcataaaagacctggaaaaggtaatttacatgctggccggtgaagaattcaacatcaattcaacgaagcagcttggtaccatattattcgaaaaactgaagcttcccgttgtaaaaagtacaaagaccggatactccaccgacgtcgaggttcttgaagagctttattacaagcatgatataataccatgcataatagaataccgccagcttacaaaactttacaccacctacgccgaaggtcttgaaaaagtgataaatcctgtaaccggtaaaattcattcaagttttaaccagacggatacggctacaggccgcatcagcagtaccgaaccaaatttacagaatatcccagtcagacacgaaatgggaagggaaatacggaaagcttttattccgtcgtcggaaaacgctgtttttgttgatgccgattattcacagatagagcttcgcgtgcttgcccatataacaggcgatgaagccctgataaatgctttcgttaagggggaagatattcatacggccacggcgtcgctggtatttgacgtagctcccgaagatgtgacgccggaactgcgcagaaaggcaaaagccgtaaatttcggcatagtgtacgggatcagtgattacgggctggcacgggatttgggaattacccggaaggaagcaaagcggtatatagacgactattttgccaaataccccaaagtaaaaacctatgtggatgaaattgtgcgggtcggccaggaacaggggtatgtggaaactctgttccacagaagaagataccttcccgagcttgcatctaaaaattttcaccagcgttctttcggaaaaagggttgcaatgaatacgcccatacagggcactgcagccgatattattaaaattgcgatggtgaaggtatacaaggctttgaaagaatccggccttaaatccaggcttatcctccaggtccatgacgaacttgttattgagacttttgaagacgaactggagactgtcaaggaacttgtcaaaaagtgcatggaagaggccgttgaattgagtgtgccgcttgttgtcgacgtttcaatcgggaaaaactggtatgaagcctcctgatatggatcc

SEQ ID NO: 502 - DNA, 2772 bp, Artificial Sequence
  Description of Artificial Sequence: Synthetic Clostridium stercorarium DNA Polymerase V654F
atgaaatacctgctgccgaccgctgctgctggtctgctgctcctcgctgcccagccggcgatggccatggatccaaaaataatccttatagacggaaacagtattttaaaccgcggtttttatgccctgtcggggcgatccatgctgactacgtccacaggtctgtataccaatgcggttttcgcttttgtaaatatattgaacaaatatatcgaagaggaaaaccctgattatattgccgttgctttcgatcttagggcaaaaactttccggcacggtctatatgagggatacaaagcgcagcggaaaggcatgcccgatgaacttgcaatgcagatacccctcgcgaaggaagtactgagggcgatgaatattgccataatagagcatgaaggttatgaagccgacgatataatcggcagcctttcgttaaaggccgaaaaagagaattttgacgtaataatccttacgggggacagggattctttccagctgatcagcgacagggtgaaagttatcctgccttcgacgaaagccggaaaaacagagaccaacgtatatgataaacaggccatcattgacaaatacggagttttaccccatcagcttattgacgttaaaggcttaatgggagattcgtcagataatatacccggcgttccgggagtgggtgagaaaacggcgttaagccttatttcagcctacggtacactggaaggtgtttacgagcatattgatgaaataaaacagcctaagctgaaagcatcgctgattgaatataaggatcaggcgtttttaagccgtaagctgggtactattgtaagaaatctggagctgtgtgcttcgctggaggatctgaaaagaaaagaaataaaccgcaaagagcttttgaatgttttcagaaaactcgaatttgaaagtatcatatcaaaaatgaatcttgcttccgctgaggtgacagaattacctcccgcgccggaagagcttaaaataacccatatttcagcggcagaggatcttaagaaatggattgcttacctgcttaaccagaaaaacatttccgtccttcaactgattgaccgggaggattcatacagttcccgtctttcagggctggctttgtgcaccggggatgaggttttttatatcgagaccgggactgcactccccgagaatttgattgcaacagagctgaaagaactgtggcagaatgaaaatattcacaaaatcggacacaatataaaagaatttataacctggctgctgaaacacgatgttgaactgaacggcctttatttcgacactatgattgccgaatacctgatagattccataagaaacggctatcctatagcaagcctttctcacaaatacctgaatcgcagcgttccgtcgctggacgaacttttgggcaagggaaagggagcaaaaaagtactctgaaattccgcccgaaaggctgaaagattacagcgcttataacgtcaaagccatttttgacatatggccgatgcagaaaaaagttcttcaggaaaaccggcaggaggagctttttaatgacatagagcttcctcttataaccgtacttgccagtatggaataccacggtttcaaagttgacgccgcaaaacttcacgaatacggcgaagttcttctgtcacgcataaaagacctggaaaaggtaatttacatgctggccggtgaagaattcaacatcaattcaacgaagcagcttggtaccatattattcgaaaaactgaagcttcccgttgtaaaaagtacaaagaccggatactccaccgacgtcgaggttcttgaagagctttattacaagcatgatataataccatgcataatagaataccgccagcttacaaaactttacaccacctacgccgaaggtcttgaaaaagtgataaatcctgtaaccggtaaaattcattcaagttttaaccagacgtttacggctacaggccgcatcagcagtaccgaaccaaatttacagaatatcccagtcagacacgaaatgggaagggaaatacggaaagcttttattccgtcgtcggaaaacgctgtttttgttgatgccgattattcacagatagagcttcgcgtgcttgcccatataacaggcgatgaagccctgataaatgctttcgttaagggggaagatattcatacggccacggcgtcgctggtatttgacgtagctcccgaagatgtgacgccggaactgcgcagaaaggcaaaagccgtaaatttcggcatagtgtacgggatcagtgattacgggctggcacgggatttgggaattacccggaaggaagcaaagcggtatatagacgactattttgccaaataccccaaagtaaaaacctatgtggatgaaattgtgcgggtcggccaggaacaggggtatgtggaaactctgttccacagaagaagataccttcccgagcttgcatctaaaaattttcaccagcgttctttcggaaaaagggttgcaatgaatacgcccatacagggcactgcagccgatattattaaaattgcgatggtgaaggtatacaaggctttgaaagaatccggccttaaatccaggcttatcctccaggtccatgacgaacttgttattgagacttttgaagacgaactggagactgtcaaggaacttgtcaaaaagtgcatggaagaggccgttgaattgagtgtgccgcttgttgtcgacgtttcaatcgggaaaaactggtatgaagcctcctgatatggatcc

SEQ ID NO: 503 - DNA, 2772 bp, Artificial Sequence
  Description of Artificial Sequence: Synthetic Clostridium stercorarium DNA Polymerase V654G
atgaaatacctgctgccgaccgctgctgctggtctgctgctcctcgctgcccagccggcgatggccatggatccaaaaataatccttatagacggaaacagtattttaaaccgcggtttttatgccctgtcggggcgatccatgctgactacgtccacaggtctgtataccaatgcggttttcgcttttgtaaatatattgaacaaatatatcgaagaggaaaaccctgattatattgccgttgctttcgatcttagggcaaaaactttccggcacggtctatatgagggatacaaagcgcagcggaaaggcatgcccgatgaacttgcaatgcagatacccctcgcgaaggaagtactgagggcgatgaatattgccataatagagcatgaaggttatgaagccgacgatataatcggcagcctttcgttaaaggccgaaaaagagaattttgacgtaataatccttacgggggacagggattctttccagctgatcagcgacagggtgaaagttatcctgccttcgacgaaagccggaaaaacagagaccaacgtatatgataaacaggccatcattgacaaatacggagttttaccccatcagcttattgacgttaaaggcttaatgggagattcgtcagataatatacccggcgttccgggagtgggtgagaaaacggcgttaagccttatttcagcctacggtacactggaaggtgtttacgagcatattgatgaaataaaacagcctaagctgaaagcatcgctgattgaatataaggatcaggcgtttttaagccgtaagctgggtactattgtaagaaatctggagctgtgtgcttcgctggaggatctgaaaagaaaagaaataaaccgcaaagagcttttgaatgttttcagaaaactcgaatttgaaagtatcatatcaaaaatgaatcttgcttccgctgaggtgacagaattacctcccgcgccggaagagcttaaaataacccatatttcagcggcagaggatcttaagaaatggattgcttacctgcttaaccagaaaaacatttccgtccttcaactgattgaccgggaggattcatacagttcccgtctttcagggctggctttgtgcaccggggatgaggttttttatatcgagaccgggactgcactccccgagaatttgattgcaacagagctgaaagaactgtggcagaatgaaaatattcacaaaatcggacacaatataaaagaatttataacctggctgctgaaacacgatgttgaactgaacggcctttatttcgacactatgattgccgaatacctgatagattccataagaaacggctatcctatagcaagcctttctcacaaatacctgaatcgcagcgttccgtcgctggacgaacttttgggcaagggaaagggagcaaaaaagtactctgaaattccgcccgaaaggctgaaagattacagcgcttataacgtcaaagccatttttgacatatggccgatgcagaaaaaagttcttcaggaaaaccggcaggaggagctttttaatgacatagagcttcctcttataaccgtacttgccagtatggaataccacggtttcaaagttgacgccgcaaaacttcacgaatacggcgaagttcttctgtcacgcataaaagacctggaaaaggtaatttacatgctggccggtgaagaattcaacatcaattcaacgaagcagcttggtaccatattattcgaaaaactgaagcttcccgttgtaaaaagtacaaagaccggatactccaccgacgtcgaggttcttgaagagctttattacaagcatgatataataccatgcataatagaataccgccagcttacaaaactttacaccacctacgccgaaggtcttgaaaaagtgataaatcctgtaaccggtaaaattcattcaagttttaaccagacgggtacggctacaggccgcatcagcagtaccgaaccaaatttacagaatatcccagtcagacacgaaatgggaagggaaatacggaaagcttttattccgtcgtcggaaaacgctgtttttgttgatgccgattattcacagatagagcttcgcgtgcttgcccatataacaggcgatgaagccctgataaatgctttcgttaagggggaagatattcatacggccacggcgtcgctggtatttgacgtagctcccgaagatgtgacgccggaactgcgcagaaaggcaaaagccgtaaatttcggcatagtgtacgggatcagtgattacgggctggcacgggatttgggaattacccggaaggaagcaaagcggtatatagacgactattttgccaaataccccaaagtaaaaacctatgtggatgaaattgtgcgggtcggccaggaacaggggtatgtggaaactctgttccacagaagaagataccttcccgagcttgcatctaaaaattttcaccagcgttctttcggaaaaagggttgcaatgaatacgcccatacagggcactgcagccgatattattaaaattgcgatggtgaaggtatacaaggctttgaaagaatccggccttaaatccaggcttatcctccaggtccatgacgaacttgttattgagacttttgaagacgaactggagactgtcaaggaacttgtcaaaaagtgcatggaagaggccgttgaattgagtgtgccgcttgttgtcgacgtttcaatcgggaaaaactggtatgaagcctcctgatatggatcc

SEQ ID NO: 504 - DNA, 2772 bp, Artificial Sequence
  Description of Artificial Sequence: Synthetic Clostridium stercorarium DNA Polymerase V654H
atgaaatacctgctgccgaccgctgctgctggtctgctgctcctcgctgcccagccggcgatggccatggatccaaaaataatccttatagacggaaacagtattttaaaccgcggtttttatgccctgtcggggcgatccatgctgactacgtccacaggtctgtataccaatgcggttttcgcttttgtaaatatattgaacaaatatatcgaagaggaaaaccctgattatattgccgttgctttcgatcttagggcaaaaactttccggcacggtctatatgagggatacaaagcgcagcggaaaggcatgcccgatgaacttgcaatgcagatacccctcgcgaaggaagtactgagggcgatgaatattgccataatagagcatgaaggttatgaagccgacgatataatcggcagcctttcgttaaaggccgaaaaagagaattttgacgtaataatccttacgggggacagggattctttccagctgatcagcgacagggtgaaagttatcctgccttcgacgaaagccggaaaaacagagaccaacgtatatgataaacaggccatcattgacaaatacggagttttaccccatcagcttattgacgttaaaggcttaatgggagattcgtcagataatatacccggcgttccgggagtgggtgagaaaacggcgttaagccttatttcagcctacggtacactggaaggtgtttacgagcatattgatgaaataaaacagcctaagctgaaagcatcgctgattgaatataaggatcaggcgtttttaagccgtaagctgggtactattgtaagaaatctggagctgtgtgcttcgctggaggatctgaaaagaaaagaaataaaccgcaaagagcttttgaatgttttcagaaaactcgaatttgaaagtatcatatcaaaaatgaatcttgcttccgctgaggtgacagaattacctcccgcgccggaagagcttaaaataacccatatttcagcggcagaggatcttaagaaatggattgcttacctgcttaaccagaaaaacatttccgtccttcaactgattgaccgggaggattcatacagttcccgtctttcagggctggctttgtgcaccggggatgaggttttttatatcgagaccgggactgcactccccgagaatttgattgcaacagagctgaaagaactgtggcagaatgaaaatattcacaaaatcggacacaatataaaagaatttataacctggctgctgaaacacgatgttgaactgaacggcctttatttcgacactatgattgccgaatacctgatagattccataagaaacggctatcctatagcaagcctttctcacaaatacctgaatcgcagcgttccgtcgctggacgaacttttgggcaagggaaagggagcaaaaaagtactctgaaattccgcccgaaaggctgaaagattacagcgcttataacgtcaaagccatttttgacatatggccgatgcagaaaaaagttcttcaggaaaaccggcaggaggagctttttaatgacatagagcttcctcttataaccgtacttgccagtatggaataccacggtttcaaagttgacgccgcaaaacttcacgaatacggcgaagttcttctgtcacgcataaaagacctggaaaaggtaatttacatgctggccggtgaagaattcaacatcaattcaacgaagcagcttggtaccatattattcgaaaaactgaagcttcccgttgtaaaaagtacaaagaccggatactccaccgacgtcgaggttcttgaagagctttattacaagcatgatataataccatgcataatagaataccgccagcttacaaaactttacaccacctacgccgaaggtcttgaaaaagtgataaatcctgtaaccggtaaaattcattcaagttttaaccagacgcatacggctacaggccgcatcagcagtaccgaaccaaatttacagaatatcccagtcagacacgaaatgggaagggaaatacggaaagcttttattccgtcgtcggaaaacgctgtttttgttgatgccgattattcacagatagagcttcgcgtgcttgcccatataacaggcgatgaagccctgataaatgctttcgttaagggggaagatattcatacggccacggcgtcgctggtatttgacgtagctcccgaagatgtgacgccggaactgcgcagaaaggcaaaagccgtaaatttcggcatagtgtacgggatcagtgattacgggctggcacgggatttgggaattacccggaaggaagcaaagcggtatatagacgactattttgccaaataccccaaagtaaaaacctatgtggatgaaattgtgcgggtcggccaggaacaggggtatgtggaaactctgttccacagaagaagataccttcccgagcttgcatctaaaaattttcaccagcgttctttcggaaaaagggttgcaatgaatacgcccatacagggcactgcagccgatattattaaaattgcgatggtgaaggtatacaaggctttgaaagaatccggccttaaatccaggcttatcctccaggtccatgacgaacttgttattgagacttttgaagacgaactggagactgtcaaggaacttgtcaaaaagtgcatggaagaggccgttgaattgagtgtgccgcttgttgtcgacgtttcaatcgggaaaaactggtatgaagcctcctgatatggatcc

SEQ ID NO: 505 - DNA, 2772 bp, Artificial Sequence
  Description of Artificial Sequence: Synthetic Clostridium stercorarium DNA Polymerase V654I
atgaaatacctgctgccgaccgctgctgctggtctgctgctcctcgctgcccagccggcgatggccatggatccaaaaataatccttatagacggaaacagtattttaaaccgcggtttttatgccctgtcggggcgatccatgctgactacgtccacaggtctgtataccaatgcggttttcgcttttgtaaatatattgaacaaatatatcgaagaggaaaaccctgattatattgccgttgctttcgatcttagggcaaaaactttccggcacggtctatatgagggatacaaagcgcagcggaaaggcatgcccgatgaacttgcaatgcagatacccctcgcgaaggaagtactgagggcgatgaatattgccataatagagcatgaaggttatgaagccgacgatataatcggcagcctttcgttaaaggccgaaaaagagaattttgacgtaataatccttacgggggacagggattctttccagctgatcagcgacagggtgaaagttatcctgccttcgacgaaagccggaaaaacagagaccaacgtatatgataaacaggccatcattgacaaatacggagttttaccccatcagcttattgacgttaaaggcttaatgggagattcgtcagataatatacccggcgttccgggagtgggtgagaaaacggcgttaagccttatttcagcctacggtacactggaaggtgtttacgagcatattgatgaaataaaacagcctaagctgaaagcatcgctgattgaatataaggatcaggcgtttttaagccgtaagctgggtactattgtaagaaatctggagctgtgtgcttcgctggaggatctgaaaagaaaagaaataaaccgcaaagagcttttgaatgttttcagaaaactcgaatttgaaagtatcatatcaaaaatgaatcttgcttccgctgaggtgacagaattacctcccgcgccggaagagcttaaaataacccatatttcagcggcagaggatcttaagaaatggattgcttacctgcttaaccagaaaaacatttccgtccttcaactgattgaccgggaggattcatacagttcccgtctttcagggctggctttgtgcaccggggatgaggttttttatatcgagaccgggactgcactccccgagaatttgattgcaacagagctgaaagaactgtggcagaatgaaaatattcacaaaatcggacacaatataaaagaatttataacctggctgctgaaacacgatgttgaactgaacggcctttatttcgacactatgattgccgaatacctgatagattccataagaaacggctatcctatagcaagcctttctcacaaatacctgaatcgcagcgttccgtcgctggacgaacttttgggcaagggaaagggagcaaaaaagtactctgaaattccgcccgaaaggctgaaagattacagcgcttataacgtcaaagccatttttgacatatggccgatgcagaaaaaagttcttcaggaaaaccggcaggaggagctttttaatgacatagagcttcctcttataaccgtacttgccagtatggaataccacggtttcaaagttgacgccgcaaaacttcacgaatacggcgaagttcttctgtcacgcataaaagacctggaaaaggtaatttacatgctggccggtgaagaattcaacatcaattcaacgaagcagcttggtaccatattattcgaaaaactgaagcttcccgttgtaaaaagtacaaagaccggatactccaccgacgtcgaggttcttgaagagctttattacaagcatgatataataccatgcataatagaataccgccagcttacaaaactttacaccacctacgccgaaggtcttgaaaaagtgataaatcctgtaaccggtaaaattcattcaagttttaaccagacgattacggctacaggccgcatcagcagtaccgaaccaaatttacagaatatcccagtcagacacgaaatgggaagggaaatacggaaagcttttattccgtcgtcggaaaacgctgtttttgttgatgccgattattcacagatagagcttcgcgtgcttgcccatataacaggcgatgaagccctgataaatgctttcgttaagggggaagatattcatacggccacggcgtcgctggtatttgacgtagctcccgaagatgtgacgccggaactgcgcagaaaggcaaaagccgtaaatttcggcatagtgtacgggatcagtgattacgggctggcacgggatttgggaattacccggaaggaagcaaagcggtatatagacgactattttgccaaataccccaaagtaaaaacctatgtggatgaaattgtgcgggtcggccaggaacaggggtatgtggaaactctgttccacagaagaagataccttcccgagcttgcatctaaaaattttcaccagcgttctttcggaaaaagggttgcaatgaatacgcccatacagggcactgcagccgatattattaaaattgcgatggtgaaggtatacaaggctttgaaagaatccggccttaaatccaggcttatcctccaggtccatgacgaacttgttattgagacttttgaagacgaactggagactgtcaaggaacttgtcaaaaagtgcatggaagaggccgttgaattgagtgtgccgcttgttgtcgacgtttcaatcgggaaaaactggtatgaagcctcctgatatggatcc

SEQ ID NO: 506 - DNA, 2772 bp, Artificial Sequence
  Description of Artificial Sequence: Synthetic Clostridium stercorarium DNA Polymerase V654L
atgaaatacctgctgccgaccgctgctgctggtctgctgctcctcgctgcccagccggcgatggccatggatccaaaaataatccttatagacggaaacagtattttaaaccgcggtttttatgccctgtcggggcgatccatgctgactacgtccacaggtctgtataccaatgcggttttcgcttttgtaaatatattgaacaaatatatcgaagaggaaaaccctgattatattgccgttgctttcgatcttagggcaaaaactttccggcacggtctatatgagggatacaaagcgcagcggaaaggcatgcccgatgaacttgcaatgcagatacccctcgcgaaggaagtactgagggcgatgaatattgccataatagagcatgaaggttatgaagccgacgatataatcggcagcctttcgttaaaggccgaaaaagagaattttgacgtaataatccttacgggggacagggattctttccagctgatcagcgacagggtgaaagttatcctgccttcgacgaaagccggaaaaacagagaccaacgtatatgataaacaggccatcattgacaaatacggagttttaccccatcagcttattgacgttaaaggcttaatgggagattcgtcagataatatacccggcgttccgggagtgggtgagaaaacggcgttaagccttatttcagcctacggtacactggaaggtgtttacgagcatattgatgaaataaaacagcctaagctgaaagcatcgctgattgaatataaggatcaggcgtttttaagccgtaagctgggtactattgtaagaaatctggagctgtgtgcttcgctggaggatctgaaaagaaaagaaataaaccgcaaagagcttttgaatgttttcagaaaactcgaatttgaaagtatcatatcaaaaatgaatcttgcttccgctgaggtgacagaattacctcccgcgccggaagagcttaaaataacccatatttcagcggcagaggatcttaagaaatggattgcttacctgcttaaccagaaaaacatttccgtccttcaactgattgaccgggaggattcatacagttcccgtctttcagggctggctttgtgcaccggggatgaggttttttatatcgagaccgggactgcactccccgagaatttgattgcaacagagctgaaagaactgtggcagaatgaaaatattcacaaaatcggacacaatataaaagaatttataacctggctgctgaaacacgatgttgaactgaacggcctttatttcgacactatgattgccgaatacctgatagattccataagaaacggctatcctatagcaagcctttctcacaaatacctgaatcgcagcgttccgtcgctggacgaacttttgggcaagggaaagggagcaaaaaagtactctgaaattccgcccgaaaggctgaaagattacagcgcttataacgtcaaagccatttttgacatatggccgatgcagaaaaaagttcttcaggaaaaccggcaggaggagctttttaatgacatagagcttcctcttataaccgtacttgccagtatggaataccacggtttcaaagttgacgccgcaaaacttcacgaatacggcgaagttcttctgtcacgcataaaagacctggaaaaggtaatttacatgctggccggtgaagaattcaacatcaattcaacgaagcagcttggtaccatattattcgaaaaactgaagcttcccgttgtaaaaagtacaaagaccggatactccaccgacgtcgaggttcttgaagagctttattacaagcatgatataataccatgcataatagaataccgccagcttacaaaactttacaccacctacgccgaaggtcttgaaaaagtgataaatcctgtaaccggtaaaattcattcaagttttaaccagacgcttacggctacaggccgcatcagcagtaccgaaccaaatttacagaatatcccagtcagacacgaaatgggaagggaaatacggaaagcttttattccgtcgtcggaaaacgctgtttttgttgatgccgattattcacagatagagcttcgcgtgcttgcccatataacaggcgatgaagccctgataaatgctttcgttaagggggaagatattcatacggccacggcgtcgctggtatttgacgtagctcccgaagatgtgacgccggaactgcgcagaaaggcaaaagccgtaaatttcggcatagtgtacgggatcagtgattacgggctggcacgggatttgggaattacccggaaggaagcaaagcggtatatagacgactattttgccaaataccccaaagtaaaaacctatgtggatgaaattgtgcgggtcggccaggaacaggggtatgtggaaactctgttccacagaagaagataccttcccgagcttgcatctaaaaattttcaccagcgttctttcggaaaaagggttgcaatgaatacgcccatacagggcactgcagccgatattattaaaattgcgatggtgaaggtatacaaggctttgaaagaatccggccttaaatccaggcttatcctccaggtccatgacgaacttgttattgagacttttgaagacgaactggagactgtcaaggaacttgtcaaaaagtgcatggaagaggccgttgaattgagtgtgccgcttgttgtcgacgtttcaatcgggaaaaactggtatgaagcctcctgatatggatcc

SEQ ID NO: 507 - DNA, 2772 bp, Artificial Sequence
  Description of Artificial Sequence: Synthetic Clostridium stercorarium DNA Polymerase V654M
atgaaatacctgctgccgaccgctgctgctggtctgctgctcctcgctgcccagccggcgatggccatggatccaaaaataatccttatagacggaaacagtattttaaaccgcggtttttatgccctgtcggggcgatccatgctgactacgtccacaggtctgtataccaatgcggttttcgcttttgtaaatatattgaacaaatatatcgaagaggaaaaccctgattatattgccgttgctttcgatcttagggcaaaaactttccggcacggtctatatgagggatacaaagcgcagcggaaaggcatgcccgatgaacttgcaatgcagatacccctcgcgaaggaagtactgagggcgatgaatattgccataatagagcatgaaggttatgaagccgacgatataatcggcagcctttcgttaaaggccgaaaaagagaattttgacgtaataatccttacgggggacagggattctttccagctgatcagcgacagggtgaaagttatcctgccttcgacgaaagccggaaaaacagagaccaacgtatatgataaacaggccatcattgacaaatacggagttttaccccatcagcttattgacgttaaaggcttaatgggagattcgtcagataatatacccggcgttccgggagtgggtgagaaaacggcgttaagccttatttcagcctacggtacactggaaggtgtttacgagcatattgatgaaataaaacagcctaagctgaaagcatcgctgattgaatataaggatcaggcgtttttaagccgtaagctgggtactattgtaagaaatctggagctgtgtgcttcgctggaggatctgaaaagaaaagaaataaaccgcaaagagcttttgaatgttttcagaaaactcgaatttgaaagtatcatatcaaaaatgaatcttgcttccgctgaggtgacagaattacctcccgcgccggaagagcttaaaataacccatatttcagcggcagaggatcttaagaaatggattgcttacctgcttaaccagaaaaacatttccgtccttcaactgattgaccgggaggattcatacagttcccgtctttcagggctggctttgtgcaccggggatgaggttttttatatcgagaccgggactgcactccccgagaatttgattgcaacagagctgaaagaactgtggcagaatgaaaatattcacaaaatcggacacaatataaaagaatttataacctggctgctgaaacacgatgttgaactgaacggcctttatttcgacactatgattgccgaatacctgatagattccataagaaacggctatcctatagcaagcctttctcacaaatacctgaatcgcagcgttccgtcgctggacgaacttttgggcaagggaaagggagcaaaaaagtactctgaaattccgcccgaaaggctgaaagattacagcgcttataacgtcaaagccatttttgacatatggccgatgcagaaaaaagttcttcaggaaaaccggcaggaggagctttttaatgacatagagcttcctcttataaccgtacttgccagtatggaataccacggtttcaaagttgacgccgcaaaacttcacgaatacggcgaagttcttctgtcacgcataaaagacctggaaaaggtaatttacatgctggccggtgaagaattcaacatcaattcaacgaagcagcttggtaccatattattcgaaaaactgaagcttcccgttgtaaaaagtacaaagaccggatactccaccgacgtcgaggttcttgaagagctttattacaagcatgatataataccatgcataatagaataccgccagcttacaaaactttacaccacctacgccgaaggtcttgaaaaagtgataaatcctgtaaccggtaaaattcattcaagttttaaccagacgatgacggctacaggccgcatcagcagtaccgaaccaaatttacagaatatcccagtcagacacgaaatgggaagggaaatacggaaagcttttattccgtcgtcggaaaacgctgtttttgttgatgccgattattcacagatagagcttcgcgtgcttgcccatataacaggcgatgaagccctgataaatgctttcgttaagggggaagatattcatacggccacggcgtcgctggtatttgacgtagctcccgaagatgtgacgccggaactgcgcagaaaggcaaaagccgtaaatttcggcatagtgtacgggatcagtgattacgggctggcacgggatttgggaattacccggaaggaagcaaagcggtatatagacgactattttgccaaataccccaaagtaaaaacctatgtggatgaaattgtgcgggtcggccaggaacaggggtatgtggaaactctgttccacagaagaagataccttcccgagcttgcatctaaaaattttcaccagcgttctttcggaaaaagggttgcaatgaatacgcccatacagggcactgcagccgatattattaaaattgcgatggtgaaggtatacaaggctttgaaagaatccggccttaaatccaggcttatcctccaggtccatgacgaacttgttattgagacttttgaagacgaactggagactgtcaaggaacttgtcaaaaagtgcatggaagaggccgttgaattgagtgtgccgcttgttgtcgacgtttcaatcgggaaaaactggtatgaagcctcctgatatggatcc

SEQ ID NO: 508 - DNA, 2772 bp, Artificial Sequence
  Description of Artificial Sequence: Synthetic Clostridium stercorarium DNA Polymerase V654N
atgaaatacctgctgccgaccgctgctgctggtctgctgctcctcgctgcccagccggcgatggccatggatccaaaaataatccttatagacggaaacagtattttaaaccgcggtttttatgccctgtcggggcgatccatgctgactacgtccacaggtctgtataccaatgcggttttcgcttttgtaaatatattgaacaaatatatcgaagaggaaaaccctgattatattgccgttgctttcgatcttagggcaaaaactttccggcacggtctatatgagggatacaaagcgcagcggaaaggcatgcccgatgaacttgcaatgcagatacccctcgcgaaggaagtactgagggcgatgaatattgccataatagagcatgaaggttatgaagccgacgatataatcggcagcctttcgttaaaggccgaaaaagagaattttgacgtaataatccttacgggggacagggattctttccagctgatcagcgacagggtgaaagttatcctgccttcgacgaaagccggaaaaacagagaccaacgtatatgataaacaggccatcattgacaaatacggagttttaccccatcagcttattgacgttaaaggcttaatgggagattcgtcagataatatacccggcgttccgggagtgggtgagaaaacggcgttaagccttatttcagcctacggtacactggaaggtgtttacgagcatattgatgaaataaaacagcctaagctgaaagcatcgctgattgaatataaggatcaggcgtttttaagccgtaagctgggtactattgtaagaaatctggagctgtgtgcttcgctggaggatctgaaaagaaaagaaataaaccgcaaagagcttttgaatgttttcagaaaactcgaatttgaaagtatcatatcaaaaatgaatcttgcttccgctgaggtgacagaattacctcccgcgccggaagagcttaaaataacccatatttcagcggcagaggatcttaagaaatggattgcttacctgcttaaccagaaaaacatttccgtccttcaactgattgaccgggaggattcatacagttcccgtctttcagggctggctttgtgcaccggggatgaggttttttatatcgagaccgggactgcactccccgagaatttgattgcaacagagctgaaagaactgtggcagaatgaaaatattcacaaaatcggacacaatataaaagaatttataacctggctgctgaaacacgatgttgaactgaacggcctttatttcgacactatgattgccgaatacctgatagattccataagaaacggctatcctatagcaagcctttctcacaaatacctgaatcgcagcgttccgtcgctggacgaacttttgggcaagggaaagggagcaaaaaagtactctgaaattccgcccgaaaggctgaaagattacagcgcttataacgtcaaagccatttttgacatatggccgatgcagaaaaaagttcttcaggaaaaccggcaggaggagctttttaatgacatagagcttcctcttataaccgtacttgccagtatggaataccacggtttcaaagttgacgccgcaaaacttcacgaatacggcgaagttcttctgtcacgcataaaagacctggaaaaggtaatttacatgctggccggtgaagaattcaacatcaattcaacgaagcagcttggtaccatattattcgaaaaactgaagcttcccgttgtaaaaagtacaaagaccggatactccaccgacgtcgaggttcttgaagagctttattacaagcatgatataataccatgcataatagaataccgccagcttacaaaactttacaccacctacgccgaaggtcttgaaaaagtgataaatcctgtaaccggtaaaattcattcaagttttaaccagacgaatacggctacaggccgcatcagcagtaccgaaccaaatttacagaatatcccagtcagacacgaaatgggaagggaaatacggaaagcttttattccgtcgtcggaaaacgctgtttttgttgatgccgattattcacagatagagcttcgcgtgcttgcccatataacaggcgatgaagccctgataaatgctttcgttaagggggaagatattcatacggccacggcgtcgctggtatttgacgtagctcccgaagatgtgacgccggaactgcgcagaaaggcaaaagccgtaaatttcggcatagtgtacgggatcagtgattacgggctggcacgggatttgggaattacccggaaggaagcaaagcggtatatagacgactattttgccaaataccccaaagtaaaaacctatgtggatgaaattgtgcgggtcggccaggaacaggggtatgtggaaactctgttccacagaagaagataccttcccgagcttgcatctaaaaattttcaccagcgttctttcggaaaaagggttgcaatgaatacgcccatacagggcactgcagccgatattattaaaattgcgatggtgaaggtatacaaggctttgaaagaatccggccttaaatccaggcttatcctccaggtccatgacgaacttgttattgagacttttgaagacgaactggagactgtcaaggaacttgtcaaaaagtgcatggaagaggccgttgaattgagtgtgccgcttgttgtcgacgtttcaatcgggaaaaactggtatgaagcctcctgatatggatcc

SEQ ID NO: 509 - DNA, 2772 bp, Artificial Sequence
  Description of Artificial Sequence: Synthetic Clostridium stercorarium DNA Polymerase V654P
atgaaatacctgctgccgaccgctgctgctggtctgctgctcctcgctgcccagccggcgatggccatggatccaaaaataatccttatagacggaaacagtattttaaaccgcggtttttatgccctgtcggggcgatccatgctgactacgtccacaggtctgtataccaatgcggttttcgcttttgtaaatatattgaacaaatatatcgaagaggaaaaccctgattatattgccgttgctttcgatcttagggcaaaaactttccggcacggtctatatgagggatacaaagcgcagcggaaaggcatgcccgatgaacttgcaatgcagatacccctcgcgaaggaagtactgagggcgatgaatattgccataatagagcatgaaggttatgaagccgacgatataatcggcagcctttcgttaaaggccgaaaaagagaattttgacgtaataatccttacgggggacagggattctttccagctgatcagcgacagggtgaaagttatcctgccttcgacgaaagccggaaaaacagagaccaacgtatatgataaacaggccatcattgacaaatacggagttttaccccatcagcttattgacgttaaaggcttaatgggagattcgtcagataatatacccggcgttccgggagtgggtgagaaaacggcgttaagccttatttcagcctacggtacactggaaggtgtttacgagcatattgatgaaataaaacagcctaagctgaaagcatcgctgattgaatataaggatcaggcgtttttaagccgtaagctgggtactattgtaagaaatctggagctgtgtgcttcgctggaggatctgaaaagaaaagaaataaaccgcaaagagcttttgaatgttttcagaaaactcgaatttgaaagtatcatatcaaaaatgaatcttgcttccgctgaggtgacagaattacctcccgcgccggaagagcttaaaataacccatatttcagcggcagaggatcttaagaaatggattgcttacctgcttaaccagaaaaacatttccgtccttcaactgattgaccgggaggattcatacagttcccgtctttcagggctggctttgtgcaccggggatgaggttttttatatcgagaccgggactgcactccccgagaatttgattgcaacagagctgaaagaactgtggcagaatgaaaatattcacaaaatcggacacaatataaaagaatttataacctggctgctgaaacacgatgttgaactgaacggcctttatttcgacactatgattgccgaatacctgatagattccataagaaacggctatcctatagcaagcctttctcacaaatacctgaatcgcagcgttccgtcgctggacgaacttttgggcaagggaaagggagcaaaaaagtactctgaaattccgcccgaaaggctgaaagattacagcgcttataacgtcaaagccatttttgacatatggccgatgcagaaaaaagttcttcaggaaaaccggcaggaggagctttttaatgacatagagcttcctcttataaccgtacttgccagtatggaataccacggtttcaaagttgacgccgcaaaacttcacgaatacggcgaagttcttctgtcacgcataaaagacctggaaaaggtaatttacatgctggccggtgaagaattcaacatcaattcaacgaagcagcttggtaccatattattcgaaaaactgaagcttcccgttgtaaaaagtacaaagaccggatactccaccgacgtcgaggttcttgaagagctttattacaagcatgatataataccatgcataatagaataccgccagcttacaaaactttacaccacctacgccgaaggtcttgaaaaagtgataaatcctgtaaccggtaaaattcattcaagttttaaccagacgcctacggctacaggccgcatcagcagtaccgaaccaaatttacagaatatcccagtcagacacgaaatgggaagggaaatacggaaagcttttattccgtcgtcggaaaacgctgtttttgttgatgccgattattcacagatagagcttcgcgtgcttgcccatataacaggcgatgaagccctgataaatgctttcgttaagggggaagatattcatacggccacggcgtcgctggtatttgacgtagctcccgaagatgtgacgccggaactgcgcagaaaggcaaaagccgtaaatttcggcatagtgtacgggatcagtgattacgggctggcacgggatttgggaattacccggaaggaagcaaagcggtatatagacgactattttgccaaataccccaaagtaaaaacctatgtggatgaaattgtgcgggtcggccaggaacaggggtatgtggaaactctgttccacagaagaagataccttcccgagcttgcatctaaaaattttcaccagcgttctttcggaaaaagggttgcaatgaatacgcccatacagggcactgcagccgatattattaaaattgcgatggtgaaggtatacaaggctttgaaagaatccggccttaaatccaggcttatcctccaggtccatgacgaacttgttattgagacttttgaagacgaactggagactgtcaaggaacttgtcaaaaagtgcatggaagaggccgttgaattgagtgtgccgcttgttgtcgacgtttcaatcgggaaaaactggtatgaagcctcctgatatggatcc

SEQ ID NO: 510 - DNA, 2772 bp, Artificial Sequence
  Description of Artificial Sequence: Synthetic Clostridium stercorarium DNA Polymerase V654Q
atgaaatacctgctgccgaccgctgctgctggtctgctgctcctcgctgcccagccggcgatggccatggatccaaaaataatccttatagacggaaacagtattttaaaccgcggtttttatgccctgtcggggcgatccatgctgactacgtccacaggtctgtataccaatgcggttttcgcttttgtaaatatattgaacaaatatatcgaagaggaaaaccctgattatattgccgttgctttcgatcttagggcaaaaactttccggcacggtctatatgagggatacaaagcgcagcggaaaggcatgcccgatgaacttgcaatgcagatacccctcgcgaaggaagtactgagggcgatgaatattgccataatagagcatgaaggttatgaagccgacgatataatcggcagcctttcgttaaaggccgaaaaagagaattttgacgtaataatccttacgggggacagggattctttccagctgatcagcgacagggtgaaagttatcctgccttcgacgaaagccggaaaaacagagaccaacgtatatgataaacaggccatcattgacaaatacggagttttaccccatcagcttattgacgttaaaggcttaatgggagattcgtcagataatatacccggcgttccgggagtgggtgagaaaacggcgttaagccttatttcagcctacggtacactggaaggtgtttacgagcatattgatgaaataaaacagcctaagctgaaagcatcgctgattgaatataaggatcaggcgtttttaagccgtaagctgggtactattgtaagaaatctggagctgtgtgcttcgctggaggatctgaaaagaaaagaaataaaccgcaaagagcttttgaatgttttcagaaaactcgaatttgaaagtatcatatcaaaaatgaatcttgcttccgctgaggtgacagaattacctcccgcgccggaagagcttaaaataacccatatttcagcggcagaggatcttaagaaatggattgcttacctgcttaaccagaaaaacatttccgtccttcaactgattgaccgggaggattcatacagttcccgtctttcagggctggctttgtgcaccggggatgaggttttttatatcgagaccgggactgcactccccgagaatttgattgcaacagagctgaaagaactgtggcagaatgaaaatattcacaaaatcggacacaatataaaagaatttataacctggctgctgaaacacgatgttgaactgaacggcctttatttcgacactatgattgccgaatacctgatagattccataagaaacggctatcctatagcaagcctttctcacaaatacctgaatcgcagcgttccgtcgctggacgaacttttgggcaagggaaagggagcaaaaaagtactctgaaattccgcccgaaaggctgaaagattacagcgcttataacgtcaaagccatttttgacatatggccgatgcagaaaaaagttcttcaggaaaaccggcaggaggagctttttaatgacatagagcttcctcttataaccgtacttgccagtatggaataccacggtttcaaagttgacgccgcaaaacttcacgaatacggcgaagttcttctgtcacgcataaaagacctggaaaaggtaatttacatgctggccggtgaagaattcaacatcaattcaacgaagcagcttggtaccatattattcgaaaaactgaagcttcccgttgtaaaaagtacaaagaccggatactccaccgacgtcgaggttcttgaagagctttattacaagcatgatataataccatgcataatagaataccgccagcttacaaaactttacaccacctacgccgaaggtcttgaaaaagtgataaatcctgtaaccggtaaaattcattcaagttttaaccagacgcaaacggctacaggccgcatcagcagtaccgaaccaaatttacagaatatcccagtcagacacgaaatgggaagggaaatacggaaagcttttattccgtcgtcggaaaacgctgtttttgttgatgccgattattcacagatagagcttcgcgtgcttgcccatataacaggcgatgaagccctgataaatgctttcgttaagggggaagatattcatacggccacggcgtcgctggtatttgacgtagctcccgaagatgtgacgccggaactgcgcagaaaggcaaaagccgtaaatttcggcatagtgtacgggatcagtgattacgggctggcacgggatttgggaattacccggaaggaagcaaagcggtatatagacgactattttgccaaataccccaaagtaaaaacctatgtggatgaaattgtgcgggtcggccaggaacaggggtatgtggaaactctgttccacagaagaagataccttcccgagcttgcatctaaaaattttcaccagcgttctttcggaaaaagggttgcaatgaatacgcccatacagggcactgcagccgatattattaaaattgcgatggtgaaggtatacaaggctttgaaagaatccggccttaaatccaggcttatcctccaggtccatgacgaacttgttattgagacttttgaagacgaactggagactgtcaaggaacttgtcaaaaagtgcatggaagaggccgttgaattgagtgtgccgcttgttgtcgacgtttcaatcgggaaaaactggtatgaagcctcctgatatggatcc

SEQ ID NO: 511 - DNA, 2772 bp, Artificial Sequence
  Description of Artificial Sequence: Synthetic Clostridium stercorarium DNA Polymerase V654R
atgaaatacctgctgccgaccgctgctgctggtctgctgctcctcgctgcccagccggcgatggccatggatccaaaaataatccttatagacggaaacagtattttaaaccgcggtttttatgccctgtcggggcgatccatgctgactacgtccacaggtctgtataccaatgcggttttcgcttttgtaaatatattgaacaaatatatcgaagaggaaaaccctgattatattgccgttgctttcgatcttagggcaaaaactttccggcacggtctatatgagggatacaaagcgcagcggaaaggcatgcccgatgaacttgcaatgcagatacccctcgcgaaggaagtactgagggcgatgaatattgccataatagagcatgaaggttatgaagccgacgatataatcggcagcctttcgttaaaggccgaaaaagagaattttgacgtaataatccttacgggggacagggattctttccagctgatcagcgacagggtgaaagttatcctgccttcgacgaaagccggaaaaacagagaccaacgtatatgataaacaggccatcattgacaaatacggagttttaccccatcagcttattgacgttaaaggcttaatgggagattcgtcagataatatacccggcgttccgggagtgggtgagaaaacggcgttaagccttatttcagcctacggtacactggaaggtgtttacgagcatattgatgaaataaaacagcctaagctgaaagcatcgctgattgaatataaggatcaggcgtttttaagccgtaagctgggtactattgtaagaaatctggagctgtgtgcttcgctggaggatctgaaaagaaaagaaataaaccgcaaagagcttttgaatgttttcagaaaactcgaatttgaaagtatcatatcaaaaatgaatcttgcttccgctgaggtgacagaattacctcccgcgccggaagagcttaaaataacccatatttcagcggcagaggatcttaagaaatggattgcttacctgcttaaccagaaaaacatttccgtccttcaactgattgaccgggaggattcatacagttcccgtctttcagggctggctttgtgcaccggggatgaggttttttatatcgagaccgggactgcactccccgagaatttgattgcaacagagctgaaagaactgtggcagaatgaaaatattcacaaaatcggacacaatataaaagaatttataacctggctgctgaaacacgatgttgaactgaacggcctttatttcgacactatgattgccgaatacctgatagattccataagaaacggctatcctatagcaagcctttctcacaaatacctgaatcgcagcgttccgtcgctggacgaacttttgggcaagggaaagggagcaaaaaagtactctgaaattccgcccgaaaggctgaaagattacagcgcttataacgtcaaagccatttttgacatatggccgatgcagaaaaaagttcttcaggaaaaccggcaggaggagctttttaatgacatagagcttcctcttataaccgtacttgccagtatggaataccacggtttcaaagttgacgccgcaaaacttcacgaatacggcgaagttcttctgtcacgcataaaagacctggaaaaggtaatttacatgctggccggtgaagaattcaacatcaattcaacgaagcagcttggtaccatattattcgaaaaactgaagcttcccgttgtaaaaagtacaaagaccggatactccaccgacgtcgaggttcttgaagagctttattacaagcatgatataataccatgcataatagaataccgccagcttacaaaactttacaccacctacgccgaaggtcttgaaaaagtgataaatcctgtaaccggtaaaattcattcaagttttaaccagacgcgtacggctacaggccgcatcagcagtaccgaaccaaatttacagaatatcccagtcagacacgaaatgggaagggaaatacggaaagcttttattccgtcgtcggaaaacgctgtttttgttgatgccgattattcacagatagagcttcgcgtgcttgcccatataacaggcgatgaagccctgataaatgctttcgttaagggggaagatattcatacggccacggcgtcgctggtatttgacgtagctcccgaagatgtgacgccggaactgcgcagaaaggcaaaagccgtaaatttcggcatagtgtacgggatcagtgattacgggctggcacgggatttgggaattacccggaaggaagcaaagcggtatatagacgactattttgccaaataccccaaagtaaaaacctatgtggatgaaattgtgcgggtcggccaggaacaggggtatgtggaaactctgttccacagaagaagataccttcccgagcttgcatctaaaaattttcaccagcgttctttcggaaaaagggttgcaatgaatacgcccatacagggcactgcagccgatattattaaaattgcgatggtgaaggtatacaaggctttgaaagaatccggccttaaatccaggcttatcctccaggtccatgacgaacttgttattgagacttttgaagacgaactggagactgtcaaggaacttgtcaaaaagtgcatggaagaggccgttgaattgagtgtgccgcttgttgtcgacgtttcaatcgggaaaaactggtatgaagcctcctgatatggatcc

SEQ ID NO: 512 - DNA, 2772 bp, Artificial Sequence
  Description of Artificial Sequence: Synthetic Clostridium stercorarium DNA Polymerase V654S
atgaaatacctgctgccgaccgctgctgctggtctgctgctcctcgctgcccagccggcgatggccatggatccaaaaataatccttatagacggaaacagtattttaaaccgcggtttttatgccctgtcggggcgatccatgctgactacgtccacaggtctgtataccaatgcggttttcgcttttgtaaatatattgaacaaatatatcgaagaggaaaaccctgattatattgccgttgctttcgatcttagggcaaaaactttccggcacggtctatatgagggatacaaagcgcagcggaaaggcatgcccgatgaacttgcaatgcagatacccctcgcgaaggaagtactgagggcgatgaatattgccataatagagcatgaaggttatgaagccgacgatataatcggcagcctttcgttaaaggccgaaaaagagaattttgacgtaataatccttacgggggacagggattctttccagctgatcagcgacagggtgaaagttatcctgccttcgacgaaagccggaaaaacagagaccaacgtatatgataaacaggccatcattgacaaatacggagttttaccccatcagcttattgacgttaaaggcttaatgggagattcgtcagataatatacccggcgttccgggagtgggtgagaaaacggcgttaagccttatttcagcctacggtacactggaaggtgtttacgagcatattgatgaaataaaacagcctaagctgaaagcatcgctgattgaatataaggatcaggcgtttttaagccgtaagctgggtactattgtaagaaatctggagctgtgtgcttcgctggaggatctgaaaagaaaagaaataaaccgcaaagagcttttgaatgttttcagaaaactcgaatttgaaagtatcatatcaaaaatgaatcttgcttccgctgaggtgacagaattacctcccgcgccggaagagcttaaaataacccatatttcagcggcagaggatcttaagaaatggattgcttacctgcttaaccagaaaaacatttccgtccttcaactgattgaccgggaggattcatacagttcccgtctttcagggctggctttgtgcaccggggatgaggttttttatatcgagaccgggactgcactccccgagaatttgattgcaacagagctgaaagaactgtggcagaatgaaaatattcacaaaatcggacacaatataaaagaatttataacctggctgctgaaacacgatgttgaactgaacggcctttatttcgacactatgattgccgaatacctgatagattccataagaaacggctatcctatagcaagcctttctcacaaatacctgaatcgcagcgttccgtcgctggacgaacttttgggcaagggaaagggagcaaaaaagtactctgaaattccgcccgaaaggctgaaagattacagcgcttataacgtcaaagccatttttgacatatggccgatgcagaaaaaagttcttcaggaaaaccggcaggaggagctttttaatgacatagagcttcctcttataaccgtacttgccagtatggaataccacggtttcaaagttgacgccgcaaaacttcacgaatacggcgaagttcttctgtcacgcataaaagacctggaaaaggtaatttacatgctggccggtgaagaattcaacatcaattcaacgaagcagcttggtaccatattattcgaaaaactgaagcttcccgttgtaaaaagtacaaagaccggatactccaccgacgtcgaggttcttgaagagctttattacaagcatgatataataccatgcataatagaataccgccagcttacaaaactttacaccacctacgccgaaggtcttgaaaaagtgataaatcctgtaaccggtaaaattcattcaagttttaaccagacgtctacggctacaggccgcatcagcagtaccgaaccaaatttacagaatatcccagtcagacacgaaatgggaagggaaatacggaaagcttttattccgtcgtcggaaaacgctgtttttgttgatgccgattattcacagatagagcttcgcgtgcttgcccatataacaggcgatgaagccctgataaatgctttcgttaagggggaagatattcatacggccacggcgtcgctggtatttgacgtagctcccgaagatgtgacgccggaactgcgcagaaaggcaaaagccgtaaatttcggcatagtgtacgggatcagtgattacgggctggcacgggatttgggaattacccggaaggaagcaaagcggtatatagacgactattttgccaaataccccaaagtaaaaacctatgtggatgaaattgtgcgggtcggccaggaacaggggtatgtggaaactctgttccacagaagaagataccttcccgagcttgcatctaaaaattttcaccagcgttctttcggaaaaagggttgcaatgaatacgcccatacagggcactgcagccgatattattaaaattgcgatggtgaaggtatacaaggctttgaaagaatccggccttaaatccaggcttatcctccaggtccatgacgaacttgttattgagacttttgaagacgaactggagactgtcaaggaacttgtcaaaaagtgcatggaagaggccgttgaattgagtgtgccgcttgttgtcgacgtttcaatcgggaaaaactggtatgaagcctcctgatatggatcc

SEQ ID NO: 513 - DNA, 2772 bp, Artificial Sequence
  Description of Artificial Sequence: Synthetic Clostridium stercorarium DNA Polymerase V654T
atgaaatacctgctgccgaccgctgctgctggtctgctgctcctcgctgcccagccggcgatggccatggatccaaaaataatccttatagacggaaacagtattttaaaccgcggtttttatgccctgtcggggcgatccatgctgactacgtccacaggtctgtataccaatgcggttttcgcttttgtaaatatattgaacaaatatatcgaagaggaaaaccctgattatattgccgttgctttcgatcttagggcaaaaactttccggcacggtctatatgagggatacaaagcgcagcggaaaggcatgcccgatgaacttgcaatgcagatacccctcgcgaaggaagtactgagggcgatgaatattgccataatagagcatgaaggttatgaagccgacgatataatcggcagcctttcgttaaaggccgaaaaagagaattttgacgtaataatccttacgggggacagggattctttccagctgatcagcgacagggtgaaagttatcctgccttcgacgaaagccggaaaaacagagaccaacgtatatgataaacaggccatcattgacaaatacggagttttaccccatcagcttattgacgttaaaggcttaatgggagattcgtcagataatatacccggcgttccgggagtgggtgagaaaacggcgttaagccttatttcagcctacggtacactggaaggtgtttacgagcatattgatgaaataaaacagcctaagctgaaagcatcgctgattgaatataaggatcaggcgtttttaagccgtaagctgggtactattgtaagaaatctggagctgtgtgcttcgctggaggatctgaaaagaaaagaaataaaccgcaaagagcttttgaatgttttcagaaaactcgaatttgaaagtatcatatcaaaaatgaatcttgcttccgctgaggtgacagaattacctcccgcgccggaagagcttaaaataacccatatttcagcggcagaggatcttaagaaatggattgcttacctgcttaaccagaaaaacatttccgtccttcaactgattgaccgggaggattcatacagttcccgtctttcagggctggctttgtgcaccggggatgaggttttttatatcgagaccgggactgcactccccgagaatttgattgcaacagagctgaaagaactgtggcagaatgaaaatattcacaaaatcggacacaatataaaagaatttataacctggctgctgaaacacgatgttgaactgaacggcctttatttcgacactatgattgccgaatacctgatagattccataagaaacggctatcctatagcaagcctttctcacaaatacctgaatcgcagcgttccgtcgctggacgaacttttgggcaagggaaagggagcaaaaaagtactctgaaattccgcccgaaaggctgaaagattacagcgcttataacgtcaaagccatttttgacatatggccgatgcagaaaaaagttcttcaggaaaaccggcaggaggagctttttaatgacatagagcttcctcttataaccgtacttgccagtatggaataccacggtttcaaagttgacgccgcaaaacttcacgaatacggcgaagttcttctgtcacgcataaaagacctggaaaaggtaatttacatgctggccggtgaagaattcaacatcaattcaacgaagcagcttggtaccatattattcgaaaaactgaagcttcccgttgtaaaaagtacaaagaccggatactccaccgacgtcgaggttcttgaagagctttattacaagcatgatataataccatgcataatagaataccgccagcttacaaaactttacaccacctacgccgaaggtcttgaaaaagtgataaatcctgtaaccggtaaaattcattcaagttttaaccagacgactacggctacaggccgcatcagcagtaccgaaccaaatttacagaatatcccagtcagacacgaaatgggaagggaaatacggaaagcttttattccgtcgtcggaaaacgctgtttttgttgatgccgattattcacagatagagcttcgcgtgcttgcccatataacaggcgatgaagccctgataaatgctttcgttaagggggaagatattcatacggccacggcgtcgctggtatttgacgtagctcccgaagatgtgacgccggaactgcgcagaaaggcaaaagccgtaaatttcggcatagtgtacgggatcagtgattacgggctggcacgggatttgggaattacccggaaggaagcaaagcggtatatagacgactattttgccaaataccccaaagtaaaaacctatgtggatgaaattgtgcgggtcggccaggaacaggggtatgtggaaactctgttccacagaagaagataccttcccgagcttgcatctaaaaattttcaccagcgttctttcggaaaaagggttgcaatgaatacgcccatacagggcactgcagccgatattattaaaattgcgatggtgaaggtatacaaggctttgaaagaatccggccttaaatccaggcttatcctccaggtccatgacgaacttgttattgagacttttgaagacgaactggagactgtcaaggaacttgtcaaaaagtgcatggaagaggccgttgaattgagtgtgccgcttgttgtcgacgtttcaatcgggaaaaactggtatgaagcctcctgatatggatcc

SEQ ID NO: 514 - DNA, 2772 bp, Artificial Sequence
  Description of Artificial Sequence: Synthetic Clostridium stercorarium DNA Polymerase V654W
atgaaatacctgctgccgaccgctgctgctggtctgctgctcctcgctgcccagccggcgatggccatggatccaaaaataatccttatagacggaaacagtattttaaaccgcggtttttatgccctgtcggggcgatccatgctgactacgtccacaggtctgtataccaatgcggttttcgcttttgtaaatatattgaacaaatatatcgaagaggaaaaccctgattatattgccgttgctttcgatcttagggcaaaaactttccggcacggtctatatgagggatacaaagcgcagcggaaaggcatgcccgatgaacttgcaatgcagatacccctcgcgaaggaagtactgagggcgatgaatattgccataatagagcatgaaggttatgaagccgacgatataatcggcagcctttcgttaaaggccgaaaaagagaattttgacgtaataatccttacgggggacagggattctttccagctgatcagcgacagggtgaaagttatcctgccttcgacgaaagccggaaaaacagagaccaacgtatatgataaacaggccatcattgacaaatacggagttttaccccatcagcttattgacgttaaaggcttaatgggagattcgtcagataatatacccggcgttccgggagtgggtgagaaaacggcgttaagccttatttcagcctacggtacactggaaggtgtttacgagcatattgatgaaataaaacagcctaagctgaaagcatcgctgattgaatataaggatcaggcgtttttaagccgtaagctgggtactattgtaagaaatctggagctgtgtgcttcgctggaggatctgaaaagaaaagaaataaaccgcaaagagcttttgaatgttttcagaaaactcgaatttgaaagtatcatatcaaaaatgaatcttgcttccgctgaggtgacagaattacctcccgcgccggaagagcttaaaataacccatatttcagcggcagaggatcttaagaaatggattgcttacctgcttaaccagaaaaacatttccgtccttcaactgattgaccgggaggattcatacagttcccgtctttcagggctggctttgtgcaccggggatgaggttttttatatcgagaccgggactgcactccccgagaatttgattgcaacagagctgaaagaactgtggcagaatgaaaatattcacaaaatcggacacaatataaaagaatttataacctggctgctgaaacacgatgttgaactgaacggcctttatttcgacactatgattgccgaatacctgatagattccataagaaacggctatcctatagcaagcctttctcacaaatacctgaatcgcagcgttccgtcgctggacgaacttttgggcaagggaaagggagcaaaaaagtactctgaaattccgcccgaaaggctgaaagattacagcgcttataacgtcaaagccatttttgacatatggccgatgcagaaaaaagttcttcaggaaaaccggcaggaggagctttttaatgacatagagcttcctcttataaccgtacttgccagtatggaataccacggtttcaaagttgacgccgcaaaacttcacgaatacggcgaagttcttctgtcacgcataaaagacctggaaaaggtaatttacatgctggccggtgaagaattcaacatcaattcaacgaagcagcttggtaccatattattcgaaaaactgaagcttcccgttgtaaaaagtacaaagaccggatactccaccgacgtcgaggttcttgaagagctttattacaagcatgatataataccatgcataatagaataccgccagcttacaaaactttacaccacctacgccgaaggtcttgaaaaagtgataaatcctgtaaccggtaaaattcattcaagttttaaccagacgtggacggctacaggccgcatcagcagtaccgaaccaaatttacagaatatcccagtcagacacgaaatgggaagggaaatacggaaagcttttattccgtcgtcggaaaacgctgtttttgttgatgccgattattcacagatagagcttcgcgtgcttgcccatataacaggcgatgaagccctgataaatgctttcgttaagggggaagatattcatacggccacggcgtcgctggtatttgacgtagctcccgaagatgtgacgccggaactgcgcagaaaggcaaaagccgtaaatttcggcatagtgtacgggatcagtgattacgggctggcacgggatttgggaattacccggaaggaagcaaagcggtatatagacgactattttgccaaataccccaaagtaaaaacctatgtggatgaaattgtgcgggtcggccaggaacaggggtatgtggaaactctgttccacagaagaagataccttcccgagcttgcatctaaaaattttcaccagcgttctttcggaaaaagggttgcaatgaatacgcccatacagggcactgcagccgatattattaaaattgcgatggtgaaggtatacaaggctttgaaagaatccggccttaaatccaggcttatcctccaggtccatgacgaacttgttattgagacttttgaagacgaactggagactgtcaaggaacttgtcaaaaagtgcatggaagaggccgttgaattgagtgtgccgcttgttgtcgacgtttcaatcgggaaaaactggtatgaagcctcctgatatggatcc

SEQ ID NO: 515 - DNA, 2772 bp, Artificial Sequence
  Description of Artificial Sequence: Synthetic Clostridium stercorarium DNA Polymerase V654Y
atgaaatacctgctgccgaccgctgctgctggtctgctgctcctcgctgcccagccggcgatggccatggatccaaaaataatccttatagacggaaacagtattttaaaccgcggtttttatgccctgtcggggcgatccatgctgactacgtccacaggtctgtataccaatgcggttttcgcttttgtaaatatattgaacaaatatatcgaagaggaaaaccctgattatattgccgttgctttcgatcttagggcaaaaactttccggcacggtctatatgagggatacaaagcgcagcggaaaggcatgcccgatgaacttgcaatgcagatacccctcgcgaaggaagtactgagggcgatgaatattgccataatagagcatgaaggttatgaagccgacgatataatcggcagcctttcgttaaaggccgaaaaagagaattttgacgtaataatccttacgggggacagggattctttccagctgatcagcgacagggtgaaagttatcctgccttcgacgaaagccggaaaaacagagaccaacgtatatgataaacaggccatcattgacaaatacggagttttaccccatcagcttattgacgttaaaggcttaatgggagattcgtcagataatatacccggcgttccgggagtgggtgagaaaacggcgttaagccttatttcagcctacggtacactggaaggtgtttacgagcatattgatgaaataaaacagcctaagctgaaagcatcgctgattgaatataaggatcaggcgtttttaagccgtaagctgggtactattgtaagaaatctggagctgtgtgcttcgctggaggatctgaaaagaaaagaaataaaccgcaaagagcttttgaatgttttcagaaaactcgaatttgaaagtatcatatcaaaaatgaatcttgcttccgctgaggtgacagaattacctcccgcgccggaagagcttaaaataacccatatttcagcggcagaggatcttaagaaatggattgcttacctgcttaaccagaaaaacatttccgtccttcaactgattgaccgggaggattcatacagttcccgtctttcagggctggctttgtgcaccggggatgaggttttttatatcgagaccgggactgcactccccgagaatttgattgcaacagagctgaaagaactgtggcagaatgaaaatattcacaaaatcggacacaatataaaagaatttataacctggctgctgaaacacgatgttgaactgaacggcctttatttcgacactatgattgccgaatacctgatagattccataagaaacggctatcctatagcaagcctttctcacaaatacctgaatcgcagcgttccgtcgctggacgaacttttgggcaagggaaagggagcaaaaaagtactctgaaattccgcccgaaaggctgaaagattacagcgcttataacgtcaaagccatttttgacatatggccgatgcagaaaaaagttcttcaggaaaaccggcaggaggagctttttaatgacatagagcttcctcttataaccgtacttgccagtatggaataccacggtttcaaagttgacgccgcaaaacttcacgaatacggcgaagttcttctgtcacgcataaaagacctggaaaaggtaatttacatgctggccggtgaagaattcaacatcaattcaacgaagcagcttggtaccatattattcgaaaaactgaagcttcccgttgtaaaaagtacaaagaccggatactccaccgacgtcgaggttcttgaagagctttattacaagcatgatataataccatgcataatagaataccgccagcttacaaaactttacaccacctacgccgaaggtcttgaaaaagtgataaatcctgtaaccggtaaaattcattcaagttttaaccagacgtatacggctacaggccgcatcagcagtaccgaaccaaatttacagaatatcccagtcagacacgaaatgggaagggaaatacggaaagcttttattccgtcgtcggaaaacgctgtttttgttgatgccgattattcacagatagagcttcgcgtgcttgcccatataacaggcgatgaagccctgataaatgctttcgttaagggggaagatattcatacggccacggcgtcgctggtatttgacgtagctcccgaagatgtgacgccggaactgcgcagaaaggcaaaagccgtaaatttcggcatagtgtacgggatcagtgattacgggctggcacgggatttgggaattacccggaaggaagcaaagcggtatatagacgactattttgccaaataccccaaagtaaaaacctatgtggatgaaattgtgcgggtcggccaggaacaggggtatgtggaaactctgttccacagaagaagataccttcccgagcttgcatctaaaaattttcaccagcgttctttcggaaaaagggttgcaatgaatacgcccatacagggcactgcagccgatattattaaaattgcgatggtgaaggtatacaaggctttgaaagaatccggccttaaatccaggcttatcctccaggtccatgacgaacttgttattgagacttttgaagacgaactggagactgtcaaggaacttgtcaaaaagtgcatggaagaggccgttgaattgagtgtgccgcttgttgtcgacgtttcaatcgggaaaaactggtatgaagcctcctgatatggatcc

SEQ ID NO: 516 - DNA, 2772 bp, Artificial Sequence
  Description of Artificial Sequence: Synthetic Clostridium stercorarium DNA Polymerase T663A
atgaaatacctgctgccgaccgctgctgctggtctgctgctcctcgctgcccagccggcgatggccatggatccaaaaataatccttatagacggaaacagtattttaaaccgcggtttttatgccctgtcggggcgatccatgctgactacgtccacaggtctgtataccaatgcggttttcgcttttgtaaatatattgaacaaatatatcgaagaggaaaaccctgattatattgccgttgctttcgatcttagggcaaaaactttccggcacggtctatatgagggatacaaagcgcagcggaaaggcatgcccgatgaacttgcaatgcagatacccctcgcgaaggaagtactgagggcgatgaatattgccataatagagcatgaaggttatgaagccgacgatataatcggcagcctttcgttaaaggccgaaaaagagaattttgacgtaataatccttacgggggacagggattctttccagctgatcagcgacagggtgaaagttatcctgccttcgacgaaagccggaaaaacagagaccaacgtatatgataaacaggccatcattgacaaatacggagttttaccccatcagcttattgacgttaaaggcttaatgggagattcgtcagataatatacccggcgttccgggagtgggtgagaaaacggcgttaagccttatttcagcctacggtacactggaaggtgtttacgagcatattgatgaaataaaacagcctaagctgaaagcatcgctgattgaatataaggatcaggcgtttttaagccgtaagctgggtactattgtaagaaatctggagctgtgtgcttcgctggaggatctgaaaagaaaagaaataaaccgcaaagagcttttgaatgttttcagaaaactcgaatttgaaagtatcatatcaaaaatgaatcttgcttccgctgaggtgacagaattacctcccgcgccggaagagcttaaaataacccatatttcagcggcagaggatcttaagaaatggattgcttacctgcttaaccagaaaaacatttccgtccttcaactgattgaccgggaggattcatacagttcccgtctttcagggctggctttgtgcaccggggatgaggttttttatatcgagaccgggactgcactccccgagaatttgattgcaacagagctgaaagaactgtggcagaatgaaaatattcacaaaatcggacacaatataaaagaatttataacctggctgctgaaacacgatgttgaactgaacggcctttatttcgacactatgattgccgaatacctgatagattccataagaaacggctatcctatagcaagcctttctcacaaatacctgaatcgcagcgttccgtcgctggacgaacttttgggcaagggaaagggagcaaaaaagtactctgaaattccgcccgaaaggctgaaagattacagcgcttataacgtcaaagccatttttgacatatggccgatgcagaaaaaagttcttcaggaaaaccggcaggaggagctttttaatgacatagagcttcctcttataaccgtacttgccagtatggaataccacggtttcaaagttgacgccgcaaaacttcacgaatacggcgaagttcttctgtcacgcataaaagacctggaaaaggtaatttacatgctggccggtgaagaattcaacatcaattcaacgaagcagcttggtaccatattattcgaaaaactgaagcttcccgttgtaaaaagtacaaagaccggatactccaccgacgtcgaggttcttgaagagctttattacaagcatgatataataccatgcataatagaataccgccagcttacaaaactttacaccacctacgccgaaggtcttgaaaaagtgataaatcctgtaaccggtaaaattcattcaagttttaaccagacggttacggctacaggccgcatcagcagtgctgaaccaaatttacagaatatcccagtcagacacgaaatgggaagggaaatacggaaagcttttattccgtcgtcggaaaacgctgtttttgttgatgccgattattcacagatagagcttcgcgtgcttgcccatataacaggcgatgaagccctgataaatgctttcgttaagggggaagatattcatacggccacggcgtcgctggtatttgacgtagctcccgaagatgtgacgccggaactgcgcagaaaggcaaaagccgtaaatttcggcatagtgtacgggatcagtgattacgggctggcacgggatttgggaattacccggaaggaagcaaagcggtatatagacgactattttgccaaataccccaaagtaaaaacctatgtggatgaaattgtgcgggtcggccaggaacaggggtatgtggaaactctgttccacagaagaagataccttcccgagcttgcatctaaaaattttcaccagcgttctttcggaaaaagggttgcaatgaatacgcccatacagggcactgcagccgatattattaaaattgcgatggtgaaggtatacaaggctttgaaagaatccggccttaaatccaggcttatcctccaggtccatgacgaacttgttattgagacttttgaagacgaactggagactgtcaaggaacttgtcaaaaagtgcatggaagaggccgttgaattgagtgtgccgcttgttgtcgacgtttcaatcgggaaaaactggtatgaagcctcctgatatggatcc

SEQ ID NO: 517 - DNA, 2772 bp, Artificial Sequence
  Description of Artificial Sequence: Synthetic Clostridium stercorarium DNA Polymerase T663C
atgaaatacctgctgccgaccgctgctgctggtctgctgctcctcgctgcccagccggcgatggccatggatccaaaaataatccttatagacggaaacagtattttaaaccgcggtttttatgccctgtcggggcgatccatgctgactacgtccacaggtctgtataccaatgcggttttcgcttttgtaaatatattgaacaaatatatcgaagaggaaaaccctgattatattgccgttgctttcgatcttagggcaaaaactttccggcacggtctatatgagggatacaaagcgcagcggaaaggcatgcccgatgaacttgcaatgcagatacccctcgcgaaggaagtactgagggcgatgaatattgccataatagagcatgaaggttatgaagccgacgatataatcggcagcctttcgttaaaggccgaaaaagagaattttgacgtaataatccttacgggggacagggattctttccagctgatcagcgacagggtgaaagttatcctgccttcgacgaaagccggaaaaacagagaccaacgtatatgataaacaggccatcattgacaaatacggagttttaccccatcagcttattgacgttaaaggcttaatgggagattcgtcagataatatacccggcgttccgggagtgggtgagaaaacggcgttaagccttatttcagcctacggtacactggaaggtgtttacgagcatattgatgaaataaaacagcctaagctgaaagcatcgctgattgaatataaggatcaggcgtttttaagccgtaagctgggtactattgtaagaaatctggagctgtgtgcttcgctggaggatctgaaaagaaaagaaataaaccgcaaagagcttttgaatgttttcagaaaactcgaatttgaaagtatcatatcaaaaatgaatcttgcttccgctgaggtgacagaattacctcccgcgccggaagagcttaaaataacccatatttcagcggcagaggatcttaagaaatggattgcttacctgcttaaccagaaaaacatttccgtccttcaactgattgaccgggaggattcatacagttcccgtctttcagggctggctttgtgcaccggggatgaggttttttatatcgagaccgggactgcactccccgagaatttgattgcaacagagctgaaagaactgtggcagaatgaaaatattcacaaaatcggacacaatataaaagaatttataacctggctgctgaaacacgatgttgaactgaacggcctttatttcgacactatgattgccgaatacctgatagattccataagaaacggctatcctatagcaagcctttctcacaaatacctgaatcgcagcgttccgtcgctggacgaacttttgggcaagggaaagggagcaaaaaagtactctgaaattccgcccgaaaggctgaaagattacagcgcttataacgtcaaagccatttttgacatatggccgatgcagaaaaaagttcttcaggaaaaccggcaggaggagctttttaatgacatagagcttcctcttataaccgtacttgccagtatggaataccacggtttcaaagttgacgccgcaaaacttcacgaatacggcgaagttcttctgtcacgcataaaagacctggaaaaggtaatttacatgctggccggtgaagaattcaacatcaattcaacgaagcagcttggtaccatattattcgaaaaactgaagcttcccgttgtaaaaagtacaaagaccggatactccaccgacgtcgaggttcttgaagagctttattacaagcatgatataataccatgcataatagaataccgccagcttacaaaactttacaccacctacgccgaaggtcttgaaaaagtgataaatcctgtaaccggtaaaattcattcaagttttaaccagacggttacggctacaggccgcatcagcagttgtgaaccaaatttacagaatatcccagtcagacacgaaatgggaagggaaatacggaaagcttttattccgtcgtcggaaaacgctgtttttgttgatgccgattattcacagatagagcttcgcgtgcttgcccatataacaggcgatgaagccctgataaatgctttcgttaagggggaagatattcatacggccacggcgtcgctggtatttgacgtagctcccgaagatgtgacgccggaactgcgcagaaaggcaaaagccgtaaatttcggcatagtgtacgggatcagtgattacgggctggcacgggatttgggaattacccggaaggaagcaaagcggtatatagacgactattttgccaaataccccaaagtaaaaacctatgtggatgaaattgtgcgggtcggccaggaacaggggtatgtggaaactctgttccacagaagaagataccttcccgagcttgcatctaaaaattttcaccagcgttctttcggaaaaagggttgcaatgaatacgcccatacagggcactgcagccgatattattaaaattgcgatggtgaaggtatacaaggctttgaaagaatccggccttaaatccaggcttatcctccaggtccatgacgaacttgttattgagacttttgaagacgaactggagactgtcaaggaacttgtcaaaaagtgcatggaagaggccgttgaattgagtgtgccgcttgttgtcgacgtttcaatcgggaaaaactggtatgaagcctcctgatatggatcc

SEQ ID NO: 518 - DNA, 2772 bp, Artificial Sequence
  Description of Artificial Sequence: Synthetic Clostridium stercorarium DNA Polymerase T663D
atgaaatacctgctgccgaccgctgctgctggtctgctgctcctcgctgcccagccggcgatggccatggatccaaaaataatccttatagacggaaacagtattttaaaccgcggtttttatgccctgtcggggcgatccatgctgactacgtccacaggtctgtataccaatgcggttttcgcttttgtaaatatattgaacaaatatatcgaagaggaaaaccctgattatattgccgttgctttcgatcttagggcaaaaactttccggcacggtctatatgagggatacaaagcgcagcggaaaggcatgcccgatgaacttgcaatgcagatacccctcgcgaaggaagtactgagggcgatgaatattgccataatagagcatgaaggttatgaagccgacgatataatcggcagcctttcgttaaaggccgaaaaagagaattttgacgtaataatccttacgggggacagggattctttccagctgatcagcgacagggtgaaagttatcctgccttcgacgaaagccggaaaaacagagaccaacgtatatgataaacaggccatcattgacaaatacggagttttaccccatcagcttattgacgttaaaggcttaatgggagattcgtcagataatatacccggcgttccgggagtgggtgagaaaacggcgttaagccttatttcagcctacggtacactggaaggtgtttacgagcatattgatgaaataaaacagcctaagctgaaagcatcgctgattgaatataaggatcaggcgtttttaagccgtaagctgggtactattgtaagaaatctggagctgtgtgcttcgctggaggatctgaaaagaaaagaaataaaccgcaaagagcttttgaatgttttcagaaaactcgaatttgaaagtatcatatcaaaaatgaatcttgcttccgctgaggtgacagaattacctcccgcgccggaagagcttaaaataacccatatttcagcggcagaggatcttaagaaatggattgcttacctgcttaaccagaaaaacatttccgtccttcaactgattgaccgggaggattcatacagttcccgtctttcagggctggctttgtgcaccggggatgaggttttttatatcgagaccgggactgcactccccgagaatttgattgcaacagagctgaaagaactgtggcagaatgaaaatattcacaaaatcggacacaatataaaagaatttataacctggctgctgaaacacgatgttgaactgaacggcctttatttcgacactatgattgccgaatacctgatagattccataagaaacggctatcctatagcaagcctttctcacaaatacctgaatcgcagcgttccgtcgctggacgaacttttgggcaagggaaagggagcaaaaaagtactctgaaattccgcccgaaaggctgaaagattacagcgcttataacgtcaaagccatttttgacatatggccgatgcagaaaaaagttcttcaggaaaaccggcaggaggagctttttaatgacatagagcttcctcttataaccgtacttgccagtatggaataccacggtttcaaagttgacgccgcaaaacttcacgaatacggcgaagttcttctgtcacgcataaaagacctggaaaaggtaatttacatgctggccggtgaagaattcaacatcaattcaacgaagcagcttggtaccatattattcgaaaaactgaagcttcccgttgtaaaaagtacaaagaccggatactccaccgacgtcgaggttcttgaagagctttattacaagcatgatataataccatgcataatagaataccgccagcttacaaaactttacaccacctacgccgaaggtcttgaaaaagtgataaatcctgtaaccggtaaaattcattcaagttttaaccagacggttacggctacaggccgcatcagcagtgatgaaccaaatttacagaatatcccagtcagacacgaaatgggaagggaaatacggaaagcttttattccgtcgtcggaaaacgctgtttttgttgatgccgattattcacagatagagcttcgcgtgcttgcccatataacaggcgatgaagccctgataaatgctttcgttaagggggaagatattcatacggccacggcgtcgctggtatttgacgtagctcccgaagatgtgacgccggaactgcgcagaaaggcaaaagccgtaaatttcggcatagtgtacgggatcagtgattacgggctggcacgggatttgggaattacccggaaggaagcaaagcggtatatagacgactattttgccaaataccccaaagtaaaaacctatgtggatgaaattgtgcgggtcggccaggaacaggggtatgtggaaactctgttccacagaagaagataccttcccgagcttgcatctaaaaattttcaccagcgttctttcggaaaaagggttgcaatgaatacgcccatacagggcactgcagccgatattattaaaattgcgatggtgaaggtatacaaggctttgaaagaatccggccttaaatccaggcttatcctccaggtccatgacgaacttgttattgagacttttgaagacgaactggagactgtcaaggaacttgtcaaaaagtgcatggaagaggccgttgaattgagtgtgccgcttgttgtcgacgtttcaatcgggaaaaactggtatgaagcctcctgatatggatcc

SEQ ID NO: 519 - DNA, 2772 bp, Artificial Sequence
  Description of Artificial Sequence: Synthetic Clostridium stercorarium DNA Polymerase T663F
atgaaatacctgctgccgaccgctgctgctggtctgctgctcctcgctgcccagccggcgatggccatggatccaaaaataatccttatagacggaaacagtattttaaaccgcggtttttatgccctgtcggggcgatccatgctgactacgtccacaggtctgtataccaatgcggttttcgcttttgtaaatatattgaacaaatatatcgaagaggaaaaccctgattatattgccgttgctttcgatcttagggcaaaaactttccggcacggtctatatgagggatacaaagcgcagcggaaaggcatgcccgatgaacttgcaatgcagatacccctcgcgaaggaagtactgagggcgatgaatattgccataatagagcatgaaggttatgaagccgacgatataatcggcagcctttcgttaaaggccgaaaaagagaattttgacgtaataatccttacgggggacagggattctttccagctgatcagcgacagggtgaaagttatcctgccttcgacgaaagccggaaaaacagagaccaacgtatatgataaacaggccatcattgacaaatacggagttttaccccatcagcttattgacgttaaaggcttaatgggagattcgtcagataatatacccggcgttccgggagtgggtgagaaaacggcgttaagccttatttcagcctacggtacactggaaggtgtttacgagcatattgatgaaataaaacagcctaagctgaaagcatcgctgattgaatataaggatcaggcgtttttaagccgtaagctgggtactattgtaagaaatctggagctgtgtgcttcgctggaggatctgaaaagaaaagaaataaaccgcaaagagcttttgaatgttttcagaaaactcgaatttgaaagtatcatatcaaaaatgaatcttgcttccgctgaggtgacagaattacctcccgcgccggaagagcttaaaataacccatatttcagcggcagaggatcttaagaaatggattgcttacctgcttaaccagaaaaacatttccgtccttcaactgattgaccgggaggattcatacagttcccgtctttcagggctggctttgtgcaccggggatgaggttttttatatcgagaccgggactgcactccccgagaatttgattgcaacagagctgaaagaactgtggcagaatgaaaatattcacaaaatcggacacaatataaaagaatttataacctggctgctgaaacacgatgttgaactgaacggcctttatttcgacactatgattgccgaatacctgatagattccataagaaacggctatcctatagcaagcctttctcacaaatacctgaatcgcagcgttccgtcgctggacgaacttttgggcaagggaaagggagcaaaaaagtactctgaaattccgcccgaaaggctgaaagattacagcgcttataacgtcaaagccatttttgacatatggccgatgcagaaaaaagttcttcaggaaaaccggcaggaggagctttttaatgacatagagcttcctcttataaccgtacttgccagtatggaataccacggtttcaaagttgacgccgcaaaacttcacgaatacggcgaagttcttctgtcacgcataaaagacctggaaaaggtaatttacatgctggccggtgaagaattcaacatcaattcaacgaagcagcttggtaccatattattcgaaaaactgaagcttcccgttgtaaaaagtacaaagaccggatactccaccgacgtcgaggttcttgaagagctttattacaagcatgatataataccatgcataatagaataccgccagcttacaaaactttacaccacctacgccgaaggtcttgaaaaagtgataaatcctgtaaccggtaaaattcattcaagttttaaccagacggttacggctacaggccgcatcagcagttttgaaccaaatttacagaatatcccagtcagacacgaaatgggaagggaaatacggaaagcttttattccgtcgtcggaaaacgctgtttttgttgatgccgattattcacagatagagcttcgcgtgcttgcccatataacaggcgatgaagccctgataaatgctttcgttaagggggaagatattcatacggccacggcgtcgctggtatttgacgtagctcccgaagatgtgacgccggaactgcgcagaaaggcaaaagccgtaaatttcggcatagtgtacgggatcagtgattacgggctggcacgggatttgggaattacccggaaggaagcaaagcggtatatagacgactattttgccaaataccccaaagtaaaaacctatgtggatgaaattgtgcgggtcggccaggaacaggggtatgtggaaactctgttccacagaagaagataccttcccgagcttgcatctaaaaattttcaccagcgttctttcggaaaaagggttgcaatgaatacgcccatacagggcactgcagccgatattattaaaattgcgatggtgaaggtatacaaggctttgaaagaatccggccttaaatccaggcttatcctccaggtccatgacgaacttgttattgagacttttgaagacgaactggagactgtcaaggaacttgtcaaaaagtgcatggaagaggccgttgaattgagtgtgccgcttgttgtcgacgtttcaatcgggaaaaactggtatgaagcctcctgatatggatcc

SEQ ID NO: 520 - DNA, 2772 bp, Artificial Sequence
  Description of Artificial Sequence: Synthetic Clostridium stercorarium DNA Polymerase T663G
atgaaatacctgctgccgaccgctgctgctggtctgctgctcctcgctgcccagccggcgatggccatggatccaaaaataatccttatagacggaaacagtattttaaaccgcggtttttatgccctgtcggggcgatccatgctgactacgtccacaggtctgtataccaatgcggttttcgcttttgtaaatatattgaacaaatatatcgaagaggaaaaccctgattatattgccgttgctttcgatcttagggcaaaaactttccggcacggtctatatgagggatacaaagcgcagcggaaaggcatgcccgatgaacttgcaatgcagatacccctcgcgaaggaagtactgagggcgatgaatattgccataatagagcatgaaggttatgaagccgacgatataatcggcagcctttcgttaaaggccgaaaaagagaattttgacgtaataatccttacgggggacagggattctttccagctgatcagcgacagggtgaaagttatcctgccttcgacgaaagccggaaaaacagagaccaacgtatatgataaacaggccatcattgacaaatacggagttttaccccatcagcttattgacgttaaaggcttaatgggagattcgtcagataatatacccggcgttccgggagtgggtgagaaaacggcgttaagccttatttcagcctacggtacactggaaggtgtttacgagcatattgatgaaataaaacagcctaagctgaaagcatcgctgattgaatataaggatcaggcgtttttaagccgtaagctgggtactattgtaagaaatctggagctgtgtgcttcgctggaggatctgaaaagaaaagaaataaaccgcaaagagcttttgaatgttttcagaaaactcgaatttgaaagtatcatatcaaaaatgaatcttgcttccgctgaggtgacagaattacctcccgcgccggaagagcttaaaataacccatatttcagcggcagaggatcttaagaaatggattgcttacctgcttaaccagaaaaacatttccgtccttcaactgattgaccgggaggattcatacagttcccgtctttcagggctggctttgtgcaccggggatgaggttttttatatcgagaccgggactgcactccccgagaatttgattgcaacagagctgaaagaactgtggcagaatgaaaatattcacaaaatcggacacaatataaaagaatttataacctggctgctgaaacacgatgttgaactgaacggcctttatttcgacactatgattgccgaatacctgatagattccataagaaacggctatcctatagcaagcctttctcacaaatacctgaatcgcagcgttccgtcgctggacgaacttttgggcaagggaaagggagcaaaaaagtactctgaaattccgcccgaaaggctgaaagattacagcgcttataacgtcaaagccatttttgacatatggccgatgcagaaaaaagttcttcaggaaaaccggcaggaggagctttttaatgacatagagcttcctcttataaccgtacttgccagtatggaataccacggtttcaaagttgacgccgcaaaacttcacgaatacggcgaagttcttctgtcacgcataaaagacctggaaaaggtaatttacatgctggccggtgaagaattcaacatcaattcaacgaagcagcttggtaccatattattcgaaaaactgaagcttcccgttgtaaaaagtacaaagaccggatactccaccgacgtcgaggttcttgaagagctttattacaagcatgatataataccatgcataatagaataccgccagcttacaaaactttacaccacctacgccgaaggtcttgaaaaagtgataaatcctgtaaccggtaaaattcattcaagttttaaccagacggttacggctacaggccgcatcagcagtggtgaaccaaatttacagaatatcccagtcagacacgaaatgggaagggaaatacggaaagcttttattccgtcgtcggaaaacgctgtttttgttgatgccgattattcacagatagagcttcgcgtgcttgcccatataacaggcgatgaagccctgataaatgctttcgttaagggggaagatattcatacggccacggcgtcgctggtatttgacgtagctcccgaagatgtgacgccggaactgcgcagaaaggcaaaagccgtaaatttcggcatagtgtacgggatcagtgattacgggctggcacgggatttgggaattacccggaaggaagcaaagcggtatatagacgactattttgccaaataccccaaagtaaaaacctatgtggatgaaattgtgcgggtcggccaggaacaggggtatgtggaaactctgttccacagaagaagataccttcccgagcttgcatctaaaaattttcaccagcgttctttcggaaaaagggttgcaatgaatacgcccatacagggcactgcagccgatattattaaaattgcgatggtgaaggtatacaaggctttgaaagaatccggccttaaatccaggcttatcctccaggtccatgacgaacttgttattgagacttttgaagacgaactggagactgtcaaggaacttgtcaaaaagtgcatggaagaggccgttgaattgagtgtgccgcttgttgtcgacgtttcaatcgggaaaaactggtatgaagcctcctgatatggatcc

SEQ ID NO: 521 - DNA, 2772 bp, Artificial Sequence
  Description of Artificial Sequence: Synthetic Clostridium stercorarium DNA Polymerase T663H
atgaaatacctgctgccgaccgctgctgctggtctgctgctcctcgctgcccagccggcgatggccatggatccaaaaataatccttatagacggaaacagtattttaaaccgcggtttttatgccctgtcggggcgatccatgctgactacgtccacaggtctgtataccaatgcggttttcgcttttgtaaatatattgaacaaatatatcgaagaggaaaaccctgattatattgccgttgctttcgatcttagggcaaaaactttccggcacggtctatatgagggatacaaagcgcagcggaaaggcatgcccgatgaacttgcaatgcagatacccctcgcgaaggaagtactgagggcgatgaatattgccataatagagcatgaaggttatgaagccgacgatataatcggcagcctttcgttaaaggccgaaaaagagaattttgacgtaataatccttacgggggacagggattctttccagctgatcagcgacagggtgaaagttatcctgccttcgacgaaagccggaaaaacagagaccaacgtatatgataaacaggccatcattgacaaatacggagttttaccccatcagcttattgacgttaaaggcttaatgggagattcgtcagataatatacccggcgttccgggagtgggtgagaaaacggcgttaagccttatttcagcctacggtacactggaaggtgtttacgagcatattgatgaaataaaacagcctaagctgaaagcatcgctgattgaatataaggatcaggcgtttttaagccgtaagctgggtactattgtaagaaatctggagctgtgtgcttcgctggaggatctgaaaagaaaagaaataaaccgcaaagagcttttgaatgttttcagaaaactcgaatttgaaagtatcatatcaaaaatgaatcttgcttccgctgaggtgacagaattacctcccgcgccggaagagcttaaaataacccatatttcagcggcagaggatcttaagaaatggattgcttacctgcttaaccagaaaaacatttccgtccttcaactgattgaccgggaggattcatacagttcccgtctttcagggctggctttgtgcaccggggatgaggttttttatatcgagaccgggactgcactccccgagaatttgattgcaacagagctgaaagaactgtggcagaatgaaaatattcacaaaatcggacacaatataaaagaatttataacctggctgctgaaacacgatgttgaactgaacggcctttatttcgacactatgattgccgaatacctgatagattccataagaaacggctatcctatagcaagcctttctcacaaatacctgaatcgcagcgttccgtcgctggacgaacttttgggcaagggaaagggagcaaaaaagtactctgaaattccgcccgaaaggctgaaagattacagcgcttataacgtcaaagccatttttgacatatggccgatgcagaaaaaagttcttcaggaaaaccggcaggaggagctttttaatgacatagagcttcctcttataaccgtacttgccagtatggaataccacggtttcaaagttgacgccgcaaaacttcacgaatacggcgaagttcttctgtcacgcataaaagacctggaaaaggtaatttacatgctggccggtgaagaattcaacatcaattcaacgaagcagcttggtaccatattattcgaaaaactgaagcttcccgttgtaaaaagtacaaagaccggatactccaccgacgtcgaggttcttgaagagctttattacaagcatgatataataccatgcataatagaataccgccagcttacaaaactttacaccacctacgccgaaggtcttgaaaaagtgataaatcctgtaaccggtaaaattcattcaagttttaaccagacggttacggctacaggccgcatcagcagtcatgaaccaaatttacagaatatcccagtcagacacgaaatgggaagggaaatacggaaagcttttattccgtcgtcggaaaacgctgtttttgttgatgccgattattcacagatagagcttcgcgtgcttgcccatataacaggcgatgaagccctgataaatgctttcgttaagggggaagatattcatacggccacggcgtcgctggtatttgacgtagctcccgaagatgtgacgccggaactgcgcagaaaggcaaaagccgtaaatttcggcatagtgtacgggatcagtgattacgggctggcacgggatttgggaattacccggaaggaagcaaagcggtatatagacgactattttgccaaataccccaaagtaaaaacctatgtggatgaaattgtgcgggtcggccaggaacaggggtatgtggaaactctgttccacagaagaagataccttcccgagcttgcatctaaaaattttcaccagcgttctttcggaaaaagggttgcaatgaatacgcccatacagggcactgcagccgatattattaaaattgcgatggtgaaggtatacaaggctttgaaagaatccggccttaaatccaggcttatcctccaggtccatgacgaacttgttattgagacttttgaagacgaactggagactgtcaaggaacttgtcaaaaagtgcatggaagaggccgttgaattgagtgtgccgcttgttgtcgacgtttcaatcgggaaaaactggtatgaagcctcctgatatggatcc

SEQ ID NO: 522 - DNA, 2772 bp, Artificial Sequence
  Description of Artificial Sequence: Synthetic Clostridium stercorarium DNA Polymerase T663I
atgaaatacctgctgccgaccgctgctgctggtctgctgctcctcgctgcccagccggcgatggccatggatccaaaaataatccttatagacggaaacagtattttaaaccgcggtttttatgccctgtcggggcgatccatgctgactacgtccacaggtctgtataccaatgcggttttcgcttttgtaaatatattgaacaaatatatcgaagaggaaaaccctgattatattgccgttgctttcgatcttagggcaaaaactttccggcacggtctatatgagggatacaaagcgcagcggaaaggcatgcccgatgaacttgcaatgcagatacccctcgcgaaggaagtactgagggcgatgaatattgccataatagagcatgaaggttatgaagccgacgatataatcggcagcctttcgttaaaggccgaaaaagagaattttgacgtaataatccttacgggggacagggattctttccagctgatcagcgacagggtgaaagttatcctgccttcgacgaaagccggaaaaacagagaccaacgtatatgataaacaggccatcattgacaaatacggagttttaccccatcagcttattgacgttaaaggcttaatgggagattcgtcagataatatacccggcgttccgggagtgggtgagaaaacggcgttaagccttatttcagcctacggtacactggaaggtgtttacgagcatattgatgaaataaaacagcctaagctgaaagcatcgctgattgaatataaggatcaggcgtttttaagccgtaagctgggtactattgtaagaaatctggagctgtgtgcttcgctggaggatctgaaaagaaaagaaataaaccgcaaagagcttttgaatgttttcagaaaactcgaatttgaaagtatcatatcaaaaatgaatcttgcttccgctgaggtgacagaattacctcccgcgccggaagagcttaaaataacccatatttcagcggcagaggatcttaagaaatggattgcttacctgcttaaccagaaaaacatttccgtccttcaactgattgaccgggaggattcatacagttcccgtctttcagggctggctttgtgcaccggggatgaggttttttatatcgagaccgggactgcactccccgagaatttgattgcaacagagctgaaagaactgtggcagaatgaaaatattcacaaaatcggacacaatataaaagaatttataacctggctgctgaaacacgatgttgaactgaacggcctttatttcgacactatgattgccgaatacctgatagattccataagaaacggctatcctatagcaagcctttctcacaaatacctgaatcgcagcgttccgtcgctggacgaacttttgggcaagggaaagggagcaaaaaagtactctgaaattccgcccgaaaggctgaaagattacagcgcttataacgtcaaagccatttttgacatatggccgatgcagaaaaaagttcttcaggaaaaccggcaggaggagctttttaatgacatagagcttcctcttataaccgtacttgccagtatggaataccacggtttcaaagttgacgccgcaaaacttcacgaatacggcgaagttcttctgtcacgcataaaagacctggaaaaggtaatttacatgctggccggtgaagaattcaacatcaattcaacgaagcagcttggtaccatattattcgaaaaactgaagcttcccgttgtaaaaagtacaaagaccggatactccaccgacgtcgaggttcttgaagagctttattacaagcatgatataataccatgcataatagaataccgccagcttacaaaactttacaccacctacgccgaaggtcttgaaaaagtgataaatcctgtaaccggtaaaattcattcaagttttaaccagacggttacggctacaggccgcatcagcagtattgaaccaaatttacagaatatcccagtcagacacgaaatgggaagggaaatacggaaagcttttattccgtcgtcggaaaacgctgtttttgttgatgccgattattcacagatagagcttcgcgtgcttgcccatataacaggcgatgaagccctgataaatgctttcgttaagggggaagatattcatacggccacggcgtcgctggtatttgacgtagctcccgaagatgtgacgccggaactgcgcagaaaggcaaaagccgtaaatttcggcatagtgtacgggatcagtgattacgggctggcacgggatttgggaattacccggaaggaagcaaagcggtatatagacgactattttgccaaataccccaaagtaaaaacctatgtggatgaaattgtgcgggtcggccaggaacaggggtatgtggaaactctgttccacagaagaagataccttcccgagcttgcatctaaaaattttcaccagcgttctttcggaaaaagggttgcaatgaatacgcccatacagggcactgcagccgatattattaaaattgcgatggtgaaggtatacaaggctttgaaagaatccggccttaaatccaggcttatcctccaggtccatgacgaacttgttattgagacttttgaagacgaactggagactgtcaaggaacttgtcaaaaagtgcatggaagaggccgttgaattgagtgtgccgcttgttgtcgacgtttcaatcgggaaaaactggtatgaagcctcctgatatggatcc

SEQ ID NO: 523 - DNA, 2772 bp, Artificial Sequence
  Description of Artificial Sequence: Synthetic Clostridium stercorarium DNA Polymerase T663L
atgaaatacctgctgccgaccgctgctgctggtctgctgctcctcgctgcccagccggcgatggccatggatccaaaaataatccttatagacggaaacagtattttaaaccgcggtttttatgccctgtcggggcgatccatgctgactacgtccacaggtctgtataccaatgcggttttcgcttttgtaaatatattgaacaaatatatcgaagaggaaaaccctgattatattgccgttgctttcgatcttagggcaaaaactttccggcacggtctatatgagggatacaaagcgcagcggaaaggcatgcccgatgaacttgcaatgcagatacccctcgcgaaggaagtactgagggcgatgaatattgccataatagagcatgaaggttatgaagccgacgatataatcggcagcctttcgttaaaggccgaaaaagagaattttgacgtaataatccttacgggggacagggattctttccagctgatcagcgacagggtgaaagttatcctgccttcgacgaaagccggaaaaacagagaccaacgtatatgataaacaggccatcattgacaaatacggagttttaccccatcagcttattgacgttaaaggcttaatgggagattcgtcagataatatacccggcgttccgggagtgggtgagaaaacggcgttaagccttatttcagcctacggtacactggaaggtgtttacgagcatattgatgaaataaaacagcctaagctgaaagcatcgctgattgaatataaggatcaggcgtttttaagccgtaagctgggtactattgtaagaaatctggagctgtgtgcttcgctggaggatctgaaaagaaaagaaataaaccgcaaagagcttttgaatgttttcagaaaactcgaatttgaaagtatcatatcaaaaatgaatcttgcttccgctgaggtgacagaattacctcccgcgccggaagagcttaaaataacccatatttcagcggcagaggatcttaagaaatggattgcttacctgcttaaccagaaaaacatttccgtccttcaactgattgaccgggaggattcatacagttcccgtctttcagggctggctttgtgcaccggggatgaggttttttatatcgagaccgggactgcactccccgagaatttgattgcaacagagctgaaagaactgtggcagaatgaaaatattcacaaaatcggacacaatataaaagaatttataacctggctgctgaaacacgatgttgaactgaacggcctttatttcgacactatgattgccgaatacctgatagattccataagaaacggctatcctatagcaagcctttctcacaaatacctgaatcgcagcgttccgtcgctggacgaacttttgggcaagggaaagggagcaaaaaagtactctgaaattccgcccgaaaggctgaaagattacagcgcttataacgtcaaagccatttttgacatatggccgatgcagaaaaaagttcttcaggaaaaccggcaggaggagctttttaatgacatagagcttcctcttataaccgtacttgccagtatggaataccacggtttcaaagttgacgccgcaaaacttcacgaatacggcgaagttcttctgtcacgcataaaagacctggaaaaggtaatttacatgctggccggtgaagaattcaacatcaattcaacgaagcagcttggtaccatattattcgaaaaactgaagcttcccgttgtaaaaagtacaaagaccggatactccaccgacgtcgaggttcttgaagagctttattacaagcatgatataataccatgcataatagaataccgccagcttacaaaactttacaccacctacgccgaaggtcttgaaaaagtgataaatcctgtaaccggtaaaattcattcaagttttaaccagacggttacggctacaggccgcatcagcagtcttgaaccaaatttacagaatatcccagtcagacacgaaatgggaagggaaatacggaaagcttttattccgtcgtcggaaaacgctgtttttgttgatgccgattattcacagatagagcttcgcgtgcttgcccatataacaggcgatgaagccctgataaatgctttcgttaagggggaagatattcatacggccacggcgtcgctggtatttgacgtagctcccgaagatgtgacgccggaactgcgcagaaaggcaaaagccgtaaatttcggcatagtgtacgggatcagtgattacgggctggcacgggatttgggaattacccggaaggaagcaaagcggtatatagacgactattttgccaaataccccaaagtaaaaacctatgtggatgaaattgtgcgggtcggccaggaacaggggtatgtggaaactctgttccacagaagaagataccttcccgagcttgcatctaaaaattttcaccagcgttctttcggaaaaagggttgcaatgaatacgcccatacagggcactgcagccgatattattaaaattgcgatggtgaaggtatacaaggctttgaaagaatccggccttaaatccaggcttatcctccaggtccatgacgaacttgttattgagacttttgaagacgaactggagactgtcaaggaacttgtcaaaaagtgcatggaagaggccgttgaattgagtgtgccgcttgttgtcgacgtttcaatcgggaaaaactggtatgaagcctcctgatatggatcc

SEQ ID NO: 524 - DNA, 2772 bp, Artificial Sequence
  Description of Artificial Sequence: Synthetic Clostridium stercorarium DNA Polymerase T663M
atgaaatacctgctgccgaccgctgctgctggtctgctgctcctcgctgcccagccggcgatggccatggatccaaaaataatccttatagacggaaacagtattttaaaccgcggtttttatgccctgtcggggcgatccatgctgactacgtccacaggtctgtataccaatgcggttttcgcttttgtaaatatattgaacaaatatatcgaagaggaaaaccctgattatattgccgttgctttcgatcttagggcaaaaactttccggcacggtctatatgagggatacaaagcgcagcggaaaggcatgcccgatgaacttgcaatgcagatacccctcgcgaaggaagtactgagggcgatgaatattgccataatagagcatgaaggttatgaagccgacgatataatcggcagcctttcgttaaaggccgaaaaagagaattttgacgtaataatccttacgggggacagggattctttccagctgatcagcgacagggtgaaagttatcctgccttcgacgaaagccggaaaaacagagaccaacgtatatgataaacaggccatcattgacaaatacggagttttaccccatcagcttattgacgttaaaggcttaatgggagattcgtcagataatatacccggcgttccgggagtgggtgagaaaacggcgttaagccttatttcagcctacggtacactggaaggtgtttacgagcatattgatgaaataaaacagcctaagctgaaagcatcgctgattgaatataaggatcaggcgtttttaagccgtaagctgggtactattgtaagaaatctggagctgtgtgcttcgctggaggatctgaaaagaaaagaaataaaccgcaaagagcttttgaatgttttcagaaaactcgaatttgaaagtatcatatcaaaaatgaatcttgcttccgctgaggtgacagaattacctcccgcgccggaagagcttaaaataacccatatttcagcggcagaggatcttaagaaatggattgcttacctgcttaaccagaaaaacatttccgtccttcaactgattgaccgggaggattcatacagttcccgtctttcagggctggctttgtgcaccggggatgaggttttttatatcgagaccgggactgcactccccgagaatttgattgcaacagagctgaaagaactgtggcagaatgaaaatattcacaaaatcggacacaatataaaagaatttataacctggctgctgaaacacgatgttgaactgaacggcctttatttcgacactatgattgccgaatacctgatagattccataagaaacggctatcctatagcaagcctttctcacaaatacctgaatcgcagcgttccgtcgctggacgaacttttgggcaagggaaagggagcaaaaaagtactctgaaattccgcccgaaaggctgaaagattacagcgcttataacgtcaaagccatttttgacatatggccgatgcagaaaaaagttcttcaggaaaaccggcaggaggagctttttaatgacatagagcttcctcttataaccgtacttgccagtatggaataccacggtttcaaagttgacgccgcaaaacttcacgaatacggcgaagttcttctgtcacgcataaaagacctggaaaaggtaatttacatgctggccggtgaagaattcaacatcaattcaacgaagcagcttggtaccatattattcgaaaaactgaagcttcccgttgtaaaaagtacaaagaccggatactccaccgacgtcgaggttcttgaagagctttattacaagcatgatataataccatgcataatagaataccgccagcttacaaaactttacaccacctacgccgaaggtcttgaaaaagtgataaatcctgtaaccggtaaaattcattcaagttttaaccagacggttacggctacaggccgcatcagcagtatggaaccaaatttacagaatatcccagtcagacacgaaatgggaagggaaatacggaaagcttttattccgtcgtcggaaaacgctgtttttgttgatgccgattattcacagatagagcttcgcgtgcttgcccatataacaggcgatgaagccctgataaatgctttcgttaagggggaagatattcatacggccacggcgtcgctggtatttgacgtagctcccgaagatgtgacgccggaactgcgcagaaaggcaaaagccgtaaatttcggcatagtgtacgggatcagtgattacgggctggcacgggatttgggaattacccggaaggaagcaaagcggtatatagacgactattttgccaaataccccaaagtaaaaacctatgtggatgaaattgtgcgggtcggccaggaacaggggtatgtggaaactctgttccacagaagaagataccttcccgagcttgcatctaaaaattttcaccagcgttctttcggaaaaagggttgcaatgaatacgcccatacagggcactgcagccgatattattaaaattgcgatggtgaaggtatacaaggctttgaaagaatccggccttaaatccaggcttatcctccaggtccatgacgaacttgttattgagacttttgaagacgaactggagactgtcaaggaacttgtcaaaaagtgcatggaagaggccgttgaattgagtgtgccgcttgttgtcgacgtttcaatcgggaaaaactggtatgaagcctcctgatatggatcc

SEQ ID NO: 525 - DNA, 2772 bp, Artificial Sequence
  Description of Artificial Sequence: Synthetic Clostridium stercorarium DNA Polymerase T663N
atgaaatacctgctgccgaccgctgctgctggtctgctgctcctcgctgcccagccggcgatggccatggatccaaaaataatccttatagacggaaacagtattttaaaccgcggtttttatgccctgtcggggcgatccatgctgactacgtccacaggtctgtataccaatgcggttttcgcttttgtaaatatattgaacaaatatatcgaagaggaaaaccctgattatattgccgttgctttcgatcttagggcaaaaactttccggcacggtctatatgagggatacaaagcgcagcggaaaggcatgcccgatgaacttgcaatgcagatacccctcgcgaaggaagtactgagggcgatgaatattgccataatagagcatgaaggttatgaagccgacgatataatcggcagcctttcgttaaaggccgaaaaagagaattttgacgtaataatccttacgggggacagggattctttccagctgatcagcgacagggtgaaagttatcctgccttcgacgaaagccggaaaaacagagaccaacgtatatgataaacaggccatcattgacaaatacggagttttaccccatcagcttattgacgttaaaggcttaatgggagattcgtcagataatatacccggcgttccgggagtgggtgagaaaacggcgttaagccttatttcagcctacggtacactggaaggtgtttacgagcatattgatgaaataaaacagcctaagctgaaagcatcgctgattgaatataaggatcaggcgtttttaagccgtaagctgggtactattgtaagaaatctggagctgtgtgcttcgctggaggatctgaaaagaaaagaaataaaccgcaaagagcttttgaatgttttcagaaaactcgaatttgaaagtatcatatcaaaaatgaatcttgcttccgctgaggtgacagaattacctcccgcgccggaagagcttaaaataacccatatttcagcggcagaggatcttaagaaatggattgcttacctgcttaaccagaaaaacatttccgtccttcaactgattgaccgggaggattcatacagttcccgtctttcagggctggctttgtgcaccggggatgaggttttttatatcgagaccgggactgcactccccgagaatttgattgcaacagagctgaaagaactgtggcagaatgaaaatattcacaaaatcggacacaatataaaagaatttataacctggctgctgaaacacgatgttgaactgaacggcctttatttcgacactatgattgccgaatacctgatagattccataagaaacggctatcctatagcaagcctttctcacaaatacctgaatcgcagcgttccgtcgctggacgaacttttgggcaagggaaagggagcaaaaaagtactctgaaattccgcccgaaaggctgaaagattacagcgcttataacgtcaaagccatttttgacatatggccgatgcagaaaaaagttcttcaggaaaaccggcaggaggagctttttaatgacatagagcttcctcttataaccgtacttgccagtatggaataccacggtttcaaagttgacgccgcaaaacttcacgaatacggcgaagttcttctgtcacgcataaaagacctggaaaaggtaatttacatgctggccggtgaagaattcaacatcaattcaacgaagcagcttggtaccatattattcgaaaaactgaagcttcccgttgtaaaaagtacaaagaccggatactccaccgacgtcgaggttcttgaagagctttattacaagcatgatataataccatgcataatagaataccgccagcttacaaaactttacaccacctacgccgaaggtcttgaaaaagtgataaatcctgtaaccggtaaaattcattcaagttttaaccagacggttacggctacaggccgcatcagcagtaatgaaccaaatttacagaatatcccagtcagacacgaaatgggaagggaaatacggaaagcttttattccgtcgtcggaaaacgctgtttttgttgatgccgattattcacagatagagcttcgcgtgcttgcccatataacaggcgatgaagccctgataaatgctttcgttaagggggaagatattcatacggccacggcgtcgctggtatttgacgtagctcccgaagatgtgacgccggaactgcgcagaaaggcaaaagccgtaaatttcggcatagtgtacgggatcagtgattacgggctggcacgggatttgggaattacccggaaggaagcaaagcggtatatagacgactattttgccaaataccccaaagtaaaaacctatgtggatgaaattgtgcgggtcggccaggaacaggggtatgtggaaactctgttccacagaagaagataccttcccgagcttgcatctaaaaattttcaccagcgttctttcggaaaaagggttgcaatgaatacgcccatacagggcactgcagccgatattattaaaattgcgatggtgaaggtatacaaggctttgaaagaatccggccttaaatccaggcttatcctccaggtccatgacgaacttgttattgagacttttgaagacgaactggagactgtcaaggaacttgtcaaaaagtgcatggaagaggccgttgaattgagtgtgccgcttgttgtcgacgtttcaatcgggaaaaactggtatgaagcctcctgatatggatcc

SEQ ID NO: 526 - DNA, 2772 bp, Artificial Sequence
  Description of Artificial Sequence: Synthetic Clostridium stercorarium DNA Polymerase T663P
atgaaatacctgctgccgaccgctgctgctggtctgctgctcctcgctgcccagccggcgatggccatggatccaaaaataatccttatagacggaaacagtattttaaaccgcggtttttatgccctgtcggggcgatccatgctgactacgtccacaggtctgtataccaatgcggttttcgcttttgtaaatatattgaacaaatatatcgaagaggaaaaccctgattatattgccgttgctttcgatcttagggcaaaaactttccggcacggtctatatgagggatacaaagcgcagcggaaaggcatgcccgatgaacttgcaatgcagatacccctcgcgaaggaagtactgagggcgatgaatattgccataatagagcatgaaggttatgaagccgacgatataatcggcagcctttcgttaaaggccgaaaaagagaattttgacgtaataatccttacgggggacagggattctttccagctgatcagcgacagggtgaaagttatcctgccttcgacgaaagccggaaaaacagagaccaacgtatatgataaacaggccatcattgacaaatacggagttttaccccatcagcttattgacgttaaaggcttaatgggagattcgtcagataatatacccggcgttccgggagtgggtgagaaaacggcgttaagccttatttcagcctacggtacactggaaggtgtttacgagcatattgatgaaataaaacagcctaagctgaaagcatcgctgattgaatataaggatcaggcgtttttaagccgtaagctgggtactattgtaagaaatctggagctgtgtgcttcgctggaggatctgaaaagaaaagaaataaaccgcaaagagcttttgaatgttttcagaaaactcgaatttgaaagtatcatatcaaaaatgaatcttgcttccgctgaggtgacagaattacctcccgcgccggaagagcttaaaataacccatatttcagcggcagaggatcttaagaaatggattgcttacctgcttaaccagaaaaacatttccgtccttcaactgattgaccgggaggattcatacagttcccgtctttcagggctggctttgtgcaccggggatgaggttttttatatcgagaccgggactgcactccccgagaatttgattgcaacagagctgaaagaactgtggcagaatgaaaatattcacaaaatcggacacaatataaaagaatttataacctggctgctgaaacacgatgttgaactgaacggcctttatttcgacactatgattgccgaatacctgatagattccataagaaacggctatcctatagcaagcctttctcacaaatacctgaatcgcagcgttccgtcgctggacgaacttttgggcaagggaaagggagcaaaaaagtactctgaaattccgcccgaaaggctgaaagattacagcgcttataacgtcaaagccatttttgacatatggccgatgcagaaaaaagttcttcaggaaaaccggcaggaggagctttttaatgacatagagcttcctcttataaccgtacttgccagtatggaataccacggtttcaaagttgacgccgcaaaacttcacgaatacggcgaagttcttctgtcacgcataaaagacctggaaaaggtaatttacatgctggccggtgaagaattcaacatcaattcaacgaagcagcttggtaccatattattcgaaaaactgaagcttcccgttgtaaaaagtacaaagaccggatactccaccgacgtcgaggttcttgaagagctttattacaagcatgatataataccatgcataatagaataccgccagcttacaaaactttacaccacctacgccgaaggtcttgaaaaagtgataaatcctgtaaccggtaaaattcattcaagttttaaccagacggttacggctacaggccgcatcagcagtcctgaaccaaatttacagaatatcccagtcagacacgaaatgggaagggaaatacggaaagcttttattccgtcgtcggaaaacgctgtttttgttgatgccgattattcacagatagagcttcgcgtgcttgcccatataacaggcgatgaagccctgataaatgctttcgttaagggggaagatattcatacggccacggcgtcgctggtatttgacgtagctcccgaagatgtgacgccggaactgcgcagaaaggcaaaagccgtaaatttcggcatagtgtacgggatcagtgattacgggctggcacgggatttgggaattacccggaaggaagcaaagcggtatatagacgactattttgccaaataccccaaagtaaaaacctatgtggatgaaattgtgcgggtcggccaggaacaggggtatgtggaaactctgttccacagaagaagataccttcccgagcttgcatctaaaaattttcaccagcgttctttcggaaaaagggttgcaatgaatacgcccatacagggcactgcagccgatattattaaaattgcgatggtgaaggtatacaaggctttgaaagaatccggccttaaatccaggcttatcctccaggtccatgacgaacttgttattgagacttttgaagacgaactggagactgtcaaggaacttgtcaaaaagtgcatggaagaggccgttgaattgagtgtgccgcttgttgtcgacgtttcaatcgggaaaaactggtatgaagcctcctgatatggatcc

SEQ ID NO: 527 - DNA, 2772 bp, Artificial Sequence
  Description of Artificial Sequence: Synthetic Clostridium stercorarium DNA Polymerase T663Q
atgaaatacctgctgccgaccgctgctgctggtctgctgctcctcgctgcccagccggcgatggccatggatccaaaaataatccttatagacggaaacagtattttaaaccgcggtttttatgccctgtcggggcgatccatgctgactacgtccacaggtctgtataccaatgcggttttcgcttttgtaaatatattgaacaaatatatcgaagaggaaaaccctgattatattgccgttgctttcgatcttagggcaaaaactttccggcacggtctatatgagggatacaaagcgcagcggaaaggcatgcccgatgaacttgcaatgcagatacccctcgcgaaggaagtactgagggcgatgaatattgccataatagagcatgaaggttatgaagccgacgatataatcggcagcctttcgttaaaggccgaaaaagagaattttgacgtaataatccttacgggggacagggattctttccagctgatcagcgacagggtgaaagttatcctgccttcgacgaaagccggaaaaacagagaccaacgtatatgataaacaggccatcattgacaaatacggagttttaccccatcagcttattgacgttaaaggcttaatgggagattcgtcagataatatacccggcgttccgggagtgggtgagaaaacggcgttaagccttatttcagcctacggtacactggaaggtgtttacgagcatattgatgaaataaaacagcctaagctgaaagcatcgctgattgaatataaggatcaggcgtttttaagccgtaagctgggtactattgtaagaaatctggagctgtgtgcttcgctggaggatctgaaaagaaaagaaataaaccgcaaagagcttttgaatgttttcagaaaactcgaatttgaaagtatcatatcaaaaatgaatcttgcttccgctgaggtgacagaattacctcccgcgccggaagagcttaaaataacccatatttcagcggcagaggatcttaagaaatggattgcttacctgcttaaccagaaaaacatttccgtccttcaactgattgaccgggaggattcatacagttcccgtctttcagggctggctttgtgcaccggggatgaggttttttatatcgagaccgggactgcactccccgagaatttgattgcaacagagctgaaagaactgtggcagaatgaaaatattcacaaaatcggacacaatataaaagaatttataacctggctgctgaaacacgatgttgaactgaacggcctttatttcgacactatgattgccgaatacctgatagattccataagaaacggctatcctatagcaagcctttctcacaaatacctgaatcgcagcgttccgtcgctggacgaacttttgggcaagggaaagggagcaaaaaagtactctgaaattccgcccgaaaggctgaaagattacagcgcttataacgtcaaagccatttttgacatatggccgatgcagaaaaaagttcttcaggaaaaccggcaggaggagctttttaatgacatagagcttcctcttataaccgtacttgccagtatggaataccacggtttcaaagttgacgccgcaaaacttcacgaatacggcgaagttcttctgtcacgcataaaagacctggaaaaggtaatttacatgctggccggtgaagaattcaacatcaattcaacgaagcagcttggtaccatattattcgaaaaactgaagcttcccgttgtaaaaagtacaaagaccggatactccaccgacgtcgaggttcttgaagagctttattacaagcatgatataataccatgcataatagaataccgccagcttacaaaactttacaccacctacgccgaaggtcttgaaaaagtgataaatcctgtaaccggtaaaattcattcaagttttaaccagacggttacggctacaggccgcatcagcagtcaagaaccaaatttacagaatatcccagtcagacacgaaatgggaagggaaatacggaaagcttttattccgtcgtcggaaaacgctgtttttgttgatgccgattattcacagatagagcttcgcgtgcttgcccatataacaggcgatgaagccctgataaatgctttcgttaagggggaagatattcatacggccacggcgtcgctggtatttgacgtagctcccgaagatgtgacgccggaactgcgcagaaaggcaaaagccgtaaatttcggcatagtgtacgggatcagtgattacgggctggcacgggatttgggaattacccggaaggaagcaaagcggtatatagacgactattttgccaaataccccaaagtaaaaacctatgtggatgaaattgtgcgggtcggccaggaacaggggtatgtggaaactctgttccacagaagaagataccttcccgagcttgcatctaaaaattttcaccagcgttctttcggaaaaagggttgcaatgaatacgcccatacagggcactgcagccgatattattaaaattgcgatggtgaaggtatacaaggctttgaaagaatccggccttaaatccaggcttatcctccaggtccatgacgaacttgttattgagacttttgaagacgaactggagactgtcaaggaacttgtcaaaaagtgcatggaagaggccgttgaattgagtgtgccgcttgttgtcgacgtttcaatcgggaaaaactggtatgaagcctcctgatatggatcc

SEQ ID NO: 528 - DNA, 2772 bp, Artificial Sequence
  Description of Artificial Sequence: Synthetic Clostridium stercorarium DNA Polymerase T663R
atgaaatacctgctgccgaccgctgctgctggtctgctgctcctcgctgcccagccggcgatggccatggatccaaaaataatccttatagacggaaacagtattttaaaccgcggtttttatgccctgtcggggcgatccatgctgactacgtccacaggtctgtataccaatgcggttttcgcttttgtaaatatattgaacaaatatatcgaagaggaaaaccctgattatattgccgttgctttcgatcttagggcaaaaactttccggcacggtctatatgagggatacaaagcgcagcggaaaggcatgcccgatgaacttgcaatgcagatacccctcgcgaaggaagtactgagggcgatgaatattgccataatagagcatgaaggttatgaagccgacgatataatcggcagcctttcgttaaaggccgaaaaagagaattttgacgtaataatccttacgggggacagggattctttccagctgatcagcgacagggtgaaagttatcctgccttcgacgaaagccggaaaaacagagaccaacgtatatgataaacaggccatcattgacaaatacggagttttaccccatcagcttattgacgttaaaggcttaatgggagattcgtcagataatatacccggcgttccgggagtgggtgagaaaacggcgttaagccttatttcagcctacggtacactggaaggtgtttacgagcatattgatgaaataaaacagcctaagctgaaagcatcgctgattgaatataaggatcaggcgtttttaagccgtaagctgggtactattgtaagaaatctggagctgtgtgcttcgctggaggatctgaaaagaaaagaaataaaccgcaaagagcttttgaatgttttcagaaaactcgaatttgaaagtatcatatcaaaaatgaatcttgcttccgctgaggtgacagaattacctcccgcgccggaagagcttaaaataacccatatttcagcggcagaggatcttaagaaatggattgcttacctgcttaaccagaaaaacatttccgtccttcaactgattgaccgggaggattcatacagttcccgtctttcagggctggctttgtgcaccggggatgaggttttttatatcgagaccgggactgcactccccgagaatttgattgcaacagagctgaaagaactgtggcagaatgaaaatattcacaaaatcggacacaatataaaagaatttataacctggctgctgaaacacgatgttgaactgaacggcctttatttcgacactatgattgccgaatacctgatagattccataagaaacggctatcctatagcaagcctttctcacaaatacctgaatcgcagcgttccgtcgctggacgaacttttgggcaagggaaagggagcaaaaaagtactctgaaattccgcccgaaaggctgaaagattacagcgcttataacgtcaaagccatttttgacatatggccgatgcagaaaaaagttcttcaggaaaaccggcaggaggagctttttaatgacatagagcttcctcttataaccgtacttgccagtatggaataccacggtttcaaagttgacgccgcaaaacttcacgaatacggcgaagttcttctgtcacgcataaaagacctggaaaaggtaatttacatgctggccggtgaagaattcaacatcaattcaacgaagcagcttggtaccatattattcgaaaaactgaagcttcccgttgtaaaaagtacaaagaccggatactccaccgacgtcgaggttcttgaagagctttattacaagcatgatataataccatgcataatagaataccgccagcttacaaaactttacaccacctacgccgaaggtcttgaaaaagtgataaatcctgtaaccggtaaaattcattcaagttttaaccagacggttacggctacaggccgcatcagcagtcgtgaaccaaatttacagaatatcccagtcagacacgaaatgggaagggaaatacggaaagcttttattccgtcgtcggaaaacgctgtttttgttgatgccgattattcacagatagagcttcgcgtgcttgcccatataacaggcgatgaagccctgataaatgctttcgttaagggggaagatattcatacggccacggcgtcgctggtatttgacgtagctcccgaagatgtgacgccggaactgcgcagaaaggcaaaagccgtaaatttcggcatagtgtacgggatcagtgattacgggctggcacgggatttgggaattacccggaaggaagcaaagcggtatatagacgactattttgccaaataccccaaagtaaaaacctatgtggatgaaattgtgcgggtcggccaggaacaggggtatgtggaaactctgttccacagaagaagataccttcccgagcttgcatctaaaaattttcaccagcgttctttcggaaaaagggttgcaatgaatacgcccatacagggcactgcagccgatattattaaaattgcgatggtgaaggtatacaaggctttgaaagaatccggccttaaatccaggcttatcctccaggtccatgacgaacttgttattgagacttttgaagacgaactggagactgtcaaggaacttgtcaaaaagtgcatggaagaggccgttgaattgagtgtgccgcttgttgtcgacgtttcaatcgggaaaaactggtatgaagcctcctgatatggatcc

SEQ ID NO: 529 - DNA, 2772 bp, Artificial Sequence
  Description of Artificial Sequence: Synthetic Clostridium stercorarium DNA Polymerase T663S
atgaaatacctgctgccgaccgctgctgctggtctgctgctcctcgctgcccagccggcgatggccatggatccaaaaataatccttatagacggaaacagtattttaaaccgcggtttttatgccctgtcggggcgatccatgctgactacgtccacaggtctgtataccaatgcggttttcgcttttgtaaatatattgaacaaatatatcgaagaggaaaaccctgattatattgccgttgctttcgatcttagggcaaaaactttccggcacggtctatatgagggatacaaagcgcagcggaaaggcatgcccgatgaacttgcaatgcagatacccctcgcgaaggaagtactgagggcgatgaatattgccataatagagcatgaaggttatgaagccgacgatataatcggcagcctttcgttaaaggccgaaaaagagaattttgacgtaataatccttacgggggacagggattctttccagctgatcagcgacagggtgaaagttatcctgccttcgacgaaagccggaaaaacagagaccaacgtatatgataaacaggccatcattgacaaatacggagttttaccccatcagcttattgacgttaaaggcttaatgggagattcgtcagataatatacccggcgttccgggagtgggtgagaaaacggcgttaagccttatttcagcctacggtacactggaaggtgtttacgagcatattgatgaaataaaacagcctaagctgaaagcatcgctgattgaatataaggatcaggcgtttttaagccgtaagctgggtactattgtaagaaatctggagctgtgtgcttcgctggaggatctgaaaagaaaagaaataaaccgcaaagagcttttgaatgttttcagaaaactcgaatttgaaagtatcatatcaaaaatgaatcttgcttccgctgaggtgacagaattacctcccgcgccggaagagcttaaaataacccatatttcagcggcagaggatcttaagaaatggattgcttacctgcttaaccagaaaaacatttccgtccttcaactgattgaccgggaggattcatacagttcccgtctttcagggctggctttgtgcaccggggatgaggttttttatatcgagaccgggactgcactccccgagaatttgattgcaacagagctgaaagaactgtggcagaatgaaaatattcacaaaatcggacacaatataaaagaatttataacctggctgctgaaacacgatgttgaactgaacggcctttatttcgacactatgattgccgaatacctgatagattccataagaaacggctatcctatagcaagcctttctcacaaatacctgaatcgcagcgttccgtcgctggacgaacttttgggcaagggaaagggagcaaaaaagtactctgaaattccgcccgaaaggctgaaagattacagcgcttataacgtcaaagccatttttgacatatggccgatgcagaaaaaagttcttcaggaaaaccggcaggaggagctttttaatgacatagagcttcctcttataaccgtacttgccagtatggaataccacggtttcaaagttgacgccgcaaaacttcacgaatacggcgaagttcttctgtcacgcataaaagacctggaaaaggtaatttacatgctggccggtgaagaattcaacatcaattcaacgaagcagcttggtaccatattattcgaaaaactgaagcttcccgttgtaaaaagtacaaagaccggatactccaccgacgtcgaggttcttgaagagctttattacaagcatgatataataccatgcataatagaataccgccagcttacaaaactttacaccacctacgccgaaggtcttgaaaaagtgataaatcctgtaaccggtaaaattcattcaagttttaaccagacggttacggctacaggccgcatcagcagttctgaaccaaatttacagaatatcccagtcagacacgaaatgggaagggaaatacggaaagcttttattccgtcgtcggaaaacgctgtttttgttgatgccgattattcacagatagagcttcgcgtgcttgcccatataacaggcgatgaagccctgataaatgctttcgttaagggggaagatattcatacggccacggcgtcgctggtatttgacgtagctcccgaagatgtgacgccggaactgcgcagaaaggcaaaagccgtaaatttcggcatagtgtacgggatcagtgattacgggctggcacgggatttgggaattacccggaaggaagcaaagcggtatatagacgactattttgccaaataccccaaagtaaaaacctatgtggatgaaattgtgcgggtcggccaggaacaggggtatgtggaaactctgttccacagaagaagataccttcccgagcttgcatctaaaaattttcaccagcgttctttcggaaaaagggttgcaatgaatacgcccatacagggcactgcagccgatattattaaaattgcgatggtgaaggtatacaaggctttgaaagaatccggccttaaatccaggcttatcctccaggtccatgacgaacttgttattgagacttttgaagacgaactggagactgtcaaggaacttgtcaaaaagtgcatggaagaggccgttgaattgagtgtgccgcttgttgtcgacgtttcaatcgggaaaaactggtatgaagcctcctgatatggatcc

SEQ ID NO: 530 - DNA, 2772 bp, Artificial Sequence
  Description of Artificial Sequence: Synthetic Clostridium stercorarium DNA Polymerase T663V
atgaaatacctgctgccgaccgctgctgctggtctgctgctcctcgctgcccagccggcgatggccatggatccaaaaataatccttatagacggaaacagtattttaaaccgcggtttttatgccctgtcggggcgatccatgctgactacgtccacaggtctgtataccaatgcggttttcgcttttgtaaatatattgaacaaatatatcgaagaggaaaaccctgattatattgccgttgctttcgatcttagggcaaaaactttccggcacggtctatatgagggatacaaagcgcagcggaaaggcatgcccgatgaacttgcaatgcagatacccctcgcgaaggaagtactgagggcgatgaatattgccataatagagcatgaaggttatgaagccgacgatataatcggcagcctttcgttaaaggccgaaaaagagaattttgacgtaataatccttacgggggacagggattctttccagctgatcagcgacagggtgaaagttatcctgccttcgacgaaagccggaaaaacagagaccaacgtatatgataaacaggccatcattgacaaatacggagttttaccccatcagcttattgacgttaaaggcttaatgggagattcgtcagataatatacccggcgttccgggagtgggtgagaaaacggcgttaagccttatttcagcctacggtacactggaaggtgtttacgagcatattgatgaaataaaacagcctaagctgaaagcatcgctgattgaatataaggatcaggcgtttttaagccgtaagctgggtactattgtaagaaatctggagctgtgtgcttcgctggaggatctgaaaagaaaagaaataaaccgcaaagagcttttgaatgttttcagaaaactcgaatttgaaagtatcatatcaaaaatgaatcttgcttccgctgaggtgacagaattacctcccgcgccggaagagcttaaaataacccatatttcagcggcagaggatcttaagaaatggattgcttacctgcttaaccagaaaaacatttccgtccttcaactgattgaccgggaggattcatacagttcccgtctttcagggctggctttgtgcaccggggatgaggttttttatatcgagaccgggactgcactccccgagaatttgattgcaacagagctgaaagaactgtggcagaatgaaaatattcacaaaatcggacacaatataaaagaatttataacctggctgctgaaacacgatgttgaactgaacggcctttatttcgacactatgattgccgaatacctgatagattccataagaaacggctatcctatagcaagcctttctcacaaatacctgaatcgcagcgttccgtcgctggacgaacttttgggcaagggaaagggagcaaaaaagtactctgaaattccgcccgaaaggctgaaagattacagcgcttataacgtcaaagccatttttgacatatggccgatgcagaaaaaagttcttcaggaaaaccggcaggaggagctttttaatgacatagagcttcctcttataaccgtacttgccagtatggaataccacggtttcaaagttgacgccgcaaaacttcacgaatacggcgaagttcttctgtcacgcataaaagacctggaaaaggtaatttacatgctggccggtgaagaattcaacatcaattcaacgaagcagcttggtaccatattattcgaaaaactgaagcttcccgttgtaaaaagtacaaagaccggatactccaccgacgtcgaggttcttgaagagctttattacaagcatgatataataccatgcataatagaataccgccagcttacaaaactttacaccacctacgccgaaggtcttgaaaaagtgataaatcctgtaaccggtaaaattcattcaagttttaaccagacggttacggctacaggccgcatcagcagtgttgaaccaaatttacagaatatcccagtcagacacgaaatgggaagggaaatacggaaagcttttattccgtcgtcggaaaacgctgtttttgttgatgccgattattcacagatagagcttcgcgtgcttgcccatataacaggcgatgaagccctgataaatgctttcgttaagggggaagatattcatacggccacggcgtcgctggtatttgacgtagctcccgaagatgtgacgccggaactgcgcagaaaggcaaaagccgtaaatttcggcatagtgtacgggatcagtgattacgggctggcacgggatttgggaattacccggaaggaagcaaagcggtatatagacgactattttgccaaataccccaaagtaaaaacctatgtggatgaaattgtgcgggtcggccaggaacaggggtatgtggaaactctgttccacagaagaagataccttcccgagcttgcatctaaaaattttcaccagcgttctttcggaaaaagggttgcaatgaatacgcccatacagggcactgcagccgatattattaaaattgcgatggtgaaggtatacaaggctttgaaagaatccggccttaaatccaggcttatcctccaggtccatgacgaacttgttattgagacttttgaagacgaactggagactgtcaaggaacttgtcaaaaagtgcatggaagaggccgttgaattgagtgtgccgcttgttgtcgacgtttcaatcgggaaaaactggtatgaagcctcctgatatggatcc

SEQ ID NO: 531 - DNA, 2772 bp, Artificial Sequence
  Description of Artificial Sequence: Synthetic Clostridium stercorarium DNA Polymerase T663W
atgaaatacctgctgccgaccgctgctgctggtctgctgctcctcgctgcccagccggcgatggccatggatccaaaaataatccttatagacggaaacagtattttaaaccgcggtttttatgccctgtcggggcgatccatgctgactacgtccacaggtctgtataccaatgcggttttcgcttttgtaaatatattgaacaaatatatcgaagaggaaaaccctgattatattgccgttgctttcgatcttagggcaaaaactttccggcacggtctatatgagggatacaaagcgcagcggaaaggcatgcccgatgaacttgcaatgcagatacccctcgcgaaggaagtactgagggcgatgaatattgccataatagagcatgaaggttatgaagccgacgatataatcggcagcctttcgttaaaggccgaaaaagagaattttgacgtaataatccttacgggggacagggattctttccagctgatcagcgacagggtgaaagttatcctgccttcgacgaaagccggaaaaacagagaccaacgtatatgataaacaggccatcattgacaaatacggagttttaccccatcagcttattgacgttaaaggcttaatgggagattcgtcagataatatacccggcgttccgggagtgggtgagaaaacggcgttaagccttatttcagcctacggtacactggaaggtgtttacgagcatattgatgaaataaaacagcctaagctgaaagcatcgctgattgaatataaggatcaggcgtttttaagccgtaagctgggtactattgtaagaaatctggagctgtgtgcttcgctggaggatctgaaaagaaaagaaataaaccgcaaagagcttttgaatgttttcagaaaactcgaatttgaaagtatcatatcaaaaatgaatcttgcttccgctgaggtgacagaattacctcccgcgccggaagagcttaaaataacccatatttcagcggcagaggatcttaagaaatggattgcttacctgcttaaccagaaaaacatttccgtccttcaactgattgaccgggaggattcatacagttcccgtctttcagggctggctttgtgcaccggggatgaggttttttatatcgagaccgggactgcactccccgagaatttgattgcaacagagctgaaagaactgtggcagaatgaaaatattcacaaaatcggacacaatataaaagaatttataacctggctgctgaaacacgatgttgaactgaacggcctttatttcgacactatgattgccgaatacctgatagattccataagaaacggctatcctatagcaagcctttctcacaaatacctgaatcgcagcgttccgtcgctggacgaacttttgggcaagggaaagggagcaaaaaagtactctgaaattccgcccgaaaggctgaaagattacagcgcttataacgtcaaagccatttttgacatatggccgatgcagaaaaaagttcttcaggaaaaccggcaggaggagctttttaatgacatagagcttcctcttataaccgtacttgccagtatggaataccacggtttcaaagttgacgccgcaaaacttcacgaatacggcgaagttcttctgtcacgcataaaagacctggaaaaggtaatttacatgctggccggtgaagaattcaacatcaattcaacgaagcagcttggtaccatattattcgaaaaactgaagcttcccgttgtaaaaagtacaaagaccggatactccaccgacgtcgaggttcttgaagagctttattacaagcatgatataataccatgcataatagaataccgccagcttacaaaactttacaccacctacgccgaaggtcttgaaaaagtgataaatcctgtaaccggtaaaattcattcaagttttaaccagacggttacggctacaggccgcatcagcagttgggaaccaaatttacagaatatcccagtcagacacgaaatgggaagggaaatacggaaagcttttattccgtcgtcggaaaacgctgtttttgttgatgccgattattcacagatagagcttcgcgtgcttgcccatataacaggcgatgaagccctgataaatgctttcgttaagggggaagatattcatacggccacggcgtcgctggtatttgacgtagctcccgaagatgtgacgccggaactgcgcagaaaggcaaaagccgtaaatttcggcatagtgtacgggatcagtgattacgggctggcacgggatttgggaattacccggaaggaagcaaagcggtatatagacgactattttgccaaataccccaaagtaaaaacctatgtggatgaaattgtgcgggtcggccaggaacaggggtatgtggaaactctgttccacagaagaagataccttcccgagcttgcatctaaaaattttcaccagcgttctttcggaaaaagggttgcaatgaatacgcccatacagggcactgcagccgatattattaaaattgcgatggtgaaggtatacaaggctttgaaagaatccggccttaaatccaggcttatcctccaggtccatgacgaacttgttattgagacttttgaagacgaactggagactgtcaaggaacttgtcaaaaagtgcatggaagaggccgttgaattgagtgtgccgcttgttgtcgacgtttcaatcgggaaaaactggtatgaagcctcctgatatggatcc

SEQ ID NO: 532 - DNA, 2772 bp, Artificial Sequence
  Description of Artificial Sequence: Synthetic Clostridium stercorarium DNA Polymerase T663Y
atgaaatacctgctgccgaccgctgctgctggtctgctgctcctcgctgcccagccggcgatggccatggatccaaaaataatccttatagacggaaacagtattttaaaccgcggtttttatgccctgtcggggcgatccatgctgactacgtccacaggtctgtataccaatgcggttttcgcttttgtaaatatattgaacaaatatatcgaagaggaaaaccctgattatattgccgttgctttcgatcttagggcaaaaactttccggcacggtctatatgagggatacaaagcgcagcggaaaggcatgcccgatgaacttgcaatgcagatacccctcgcgaaggaagtactgagggcgatgaatattgccataatagagcatgaaggttatgaagccgacgatataatcggcagcctttcgttaaaggccgaaaaagagaattttgacgtaataatccttacgggggacagggattctttccagctgatcagcgacagggtgaaagttatcctgccttcgacgaaagccggaaaaacagagaccaacgtatatgataaacaggccatcattgacaaatacggagttttaccccatcagcttattgacgttaaaggcttaatgggagattcgtcagataatatacccggcgttccgggagtgggtgagaaaacggcgttaagccttatttcagcctacggtacactggaaggtgtttacgagcatattgatgaaataaaacagcctaagctgaaagcatcgctgattgaatataaggatcaggcgtttttaagccgtaagctgggtactattgtaagaaatctggagctgtgtgcttcgctggaggatctgaaaagaaaagaaataaaccgcaaagagcttttgaatgttttcagaaaactcgaatttgaaagtatcatatcaaaaatgaatcttgcttccgctgaggtgacagaattacctcccgcgccggaagagcttaaaataacccatatttcagcggcagaggatcttaagaaatggattgcttacctgcttaaccagaaaaacatttccgtccttcaactgattgaccgggaggattcatacagttcccgtctttcagggctggctttgtgcaccggggatgaggttttttatatcgagaccgggactgcactccccgagaatttgattgcaacagagctgaaagaactgtggcagaatgaaaatattcacaaaatcggacacaatataaaagaatttataacctggctgctgaaacacgatgttgaactgaacggcctttatttcgacactatgattgccgaatacctgatagattccataagaaacggctatcctatagcaagcctttctcacaaatacctgaatcgcagcgttccgtcgctggacgaacttttgggcaagggaaagggagcaaaaaagtactctgaaattccgcccgaaaggctgaaagattacagcgcttataacgtcaaagccatttttgacatatggccgatgcagaaaaaagttcttcaggaaaaccggcaggaggagctttttaatgacatagagcttcctcttataaccgtacttgccagtatggaataccacggtttcaaagttgacgccgcaaaacttcacgaatacggcgaagttcttctgtcacgcataaaagacctggaaaaggtaatttacatgctggccggtgaagaattcaacatcaattcaacgaagcagcttggtaccatattattcgaaaaactgaagcttcccgttgtaaaaagtacaaagaccggatactccaccgacgtcgaggttcttgaagagctttattacaagcatgatataataccatgcataatagaataccgccagcttacaaaactttacaccacctacgccgaaggtcttgaaaaagtgataaatcctgtaaccggtaaaattcattcaagttttaaccagacggttacggctacaggccgcatcagcagttatgaaccaaatttacagaatatcccagtcagacacgaaatgggaagggaaatacggaaagcttttattccgtcgtcggaaaacgctgtttttgttgatgccgattattcacagatagagcttcgcgtgcttgcccatataacaggcgatgaagccctgataaatgctttcgttaagggggaagatattcatacggccacggcgtcgctggtatttgacgtagctcccgaagatgtgacgccggaactgcgcagaaaggcaaaagccgtaaatttcggcatagtgtacgggatcagtgattacgggctggcacgggatttgggaattacccggaaggaagcaaagcggtatatagacgactattttgccaaataccccaaagtaaaaacctatgtggatgaaattgtgcgggtcggccaggaacaggggtatgtggaaactctgttccacagaagaagataccttcccgagcttgcatctaaaaattttcaccagcgttctttcggaaaaagggttgcaatgaatacgcccatacagggcactgcagccgatattattaaaattgcgatggtgaaggtatacaaggctttgaaagaatccggccttaaatccaggcttatcctccaggtccatgacgaacttgttattgagacttttgaagacgaactggagactgtcaaggaacttgtcaaaaagtgcatggaagaggccgttgaattgagtgtgccgcttgttgtcgacgtttcaatcgggaaaaactggtatgaagcctcctgatatggatcc

SEQ ID NO: 533 - DNA, 2772 bp, Artificial Sequence
  Description of Artificial Sequence: Synthetic Clostridium stercorarium DNA Polymerase E664A
atgaaatacctgctgccgaccgctgctgctggtctgctgctcctcgctgcccagccggcgatggccatggatccaaaaataatccttatagacggaaacagtattttaaaccgcggtttttatgccctgtcggggcgatccatgctgactacgtccacaggtctgtataccaatgcggttttcgcttttgtaaatatattgaacaaatatatcgaagaggaaaaccctgattatattgccgttgctttcgatcttagggcaaaaactttccggcacggtctatatgagggatacaaagcgcagcggaaaggcatgcccgatgaacttgcaatgcagatacccctcgcgaaggaagtactgagggcgatgaatattgccataatagagcatgaaggttatgaagccgacgatataatcggcagcctttcgttaaaggccgaaaaagagaattttgacgtaataatccttacgggggacagggattctttccagctgatcagcgacagggtgaaagttatcctgccttcgacgaaagccggaaaaacagagaccaacgtatatgataaacaggccatcattgacaaatacggagttttaccccatcagcttattgacgttaaaggcttaatgggagattcgtcagataatatacccggcgttccgggagtgggtgagaaaacggcgttaagccttatttcagcctacggtacactggaaggtgtttacgagcatattgatgaaataaaacagcctaagctgaaagcatcgctgattgaatataaggatcaggcgtttttaagccgtaagctgggtactattgtaagaaatctggagctgtgtgcttcgctggaggatctgaaaagaaaagaaataaaccgcaaagagcttttgaatgttttcagaaaactcgaatttgaaagtatcatatcaaaaatgaatcttgcttccgctgaggtgacagaattacctcccgcgccggaagagcttaaaataacccatatttcagcggcagaggatcttaagaaatggattgcttacctgcttaaccagaaaaacatttccgtccttcaactgattgaccgggaggattcatacagttcccgtctttcagggctggctttgtgcaccggggatgaggttttttatatcgagaccgggactgcactccccgagaatttgattgcaacagagctgaaagaactgtggcagaatgaaaatattcacaaaatcggacacaatataaaagaatttataacctggctgctgaaacacgatgttgaactgaacggcctttatttcgacactatgattgccgaatacctgatagattccataagaaacggctatcctatagcaagcctttctcacaaatacctgaatcgcagcgttccgtcgctggacgaacttttgggcaagggaaagggagcaaaaaagtactctgaaattccgcccgaaaggctgaaagattacagcgcttataacgtcaaagccatttttgacatatggccgatgcagaaaaaagttcttcaggaaaaccggcaggaggagctttttaatgacatagagcttcctcttataaccgtacttgccagtatggaataccacggtttcaaagttgacgccgcaaaacttcacgaatacggcgaagttcttctgtcacgcataaaagacctggaaaaggtaatttacatgctggccggtgaagaattcaacatcaattcaacgaagcagcttggtaccatattattcgaaaaactgaagcttcccgttgtaaaaagtacaaagaccggatactccaccgacgtcgaggttcttgaagagctttattacaagcatgatataataccatgcataatagaataccgccagcttacaaaactttacaccacctacgccgaaggtcttgaaaaagtgataaatcctgtaaccggtaaaattcattcaagttttaaccagacggttacggctacaggccgcatcagcagtaccgctccaaatttacagaatatcccagtcagacacgaaatgggaagggaaatacggaaagcttttattccgtcgtcggaaaacgctgtttttgttgatgccgattattcacagatagagcttcgcgtgcttgcccatataacaggcgatgaagccctgataaatgctttcgttaagggggaagatattcatacggccacggcgtcgctggtatttgacgtagctcccgaagatgtgacgccggaactgcgcagaaaggcaaaagccgtaaatttcggcatagtgtacgggatcagtgattacgggctggcacgggatttgggaattacccggaaggaagcaaagcggtatatagacgactattttgccaaataccccaaagtaaaaacctatgtggatgaaattgtgcgggtcggccaggaacaggggtatgtggaaactctgttccacagaagaagataccttcccgagcttgcatctaaaaattttcaccagcgttctttcggaaaaagggttgcaatgaatacgcccatacagggcactgcagccgatattattaaaattgcgatggtgaaggtatacaaggctttgaaagaatccggccttaaatccaggcttatcctccaggtccatgacgaacttgttattgagacttttgaagacgaactggagactgtcaaggaacttgtcaaaaagtgcatggaagaggccgttgaattgagtgtgccgcttgttgtcgacgtttcaatcgggaaaaactggtatgaagcctcctgatatggatcc

SEQ ID NO: 534 - DNA, 2772 bp, Artificial Sequence
  Description of Artificial Sequence: Synthetic Clostridium stercorarium DNA Polymerase E664C
atgaaatacctgctgccgaccgctgctgctggtctgctgctcctcgctgcccagccggcgatggccatggatccaaaaataatccttatagacggaaacagtattttaaaccgcggtttttatgccctgtcggggcgatccatgctgactacgtccacaggtctgtataccaatgcggttttcgcttttgtaaatatattgaacaaatatatcgaagaggaaaaccctgattatattgccgttgctttcgatcttagggcaaaaactttccggcacggtctatatgagggatacaaagcgcagcggaaaggcatgcccgatgaacttgcaatgcagatacccctcgcgaaggaagtactgagggcgatgaatattgccataatagagcatgaaggttatgaagccgacgatataatcggcagcctttcgttaaaggccgaaaaagagaattttgacgtaataatccttacgggggacagggattctttccagctgatcagcgacagggtgaaagttatcctgccttcgacgaaagccggaaaaacagagaccaacgtatatgataaacaggccatcattgacaaatacggagttttaccccatcagcttattgacgttaaaggcttaatgggagattcgtcagataatatacccggcgttccgggagtgggtgagaaaacggcgttaagccttatttcagcctacggtacactggaaggtgtttacgagcatattgatgaaataaaacagcctaagctgaaagcatcgctgattgaatataaggatcaggcgtttttaagccgtaagctgggtactattgtaagaaatctggagctgtgtgcttcgctggaggatctgaaaagaaaagaaataaaccgcaaagagcttttgaatgttttcagaaaactcgaatttgaaagtatcatatcaaaaatgaatcttgcttccgctgaggtgacagaattacctcccgcgccggaagagcttaaaataacccatatttcagcggcagaggatcttaagaaatggattgcttacctgcttaaccagaaaaacatttccgtccttcaactgattgaccgggaggattcatacagttcccgtctttcagggctggctttgtgcaccggggatgaggttttttatatcgagaccgggactgcactccccgagaatttgattgcaacagagctgaaagaactgtggcagaatgaaaatattcacaaaatcggacacaatataaaagaatttataacctggctgctgaaacacgatgttgaactgaacggcctttatttcgacactatgattgccgaatacctgatagattccataagaaacggctatcctatagcaagcctttctcacaaatacctgaatcgcagcgttccgtcgctggacgaacttttgggcaagggaaagggagcaaaaaagtactctgaaattccgcccgaaaggctgaaagattacagcgcttataacgtcaaagccatttttgacatatggccgatgcagaaaaaagttcttcaggaaaaccggcaggaggagctttttaatgacatagagcttcctcttataaccgtacttgccagtatggaataccacggtttcaaagttgacgccgcaaaacttcacgaatacggcgaagttcttctgtcacgcataaaagacctggaaaaggtaatttacatgctggccggtgaagaattcaacatcaattcaacgaagcagcttggtaccatattattcgaaaaactgaagcttcccgttgtaaaaagtacaaagaccggatactccaccgacgtcgaggttcttgaagagctttattacaagcatgatataataccatgcataatagaataccgccagcttacaaaactttacaccacctacgccgaaggtcttgaaaaagtgataaatcctgtaaccggtaaaattcattcaagttttaaccagacggttacggctacaggccgcatcagcagtacctgtccaaatttacagaatatcccagtcagacacgaaatgggaagggaaatacggaaagcttttattccgtcgtcggaaaacgctgtttttgttgatgccgattattcacagatagagcttcgcgtgcttgcccatataacaggcgatgaagccctgataaatgctttcgttaagggggaagatattcatacggccacggcgtcgctggtatttgacgtagctcccgaagatgtgacgccggaactgcgcagaaaggcaaaagccgtaaatttcggcatagtgtacgggatcagtgattacgggctggcacgggatttgggaattacccggaaggaagcaaagcggtatatagacgactattttgccaaataccccaaagtaaaaacctatgtggatgaaattgtgcgggtcggccaggaacaggggtatgtggaaactctgttccacagaagaagataccttcccgagcttgcatctaaaaattttcaccagcgttctttcggaaaaagggttgcaatgaatacgcccatacagggcactgcagccgatattattaaaattgcgatggtgaaggtatacaaggctttgaaagaatccggccttaaatccaggcttatcctccaggtccatgacgaacttgttattgagacttttgaagacgaactggagactgtcaaggaacttgtcaaaaagtgcatggaagaggccgttgaattgagtgtgccgcttgttgtcgacgtttcaatcgggaaaaactggtatgaagcctcctgatatggatcc

SEQ ID NO: 535 - DNA, 2772 bp, Artificial Sequence
  Description of Artificial Sequence: Synthetic Clostridium stercorarium DNA Polymerase E664D
atgaaatacctgctgccgaccgctgctgctggtctgctgctcctcgctgcccagccggcgatggccatggatccaaaaataatccttatagacggaaacagtattttaaaccgcggtttttatgccctgtcggggcgatccatgctgactacgtccacaggtctgtataccaatgcggttttcgcttttgtaaatatattgaacaaatatatcgaagaggaaaaccctgattatattgccgttgctttcgatcttagggcaaaaactttccggcacggtctatatgagggatacaaagcgcagcggaaaggcatgcccgatgaacttgcaatgcagatacccctcgcgaaggaagtactgagggcgatgaatattgccataatagagcatgaaggttatgaagccgacgatataatcggcagcctttcgttaaaggccgaaaaagagaattttgacgtaataatccttacgggggacagggattctttccagctgatcagcgacagggtgaaagttatcctgccttcgacgaaagccggaaaaacagagaccaacgtatatgataaacaggccatcattgacaaatacggagttttaccccatcagcttattgacgttaaaggcttaatgggagattcgtcagataatatacccggcgttccgggagtgggtgagaaaacggcgttaagccttatttcagcctacggtacactggaaggtgtttacgagcatattgatgaaataaaacagcctaagctgaaagcatcgctgattgaatataaggatcaggcgtttttaagccgtaagctgggtactattgtaagaaatctggagctgtgtgcttcgctggaggatctgaaaagaaaagaaataaaccgcaaagagcttttgaatgttttcagaaaactcgaatttgaaagtatcatatcaaaaatgaatcttgcttccgctgaggtgacagaattacctcccgcgccggaagagcttaaaataacccatatttcagcggcagaggatcttaagaaatggattgcttacctgcttaaccagaaaaacatttccgtccttcaactgattgaccgggaggattcatacagttcccgtctttcagggctggctttgtgcaccggggatgaggttttttatatcgagaccgggactgcactccccgagaatttgattgcaacagagctgaaagaactgtggcagaatgaaaatattcacaaaatcggacacaatataaaagaatttataacctggctgctgaaacacgatgttgaactgaacggcctttatttcgacactatgattgccgaatacctgatagattccataagaaacggctatcctatagcaagcctttctcacaaatacctgaatcgcagcgttccgtcgctggacgaacttttgggcaagggaaagggagcaaaaaagtactctgaaattccgcccgaaaggctgaaagattacagcgcttataacgtcaaagccatttttgacatatggccgatgcagaaaaaagttcttcaggaaaaccggcaggaggagctttttaatgacatagagcttcctcttataaccgtacttgccagtatggaataccacggtttcaaagttgacgccgcaaaacttcacgaatacggcgaagttcttctgtcacgcataaaagacctggaaaaggtaatttacatgctggccggtgaagaattcaacatcaattcaacgaagcagcttggtaccatattattcgaaaaactgaagcttcccgttgtaaaaagtacaaagaccggatactccaccgacgtcgaggttcttgaagagctttattacaagcatgatataataccatgcataatagaataccgccagcttacaaaactttacaccacctacgccgaaggtcttgaaaaagtgataaatcctgtaaccggtaaaattcattcaagttttaaccagacggttacggctacaggccgcatcagcagtaccgatccaaatttacagaatatcccagtcagacacgaaatgggaagggaaatacggaaagcttttattccgtcgtcggaaaacgctgtttttgttgatgccgattattcacagatagagcttcgcgtgcttgcccatataacaggcgatgaagccctgataaatgctttcgttaagggggaagatattcatacggccacggcgtcgctggtatttgacgtagctcccgaagatgtgacgccggaactgcgcagaaaggcaaaagccgtaaatttcggcatagtgtacgggatcagtgattacgggctggcacgggatttgggaattacccggaaggaagcaaagcggtatatagacgactattttgccaaataccccaaagtaaaaacctatgtggatgaaattgtgcgggtcggccaggaacaggggtatgtggaaactctgttccacagaagaagataccttcccgagcttgcatctaaaaattttcaccagcgttctttcggaaaaagggttgcaatgaatacgcccatacagggcactgcagccgatattattaaaattgcgatggtgaaggtatacaaggctttgaaagaatccggccttaaatccaggcttatcctccaggtccatgacgaacttgttattgagacttttgaagacgaactggagactgtcaaggaacttgtcaaaaagtgcatggaagaggccgttgaattgagtgtgccgcttgttgtcgacgtttcaatcgggaaaaactggtatgaagcctcctgatatggatcc

SEQ ID NO: 536 - DNA, 2772 bp, Artificial Sequence
  Description of Artificial Sequence: Synthetic Clostridium stercorarium DNA Polymerase E664F
atgaaatacctgctgccgaccgctgctgctggtctgctgctcctcgctgcccagccggcgatggccatggatccaaaaataatccttatagacggaaacagtattttaaaccgcggtttttatgccctgtcggggcgatccatgctgactacgtccacaggtctgtataccaatgcggttttcgcttttgtaaatatattgaacaaatatatcgaagaggaaaaccctgattatattgccgttgctttcgatcttagggcaaaaactttccggcacggtctatatgagggatacaaagcgcagcggaaaggcatgcccgatgaacttgcaatgcagatacccctcgcgaaggaagtactgagggcgatgaatattgccataatagagcatgaaggttatgaagccgacgatataatcggcagcctttcgttaaaggccgaaaaagagaattttgacgtaataatccttacgggggacagggattctttccagctgatcagcgacagggtgaaagttatcctgccttcgacgaaagccggaaaaacagagaccaacgtatatgataaacaggccatcattgacaaatacggagttttaccccatcagcttattgacgttaaaggcttaatgggagattcgtcagataatatacccggcgttccgggagtgggtgagaaaacggcgttaagccttatttcagcctacggtacactggaaggtgtttacgagcatattgatgaaataaaacagcctaagctgaaagcatcgctgattgaatataaggatcaggcgtttttaagccgtaagctgggtactattgtaagaaatctggagctgtgtgcttcgctggaggatctgaaaagaaaagaaataaaccgcaaagagcttttgaatgttttcagaaaactcgaatttgaaagtatcatatcaaaaatgaatcttgcttccgctgaggtgacagaattacctcccgcgccggaagagcttaaaataacccatatttcagcggcagaggatcttaagaaatggattgcttacctgcttaaccagaaaaacatttccgtccttcaactgattgaccgggaggattcatacagttcccgtctttcagggctggctttgtgcaccggggatgaggttttttatatcgagaccgggactgcactccccgagaatttgattgcaacagagctgaaagaactgtggcagaatgaaaatattcacaaaatcggacacaatataaaagaatttataacctggctgctgaaacacgatgttgaactgaacggcctttatttcgacactatgattgccgaatacctgatagattccataagaaacggctatcctatagcaagcctttctcacaaatacctgaatcgcagcgttccgtcgctggacgaacttttgggcaagggaaagggagcaaaaaagtactctgaaattccgcccgaaaggctgaaagattacagcgcttataacgtcaaagccatttttgacatatggccgatgcagaaaaaagttcttcaggaaaaccggcaggaggagctttttaatgacatagagcttcctcttataaccgtacttgccagtatggaataccacggtttcaaagttgacgccgcaaaacttcacgaatacggcgaagttcttctgtcacgcataaaagacctggaaaaggtaatttacatgctggccggtgaagaattcaacatcaattcaacgaagcagcttggtaccatattattcgaaaaactgaagcttcccgttgtaaaaagtacaaagaccggatactccaccgacgtcgaggttcttgaagagctttattacaagcatgatataataccatgcataatagaataccgccagcttacaaaactttacaccacctacgccgaaggtcttgaaaaagtgataaatcctgtaaccggtaaaattcattcaagttttaaccagacggttacggctacaggccgcatcagcagtacctttccaaatttacagaatatcccagtcagacacgaaatgggaagggaaatacggaaagcttttattccgtcgtcggaaaacgctgtttttgttgatgccgattattcacagatagagcttcgcgtgcttgcccatataacaggcgatgaagccctgataaatgctttcgttaagggggaagatattcatacggccacggcgtcgctggtatttgacgtagctcccgaagatgtgacgccggaactgcgcagaaaggcaaaagccgtaaatttcggcatagtgtacgggatcagtgattacgggctggcacgggatttgggaattacccggaaggaagcaaagcggtatatagacgactattttgccaaataccccaaagtaaaaacctatgtggatgaaattgtgcgggtcggccaggaacaggggtatgtggaaactctgttccacagaagaagataccttcccgagcttgcatctaaaaattttcaccagcgttctttcggaaaaagggttgcaatgaatacgcccatacagggcactgcagccgatattattaaaattgcgatggtgaaggtatacaaggctttgaaagaatccggccttaaatccaggcttatcctccaggtccatgacgaacttgttattgagacttttgaagacgaactggagactgtcaaggaacttgtcaaaaagtgcatggaagaggccgttgaattgagtgtgccgcttgttgtcgacgtttcaatcgggaaaaactggtatgaagcctcctgatatggatcc

SEQ ID NO: 537 - DNA, 2772 bp, Artificial Sequence
  Description of Artificial Sequence: Synthetic Clostridium stercorarium DNA Polymerase E664G
atgaaatacctgctgccgaccgctgctgctggtctgctgctcctcgctgcccagccggcgatggccatggatccaaaaataatccttatagacggaaacagtattttaaaccgcggtttttatgccctgtcggggcgatccatgctgactacgtccacaggtctgtataccaatgcggttttcgcttttgtaaatatattgaacaaatatatcgaagaggaaaaccctgattatattgccgttgctttcgatcttagggcaaaaactttccggcacggtctatatgagggatacaaagcgcagcggaaaggcatgcccgatgaacttgcaatgcagatacccctcgcgaaggaagtactgagggcgatgaatattgccataatagagcatgaaggttatgaagccgacgatataatcggcagcctttcgttaaaggccgaaaaagagaattttgacgtaataatccttacgggggacagggattctttccagctgatcagcgacagggtgaaagttatcctgccttcgacgaaagccggaaaaacagagaccaacgtatatgataaacaggccatcattgacaaatacggagttttaccccatcagcttattgacgttaaaggcttaatgggagattcgtcagataatatacccggcgttccgggagtgggtgagaaaacggcgttaagccttatttcagcctacggtacactggaaggtgtttacgagcatattgatgaaataaaacagcctaagctgaaagcatcgctgattgaatataaggatcaggcgtttttaagccgtaagctgggtactattgtaagaaatctggagctgtgtgcttcgctggaggatctgaaaagaaaagaaataaaccgcaaagagcttttgaatgttttcagaaaactcgaatttgaaagtatcatatcaaaaatgaatcttgcttccgctgaggtgacagaattacctcccgcgccggaagagcttaaaataacccatatttcagcggcagaggatcttaagaaatggattgcttacctgcttaaccagaaaaacatttccgtccttcaactgattgaccgggaggattcatacagttcccgtctttcagggctggctttgtgcaccggggatgaggttttttatatcgagaccgggactgcactccccgagaatttgattgcaacagagctgaaagaactgtggcagaatgaaaatattcacaaaatcggacacaatataaaagaatttataacctggctgctgaaacacgatgttgaactgaacggcctttatttcgacactatgattgccgaatacctgatagattccataagaaacggctatcctatagcaagcctttctcacaaatacctgaatcgcagcgttccgtcgctggacgaacttttgggcaagggaaagggagcaaaaaagtactctgaaattccgcccgaaaggctgaaagattacagcgcttataacgtcaaagccatttttgacatatggccgatgcagaaaaaagttcttcaggaaaaccggcaggaggagctttttaatgacatagagcttcctcttataaccgtacttgccagtatggaataccacggtttcaaagttgacgccgcaaaacttcacgaatacggcgaagttcttctgtcacgcataaaagacctggaaaaggtaatttacatgctggccggtgaagaattcaacatcaattcaacgaagcagcttggtaccatattattcgaaaaactgaagcttcccgttgtaaaaagtacaaagaccggatactccaccgacgtcgaggttcttgaagagctttattacaagcatgatataataccatgcataatagaataccgccagcttacaaaactttacaccacctacgccgaaggtcttgaaaaagtgataaatcctgtaaccggtaaaattcattcaagttttaaccagacggttacggctacaggccgcatcagcagtaccggtccaaatttacagaatatcccagtcagacacgaaatgggaagggaaatacggaaagcttttattccgtcgtcggaaaacgctgtttttgttgatgccgattattcacagatagagcttcgcgtgcttgcccatataacaggcgatgaagccctgataaatgctttcgttaagggggaagatattcatacggccacggcgtcgctggtatttgacgtagctcccgaagatgtgacgccggaactgcgcagaaaggcaaaagccgtaaatttcggcatagtgtacgggatcagtgattacgggctggcacgggatttgggaattacccggaaggaagcaaagcggtatatagacgactattttgccaaataccccaaagtaaaaacctatgtggatgaaattgtgcgggtcggccaggaacaggggtatgtggaaactctgttccacagaagaagataccttcccgagcttgcatctaaaaattttcaccagcgttctttcggaaaaagggttgcaatgaatacgcccatacagggcactgcagccgatattattaaaattgcgatggtgaaggtatacaaggctttgaaagaatccggccttaaatccaggcttatcctccaggtccatgacgaacttgttattgagacttttgaagacgaactggagactgtcaaggaacttgtcaaaaagtgcatggaagaggccgttgaattgagtgtgccgcttgttgtcgacgtttcaatcgggaaaaactggtatgaagcctcctgatatggatcc

SEQ ID NO: 538 - DNA, 2772 bp, Artificial Sequence
  Description of Artificial Sequence: Synthetic Clostridium stercorarium DNA Polymerase E664H
atgaaatacctgctgccgaccgctgctgctggtctgctgctcctcgctgcccagccggcgatggccatggatccaaaaataatccttatagacggaaacagtattttaaaccgcggtttttatgccctgtcggggcgatccatgctgactacgtccacaggtctgtataccaatgcggttttcgcttttgtaaatatattgaacaaatatatcgaagaggaaaaccctgattatattgccgttgctttcgatcttagggcaaaaactttccggcacggtctatatgagggatacaaagcgcagcggaaaggcatgcccgatgaacttgcaatgcagatacccctcgcgaaggaagtactgagggcgatgaatattgccataatagagcatgaaggttatgaagccgacgatataatcggcagcctttcgttaaaggccgaaaaagagaattttgacgtaataatccttacgggggacagggattctttccagctgatcagcgacagggtgaaagttatcctgccttcgacgaaagccggaaaaacagagaccaacgtatatgataaacaggccatcattgacaaatacggagttttaccccatcagcttattgacgttaaaggcttaatgggagattcgtcagataatatacccggcgttccgggagtgggtgagaaaacggcgttaagccttatttcagcctacggtacactggaaggtgtttacgagcatattgatgaaataaaacagcctaagctgaaagcatcgctgattgaatataaggatcaggcgtttttaagccgtaagctgggtactattgtaagaaatctggagctgtgtgcttcgctggaggatctgaaaagaaaagaaataaaccgcaaagagcttttgaatgttttcagaaaactcgaatttgaaagtatcatatcaaaaatgaatcttgcttccgctgaggtgacagaattacctcccgcgccggaagagcttaaaataacccatatttcagcggcagaggatcttaagaaatggattgcttacctgcttaaccagaaaaacatttccgtccttcaactgattgaccgggaggattcatacagttcccgtctttcagggctggctttgtgcaccggggatgaggttttttatatcgagaccgggactgcactccccgagaatttgattgcaacagagctgaaagaactgtggcagaatgaaaatattcacaaaatcggacacaatataaaagaatttataacctggctgctgaaacacgatgttgaactgaacggcctttatttcgacactatgattgccgaatacctgatagattccataagaaacggctatcctatagcaagcctttctcacaaatacctgaatcgcagcgttccgtcgctggacgaacttttgggcaagggaaagggagcaaaaaagtactctgaaattccgcccgaaaggctgaaagattacagcgcttataacgtcaaagccatttttgacatatggccgatgcagaaaaaagttcttcaggaaaaccggcaggaggagctttttaatgacatagagcttcctcttataaccgtacttgccagtatggaataccacggtttcaaagttgacgccgcaaaacttcacgaatacggcgaagttcttctgtcacgcataaaagacctggaaaaggtaatttacatgctggccggtgaagaattcaacatcaattcaacgaagcagcttggtaccatattattcgaaaaactgaagcttcccgttgtaaaaagtacaaagaccggatactccaccgacgtcgaggttcttgaagagctttattacaagcatgatataataccatgcataatagaataccgccagcttacaaaactttacaccacctacgccgaaggtcttgaaaaagtgataaatcctgtaaccggtaaaattcattcaagttttaaccagacggttacggctacaggccgcatcagcagtacccatccaaatttacagaatatcccagtcagacacgaaatgggaagggaaatacggaaagcttttattccgtcgtcggaaaacgctgtttttgttgatgccgattattcacagatagagcttcgcgtgcttgcccatataacaggcgatgaagccctgataaatgctttcgttaagggggaagatattcatacggccacggcgtcgctggtatttgacgtagctcccgaagatgtgacgccggaactgcgcagaaaggcaaaagccgtaaatttcggcatagtgtacgggatcagtgattacgggctggcacgggatttgggaattacccggaaggaagcaaagcggtatatagacgactattttgccaaataccccaaagtaaaaacctatgtggatgaaattgtgcgggtcggccaggaacaggggtatgtggaaactctgttccacagaagaagataccttcccgagcttgcatctaaaaattttcaccagcgttctttcggaaaaagggttgcaatgaatacgcccatacagggcactgcagccgatattattaaaattgcgatggtgaaggtatacaaggctttgaaagaatccggccttaaatccaggcttatcctccaggtccatgacgaacttgttattgagacttttgaagacgaactggagactgtcaaggaacttgtcaaaaagtgcatggaagaggccgttgaattgagtgtgccgcttgttgtcgacgtttcaatcgggaaaaactggtatgaagcctcctgatatggatcc

SEQ ID NO: 539 - DNA, 2772 bp, Artificial Sequence
  Description of Artificial Sequence: Synthetic Clostridium stercorarium DNA Polymerase E664I
atgaaatacctgctgccgaccgctgctgctggtctgctgctcctcgctgcccagccggcgatggccatggatccaaaaataatccttatagacggaaacagtattttaaaccgcggtttttatgccctgtcggggcgatccatgctgactacgtccacaggtctgtataccaatgcggttttcgcttttgtaaatatattgaacaaatatatcgaagaggaaaaccctgattatattgccgttgctttcgatcttagggcaaaaactttccggcacggtctatatgagggatacaaagcgcagcggaaaggcatgcccgatgaacttgcaatgcagatacccctcgcgaaggaagtactgagggcgatgaatattgccataatagagcatgaaggttatgaagccgacgatataatcggcagcctttcgttaaaggccgaaaaagagaattttgacgtaataatccttacgggggacagggattctttccagctgatcagcgacagggtgaaagttatcctgccttcgacgaaagccggaaaaacagagaccaacgtatatgataaacaggccatcattgacaaatacggagttttaccccatcagcttattgacgttaaaggcttaatgggagattcgtcagataatatacccggcgttccgggagtgggtgagaaaacggcgttaagccttatttcagcctacggtacactggaaggtgtttacgagcatattgatgaaataaaacagcctaagctgaaagcatcgctgattgaatataaggatcaggcgtttttaagccgtaagctgggtactattgtaagaaatctggagctgtgtgcttcgctggaggatctgaaaagaaaagaaataaaccgcaaagagcttttgaatgttttcagaaaactcgaatttgaaagtatcatatcaaaaatgaatcttgcttccgctgaggtgacagaattacctcccgcgccggaagagcttaaaataacccatatttcagcggcagaggatcttaagaaatggattgcttacctgcttaaccagaaaaacatttccgtccttcaactgattgaccgggaggattcatacagttcccgtctttcagggctggctttgtgcaccggggatgaggttttttatatcgagaccgggactgcactccccgagaatttgattgcaacagagctgaaagaactgtggcagaatgaaaatattcacaaaatcggacacaatataaaagaatttataacctggctgctgaaacacgatgttgaactgaacggcctttatttcgacactatgattgccgaatacctgatagattccataagaaacggctatcctatagcaagcctttctcacaaatacctgaatcgcagcgttccgtcgctggacgaacttttgggcaagggaaagggagcaaaaaagtactctgaaattccgcccgaaaggctgaaagattacagcgcttataacgtcaaagccatttttgacatatggccgatgcagaaaaaagttcttcaggaaaaccggcaggaggagctttttaatgacatagagcttcctcttataaccgtacttgccagtatggaataccacggtttcaaagttgacgccgcaaaacttcacgaatacggcgaagttcttctgtcacgcataaaagacctggaaaaggtaatttacatgctggccggtgaagaattcaacatcaattcaacgaagcagcttggtaccatattattcgaaaaactgaagcttcccgttgtaaaaagtacaaagaccggatactccaccgacgtcgaggttcttgaagagctttattacaagcatgatataataccatgcataatagaataccgccagcttacaaaactttacaccacctacgccgaaggtcttgaaaaagtgataaatcctgtaaccggtaaaattcattcaagttttaaccagacggttacggctacaggccgcatcagcagtaccattccaaatttacagaatatcccagtcagacacgaaatgggaagggaaatacggaaagcttttattccgtcgtcggaaaacgctgtttttgttgatgccgattattcacagatagagcttcgcgtgcttgcccatataacaggcgatgaagccctgataaatgctttcgttaagggggaagatattcatacggccacggcgtcgctggtatttgacgtagctcccgaagatgtgacgccggaactgcgcagaaaggcaaaagccgtaaatttcggcatagtgtacgggatcagtgattacgggctggcacgggatttgggaattacccggaaggaagcaaagcggtatatagacgactattttgccaaataccccaaagtaaaaacctatgtggatgaaattgtgcgggtcggccaggaacaggggtatgtggaaactctgttccacagaagaagataccttcccgagcttgcatctaaaaattttcaccagcgttctttcggaaaaagggttgcaatgaatacgcccatacagggcactgcagccgatattattaaaattgcgatggtgaaggtatacaaggctttgaaagaatccggccttaaatccaggcttatcctccaggtccatgacgaacttgttattgagacttttgaagacgaactggagactgtcaaggaacttgtcaaaaagtgcatggaagaggccgttgaattgagtgtgccgcttgttgtcgacgtttcaatcgggaaaaactggtatgaagcctcctgatatggatcc

SEQ ID NO: 540 - DNA, 2772 bp, Artificial Sequence
  Description of Artificial Sequence: Synthetic Clostridium stercorarium DNA Polymerase E664L
atgaaatacctgctgccgaccgctgctgctggtctgctgctcctcgctgcccagccggcgatggccatggatccaaaaataatccttatagacggaaacagtattttaaaccgcggtttttatgccctgtcggggcgatccatgctgactacgtccacaggtctgtataccaatgcggttttcgcttttgtaaatatattgaacaaatatatcgaagaggaaaaccctgattatattgccgttgctttcgatcttagggcaaaaactttccggcacggtctatatgagggatacaaagcgcagcggaaaggcatgcccgatgaacttgcaatgcagatacccctcgcgaaggaagtactgagggcgatgaatattgccataatagagcatgaaggttatgaagccgacgatataatcggcagcctttcgttaaaggccgaaaaagagaattttgacgtaataatccttacgggggacagggattctttccagctgatcagcgacagggtgaaagttatcctgccttcgacgaaagccggaaaaacagagaccaacgtatatgataaacaggccatcattgacaaatacggagttttaccccatcagcttattgacgttaaaggcttaatgggagattcgtcagataatatacccggcgttccgggagtgggtgagaaaacggcgttaagccttatttcagcctacggtacactggaaggtgtttacgagcatattgatgaaataaaacagcctaagctgaaagcatcgctgattgaatataaggatcaggcgtttttaagccgtaagctgggtactattgtaagaaatctggagctgtgtgcttcgctggaggatctgaaaagaaaagaaataaaccgcaaagagcttttgaatgttttcagaaaactcgaatttgaaagtatcatatcaaaaatgaatcttgcttccgctgaggtgacagaattacctcccgcgccggaagagcttaaaataacccatatttcagcggcagaggatcttaagaaatggattgcttacctgcttaaccagaaaaacatttccgtccttcaactgattgaccgggaggattcatacagttcccgtctttcagggctggctttgtgcaccggggatgaggttttttatatcgagaccgggactgcactccccgagaatttgattgcaacagagctgaaagaactgtggcagaatgaaaatattcacaaaatcggacacaatataaaagaatttataacctggctgctgaaacacgatgttgaactgaacggcctttatttcgacactatgattgccgaatacctgatagattccataagaaacggctatcctatagcaagcctttctcacaaatacctgaatcgcagcgttccgtcgctggacgaacttttgggcaagggaaagggagcaaaaaagtactctgaaattccgcccgaaaggctgaaagattacagcgcttataacgtcaaagccatttttgacatatggccgatgcagaaaaaagttcttcaggaaaaccggcaggaggagctttttaatgacatagagcttcctcttataaccgtacttgccagtatggaataccacggtttcaaagttgacgccgcaaaacttcacgaatacggcgaagttcttctgtcacgcataaaagacctggaaaaggtaatttacatgctggccggtgaagaattcaacatcaattcaacgaagcagcttggtaccatattattcgaaaaactgaagcttcccgttgtaaaaagtacaaagaccggatactccaccgacgtcgaggttcttgaagagctttattacaagcatgatataataccatgcataatagaataccgccagcttacaaaactttacaccacctacgccgaaggtcttgaaaaagtgataaatcctgtaaccggtaaaattcattcaagttttaaccagacggttacggctacaggccgcatcagcagtacccttccaaatttacagaatatcccagtcagacacgaaatgggaagggaaatacggaaagcttttattccgtcgtcggaaaacgctgtttttgttgatgccgattattcacagatagagcttcgcgtgcttgcccatataacaggcgatgaagccctgataaatgctttcgttaagggggaagatattcatacggccacggcgtcgctggtatttgacgtagctcccgaagatgtgacgccggaactgcgcagaaaggcaaaagccgtaaatttcggcatagtgtacgggatcagtgattacgggctggcacgggatttgggaattacccggaaggaagcaaagcggtatatagacgactattttgccaaataccccaaagtaaaaacctatgtggatgaaattgtgcgggtcggccaggaacaggggtatgtggaaactctgttccacagaagaagataccttcccgagcttgcatctaaaaattttcaccagcgttctttcggaaaaagggttgcaatgaatacgcccatacagggcactgcagccgatattattaaaattgcgatggtgaaggtatacaaggctttgaaagaatccggccttaaatccaggcttatcctccaggtccatgacgaacttgttattgagacttttgaagacgaactggagactgtcaaggaacttgtcaaaaagtgcatggaagaggccgttgaattgagtgtgccgcttgttgtcgacgtttcaatcgggaaaaactggtatgaagcctcctgatatggatcc

SEQ ID NO: 541 - DNA, 2772 bp, Artificial Sequence
  Description of Artificial Sequence: Synthetic Clostridium stercorarium DNA Polymerase E664M
atgaaatacctgctgccgaccgctgctgctggtctgctgctcctcgctgcccagccggcgatggccatggatccaaaaataatccttatagacggaaacagtattttaaaccgcggtttttatgccctgtcggggcgatccatgctgactacgtccacaggtctgtataccaatgcggttttcgcttttgtaaatatattgaacaaatatatcgaagaggaaaaccctgattatattgccgttgctttcgatcttagggcaaaaactttccggcacggtctatatgagggatacaaagcgcagcggaaaggcatgcccgatgaacttgcaatgcagatacccctcgcgaaggaagtactgagggcgatgaatattgccataatagagcatgaaggttatgaagccgacgatataatcggcagcctttcgttaaaggccgaaaaagagaattttgacgtaataatccttacgggggacagggattctttccagctgatcagcgacagggtgaaagttatcctgccttcgacgaaagccggaaaaacagagaccaacgtatatgataaacaggccatcattgacaaatacggagttttaccccatcagcttattgacgttaaaggcttaatgggagattcgtcagataatatacccggcgttccgggagtgggtgagaaaacggcgttaagccttatttcagcctacggtacactggaaggtgtttacgagcatattgatgaaataaaacagcctaagctgaaagcatcgctgattgaatataaggatcaggcgtttttaagccgtaagctgggtactattgtaagaaatctggagctgtgtgcttcgctggaggatctgaaaagaaaagaaataaaccgcaaagagcttttgaatgttttcagaaaactcgaatttgaaagtatcatatcaaaaatgaatcttgcttccgctgaggtgacagaattacctcccgcgccggaagagcttaaaataacccatatttcagcggcagaggatcttaagaaatggattgcttacctgcttaaccagaaaaacatttccgtccttcaactgattgaccgggaggattcatacagttcccgtctttcagggctggctttgtgcaccggggatgaggttttttatatcgagaccgggactgcactccccgagaatttgattgcaacagagctgaaagaactgtggcagaatgaaaatattcacaaaatcggacacaatataaaagaatttataacctggctgctgaaacacgatgttgaactgaacggcctttatttcgacactatgattgccgaatacctgatagattccataagaaacggctatcctatagcaagcctttctcacaaatacctgaatcgcagcgttccgtcgctggacgaacttttgggcaagggaaagggagcaaaaaagtactctgaaattccgcccgaaaggctgaaagattacagcgcttataacgtcaaagccatttttgacatatggccgatgcagaaaaaagttcttcaggaaaaccggcaggaggagctttttaatgacatagagcttcctcttataaccgtacttgccagtatggaataccacggtttcaaagttgacgccgcaaaacttcacgaatacggcgaagttcttctgtcacgcataaaagacctggaaaaggtaatttacatgctggccggtgaagaattcaacatcaattcaacgaagcagcttggtaccatattattcgaaaaactgaagcttcccgttgtaaaaagtacaaagaccggatactccaccgacgtcgaggttcttgaagagctttattacaagcatgatataataccatgcataatagaataccgccagcttacaaaactttacaccacctacgccgaaggtcttgaaaaagtgataaatcctgtaaccggtaaaattcattcaagttttaaccagacggttacggctacaggccgcatcagcagtaccatgccaaatttacagaatatcccagtcagacacgaaatgggaagggaaatacggaaagcttttattccgtcgtcggaaaacgctgtttttgttgatgccgattattcacagatagagcttcgcgtgcttgcccatataacaggcgatgaagccctgataaatgctttcgttaagggggaagatattcatacggccacggcgtcgctggtatttgacgtagctcccgaagatgtgacgccggaactgcgcagaaaggcaaaagccgtaaatttcggcatagtgtacgggatcagtgattacgggctggcacgggatttgggaattacccggaaggaagcaaagcggtatatagacgactattttgccaaataccccaaagtaaaaacctatgtggatgaaattgtgcgggtcggccaggaacaggggtatgtggaaactctgttccacagaagaagataccttcccgagcttgcatctaaaaattttcaccagcgttctttcggaaaaagggttgcaatgaatacgcccatacagggcactgcagccgatattattaaaattgcgatggtgaaggtatacaaggctttgaaagaatccggccttaaatccaggcttatcctccaggtccatgacgaacttgttattgagacttttgaagacgaactggagactgtcaaggaacttgtcaaaaagtgcatggaagaggccgttgaattgagtgtgccgcttgttgtcgacgtttcaatcgggaaaaactggtatgaagcctcctgatatggatcc

SEQ ID NO: 542 - DNA, 2772 bp, Artificial Sequence
  Description of Artificial Sequence: Synthetic Clostridium stercorarium DNA Polymerase E664N
atgaaatacctgctgccgaccgctgctgctggtctgctgctcctcgctgcccagccggcgatggccatggatccaaaaataatccttatagacggaaacagtattttaaaccgcggtttttatgccctgtcggggcgatccatgctgactacgtccacaggtctgtataccaatgcggttttcgcttttgtaaatatattgaacaaatatatcgaagaggaaaaccctgattatattgccgttgctttcgatcttagggcaaaaactttccggcacggtctatatgagggatacaaagcgcagcggaaaggcatgcccgatgaacttgcaatgcagatacccctcgcgaaggaagtactgagggcgatgaatattgccataatagagcatgaaggttatgaagccgacgatataatcggcagcctttcgttaaaggccgaaaaagagaattttgacgtaataatccttacgggggacagggattctttccagctgatcagcgacagggtgaaagttatcctgccttcgacgaaagccggaaaaacagagaccaacgtatatgataaacaggccatcattgacaaatacggagttttaccccatcagcttattgacgttaaaggcttaatgggagattcgtcagataatatacccggcgttccgggagtgggtgagaaaacggcgttaagccttatttcagcctacggtacactggaaggtgtttacgagcatattgatgaaataaaacagcctaagctgaaagcatcgctgattgaatataaggatcaggcgtttttaagccgtaagctgggtactattgtaagaaatctggagctgtgtgcttcgctggaggatctgaaaagaaaagaaataaaccgcaaagagcttttgaatgttttcagaaaactcgaatttgaaagtatcatatcaaaaatgaatcttgcttccgctgaggtgacagaattacctcccgcgccggaagagcttaaaataacccatatttcagcggcagaggatcttaagaaatggattgcttacctgcttaaccagaaaaacatttccgtccttcaactgattgaccgggaggattcatacagttcccgtctttcagggctggctttgtgcaccggggatgaggttttttatatcgagaccgggactgcactccccgagaatttgattgcaacagagctgaaagaactgtggcagaatgaaaatattcacaaaatcggacacaatataaaagaatttataacctggctgctgaaacacgatgttgaactgaacggcctttatttcgacactatgattgccgaatacctgatagattccataagaaacggctatcctatagcaagcctttctcacaaatacctgaatcgcagcgttccgtcgctggacgaacttttgggcaagggaaagggagcaaaaaagtactctgaaattccgcccgaaaggctgaaagattacagcgcttataacgtcaaagccatttttgacatatggccgatgcagaaaaaagttcttcaggaaaaccggcaggaggagctttttaatgacatagagcttcctcttataaccgtacttgccagtatggaataccacggtttcaaagttgacgccgcaaaacttcacgaatacggcgaagttcttctgtcacgcataaaagacctggaaaaggtaatttacatgctggccggtgaagaattcaacatcaattcaacgaagcagcttggtaccatattattcgaaaaactgaagcttcccgttgtaaaaagtacaaagaccggatactccaccgacgtcgaggttcttgaagagctttattacaagcatgatataataccatgcataatagaataccgccagcttacaaaactttacaccacctacgccgaaggtcttgaaaaagtgataaatcctgtaaccggtaaaattcattcaagttttaaccagacggttacggctacaggccgcatcagcagtaccaatccaaatttacagaatatcccagtcagacacgaaatgggaagggaaatacggaaagcttttattccgtcgtcggaaaacgctgtttttgttgatgccgattattcacagatagagcttcgcgtgcttgcccatataacaggcgatgaagccctgataaatgctttcgttaagggggaagatattcatacggccacggcgtcgctggtatttgacgtagctcccgaagatgtgacgccggaactgcgcagaaaggcaaaagccgtaaatttcggcatagtgtacgggatcagtgattacgggctggcacgggatttgggaattacccggaaggaagcaaagcggtatatagacgactattttgccaaataccccaaagtaaaaacctatgtggatgaaattgtgcgggtcggccaggaacaggggtatgtggaaactctgttccacagaagaagataccttcccgagcttgcatctaaaaattttcaccagcgttctttcggaaaaagggttgcaatgaatacgcccatacagggcactgcagccgatattattaaaattgcgatggtgaaggtatacaaggctttgaaagaatccggccttaaatccaggcttatcctccaggtccatgacgaacttgttattgagacttttgaagacgaactggagactgtcaaggaacttgtcaaaaagtgcatggaagaggccgttgaattgagtgtgccgcttgttgtcgacgtttcaatcgggaaaaactggtatgaagcctcctgatatggatcc

SEQ ID NO: 543 - DNA, 2772 bp, Artificial Sequence
  Description of Artificial Sequence: Synthetic Clostridium stercorarium DNA Polymerase E664P
atgaaatacctgctgccgaccgctgctgctggtctgctgctcctcgctgcccagccggcgatggccatggatccaaaaataatccttatagacggaaacagtattttaaaccgcggtttttatgccctgtcggggcgatccatgctgactacgtccacaggtctgtataccaatgcggttttcgcttttgtaaatatattgaacaaatatatcgaagaggaaaaccctgattatattgccgttgctttcgatcttagggcaaaaactttccggcacggtctatatgagggatacaaagcgcagcggaaaggcatgcccgatgaacttgcaatgcagatacccctcgcgaaggaagtactgagggcgatgaatattgccataatagagcatgaaggttatgaagccgacgatataatcggcagcctttcgttaaaggccgaaaaagagaattttgacgtaataatccttacgggggacagggattctttccagctgatcagcgacagggtgaaagttatcctgccttcgacgaaagccggaaaaacagagaccaacgtatatgataaacaggccatcattgacaaatacggagttttaccccatcagcttattgacgttaaaggcttaatgggagattcgtcagataatatacccggcgttccgggagtgggtgagaaaacggcgttaagccttatttcagcctacggtacactggaaggtgtttacgagcatattgatgaaataaaacagcctaagctgaaagcatcgctgattgaatataaggatcaggcgtttttaagccgtaagctgggtactattgtaagaaatctggagctgtgtgcttcgctggaggatctgaaaagaaaagaaataaaccgcaaagagcttttgaatgttttcagaaaactcgaatttgaaagtatcatatcaaaaatgaatcttgcttccgctgaggtgacagaattacctcccgcgccggaagagcttaaaataacccatatttcagcggcagaggatcttaagaaatggattgcttacctgcttaaccagaaaaacatttccgtccttcaactgattgaccgggaggattcatacagttcccgtctttcagggctggctttgtgcaccggggatgaggttttttatatcgagaccgggactgcactccccgagaatttgattgcaacagagctgaaagaactgtggcagaatgaaaatattcacaaaatcggacacaatataaaagaatttataacctggctgctgaaacacgatgttgaactgaacggcctttatttcgacactatgattgccgaatacctgatagattccataagaaacggctatcctatagcaagcctttctcacaaatacctgaatcgcagcgttccgtcgctggacgaacttttgggcaagggaaagggagcaaaaaagtactctgaaattccgcccgaaaggctgaaagattacagcgcttataacgtcaaagccatttttgacatatggccgatgcagaaaaaagttcttcaggaaaaccggcaggaggagctttttaatgacatagagcttcctcttataaccgtacttgccagtatggaataccacggtttcaaagttgacgccgcaaaacttcacgaatacggcgaagttcttctgtcacgcataaaagacctggaaaaggtaatttacatgctggccggtgaagaattcaacatcaattcaacgaagcagcttggtaccatattattcgaaaaactgaagcttcccgttgtaaaaagtacaaagaccggatactccaccgacgtcgaggttcttgaagagctttattacaagcatgatataataccatgcataatagaataccgccagcttacaaaactttacaccacctacgccgaaggtcttgaaaaagtgataaatcctgtaaccggtaaaattcattcaagttttaaccagacggttacggctacaggccgcatcagcagtacccctccaaatttacagaatatcccagtcagacacgaaatgggaagggaaatacggaaagcttttattccgtcgtcggaaaacgctgtttttgttgatgccgattattcacagatagagcttcgcgtgcttgcccatataacaggcgatgaagccctgataaatgctttcgttaagggggaagatattcatacggccacggcgtcgctggtatttgacgtagctcccgaagatgtgacgccggaactgcgcagaaaggcaaaagccgtaaatttcggcatagtgtacgggatcagtgattacgggctggcacgggatttgggaattacccggaaggaagcaaagcggtatatagacgactattttgccaaataccccaaagtaaaaacctatgtggatgaaattgtgcgggtcggccaggaacaggggtatgtggaaactctgttccacagaagaagataccttcccgagcttgcatctaaaaattttcaccagcgttctttcggaaaaagggttgcaatgaatacgcccatacagggcactgcagccgatattattaaaattgcgatggtgaaggtatacaaggctttgaaagaatccggccttaaatccaggcttatcctccaggtccatgacgaacttgttattgagacttttgaagacgaactggagactgtcaaggaacttgtcaaaaagtgcatggaagaggccgttgaattgagtgtgccgcttgttgtcgacgtttcaatcgggaaaaactggtatgaagcctcctgatatggatcc

SEQ ID NO: 544 - DNA, 2772 bp, Artificial Sequence
  Description of Artificial Sequence: Synthetic Clostridium stercorarium DNA Polymerase E664Q
atgaaatacctgctgccgaccgctgctgctggtctgctgctcctcgctgcccagccggcgatggccatggatccaaaaataatccttatagacggaaacagtattttaaaccgcggtttttatgccctgtcggggcgatccatgctgactacgtccacaggtctgtataccaatgcggttttcgcttttgtaaatatattgaacaaatatatcgaagaggaaaaccctgattatattgccgttgctttcgatcttagggcaaaaactttccggcacggtctatatgagggatacaaagcgcagcggaaaggcatgcccgatgaacttgcaatgcagatacccctcgcgaaggaagtactgagggcgatgaatattgccataatagagcatgaaggttatgaagccgacgatataatcggcagcctttcgttaaaggccgaaaaagagaattttgacgtaataatccttacgggggacagggattctttccagctgatcagcgacagggtgaaagttatcctgccttcgacgaaagccggaaaaacagagaccaacgtatatgataaacaggccatcattgacaaatacggagttttaccccatcagcttattgacgttaaaggcttaatgggagattcgtcagataatatacccggcgttccgggagtgggtgagaaaacggcgttaagccttatttcagcctacggtacactggaaggtgtttacgagcatattgatgaaataaaacagcctaagctgaaagcatcgctgattgaatataaggatcaggcgtttttaagccgtaagctgggtactattgtaagaaatctggagctgtgtgcttcgctggaggatctgaaaagaaaagaaataaaccgcaaagagcttttgaatgttttcagaaaactcgaatttgaaagtatcatatcaaaaatgaatcttgcttccgctgaggtgacagaattacctcccgcgccggaagagcttaaaataacccatatttcagcggcagaggatcttaagaaatggattgcttacctgcttaaccagaaaaacatttccgtccttcaactgattgaccgggaggattcatacagttcccgtctttcagggctggctttgtgcaccggggatgaggttttttatatcgagaccgggactgcactccccgagaatttgattgcaacagagctgaaagaactgtggcagaatgaaaatattcacaaaatcggacacaatataaaagaatttataacctggctgctgaaacacgatgttgaactgaacggcctttatttcgacactatgattgccgaatacctgatagattccataagaaacggctatcctatagcaagcctttctcacaaatacctgaatcgcagcgttccgtcgctggacgaacttttgggcaagggaaagggagcaaaaaagtactctgaaattccgcccgaaaggctgaaagattacagcgcttataacgtcaaagccatttttgacatatggccgatgcagaaaaaagttcttcaggaaaaccggcaggaggagctttttaatgacatagagcttcctcttataaccgtacttgccagtatggaataccacggtttcaaagttgacgccgcaaaacttcacgaatacggcgaagttcttctgtcacgcataaaagacctggaaaaggtaatttacatgctggccggtgaagaattcaacatcaattcaacgaagcagcttggtaccatattattcgaaaaactgaagcttcccgttgtaaaaagtacaaagaccggatactccaccgacgtcgaggttcttgaagagctttattacaagcatgatataataccatgcataatagaataccgccagcttacaaaactttacaccacctacgccgaaggtcttgaaaaagtgataaatcctgtaaccggtaaaattcattcaagttttaaccagacggttacggctacaggccgcatcagcagtacccaaccaaatttacagaatatcccagtcagacacgaaatgggaagggaaatacggaaagcttttattccgtcgtcggaaaacgctgtttttgttgatgccgattattcacagatagagcttcgcgtgcttgcccatataacaggcgatgaagccctgataaatgctttcgttaagggggaagatattcatacggccacggcgtcgctggtatttgacgtagctcccgaagatgtgacgccggaactgcgcagaaaggcaaaagccgtaaatttcggcatagtgtacgggatcagtgattacgggctggcacgggatttgggaattacccggaaggaagcaaagcggtatatagacgactattttgccaaataccccaaagtaaaaacctatgtggatgaaattgtgcgggtcggccaggaacaggggtatgtggaaactctgttccacagaagaagataccttcccgagcttgcatctaaaaattttcaccagcgttctttcggaaaaagggttgcaatgaatacgcccatacagggcactgcagccgatattattaaaattgcgatggtgaaggtatacaaggctttgaaagaatccggccttaaatccaggcttatcctccaggtccatgacgaacttgttattgagacttttgaagacgaactggagactgtcaaggaacttgtcaaaaagtgcatggaagaggccgttgaattgagtgtgccgcttgttgtcgacgtttcaatcgggaaaaactggtatgaagcctcctgatatggatcc

SEQ ID NO: 545 - DNA, 2772 bp, Artificial Sequence
  Description of Artificial Sequence: Synthetic Clostridium stercorarium DNA Polymerase E664R
atgaaatacctgctgccgaccgctgctgctggtctgctgctcctcgctgcccagccggcgatggccatggatccaaaaataatccttatagacggaaacagtattttaaaccgcggtttttatgccctgtcggggcgatccatgctgactacgtccacaggtctgtataccaatgcggttttcgcttttgtaaatatattgaacaaatatatcgaagaggaaaaccctgattatattgccgttgctttcgatcttagggcaaaaactttccggcacggtctatatgagggatacaaagcgcagcggaaaggcatgcccgatgaacttgcaatgcagatacccctcgcgaaggaagtactgagggcgatgaatattgccataatagagcatgaaggttatgaagccgacgatataatcggcagcctttcgttaaaggccgaaaaagagaattttgacgtaataatccttacgggggacagggattctttccagctgatcagcgacagggtgaaagttatcctgccttcgacgaaagccggaaaaacagagaccaacgtatatgataaacaggccatcattgacaaatacggagttttaccccatcagcttattgacgttaaaggcttaatgggagattcgtcagataatatacccggcgttccgggagtgggtgagaaaacggcgttaagccttatttcagcctacggtacactggaaggtgtttacgagcatattgatgaaataaaacagcctaagctgaaagcatcgctgattgaatataaggatcaggcgtttttaagccgtaagctgggtactattgtaagaaatctggagctgtgtgcttcgctggaggatctgaaaagaaaagaaataaaccgcaaagagcttttgaatgttttcagaaaactcgaatttgaaagtatcatatcaaaaatgaatcttgcttccgctgaggtgacagaattacctcccgcgccggaagagcttaaaataacccatatttcagcggcagaggatcttaagaaatggattgcttacctgcttaaccagaaaaacatttccgtccttcaactgattgaccgggaggattcatacagttcccgtctttcagggctggctttgtgcaccggggatgaggttttttatatcgagaccgggactgcactccccgagaatttgattgcaacagagctgaaagaactgtggcagaatgaaaatattcacaaaatcggacacaatataaaagaatttataacctggctgctgaaacacgatgttgaactgaacggcctttatttcgacactatgattgccgaatacctgatagattccataagaaacggctatcctatagcaagcctttctcacaaatacctgaatcgcagcgttccgtcgctggacgaacttttgggcaagggaaagggagcaaaaaagtactctgaaattccgcccgaaaggctgaaagattacagcgcttataacgtcaaagccatttttgacatatggccgatgcagaaaaaagttcttcaggaaaaccggcaggaggagctttttaatgacatagagcttcctcttataaccgtacttgccagtatggaataccacggtttcaaagttgacgccgcaaaacttcacgaatacggcgaagttcttctgtcacgcataaaagacctggaaaaggtaatttacatgctggccggtgaagaattcaacatcaattcaacgaagcagcttggtaccatattattcgaaaaactgaagcttcccgttgtaaaaagtacaaagaccggatactccaccgacgtcgaggttcttgaagagctttattacaagcatgatataataccatgcataatagaataccgccagcttacaaaactttacaccacctacgccgaaggtcttgaaaaagtgataaatcctgtaaccggtaaaattcattcaagttttaaccagacggttacggctacaggccgcatcagcagtacccgtccaaatttacagaatatcccagtcagacacgaaatgggaagggaaatacggaaagcttttattccgtcgtcggaaaacgctgtttttgttgatgccgattattcacagatagagcttcgcgtgcttgcccatataacaggcgatgaagccctgataaatgctttcgttaagggggaagatattcatacggccacggcgtcgctggtatttgacgtagctcccgaagatgtgacgccggaactgcgcagaaaggcaaaagccgtaaatttcggcatagtgtacgggatcagtgattacgggctggcacgggatttgggaattacccggaaggaagcaaagcggtatatagacgactattttgccaaataccccaaagtaaaaacctatgtggatgaaattgtgcgggtcggccaggaacaggggtatgtggaaactctgttccacagaagaagataccttcccgagcttgcatctaaaaattttcaccagcgttctttcggaaaaagggttgcaatgaatacgcccatacagggcactgcagccgatattattaaaattgcgatggtgaaggtatacaaggctttgaaagaatccggccttaaatccaggcttatcctccaggtccatgacgaacttgttattgagacttttgaagacgaactggagactgtcaaggaacttgtcaaaaagtgcatggaagaggccgttgaattgagtgtgccgcttgttgtcgacgtttcaatcgggaaaaactggtatgaagcctcctgatatggatcc

SEQ ID NO: 546 - DNA, 2772 bp, Artificial Sequence
  Description of Artificial Sequence: Synthetic Clostridium stercorarium DNA Polymerase E664S
atgaaatacctgctgccgaccgctgctgctggtctgctgctcctcgctgcccagccggcgatggccatggatccaaaaataatccttatagacggaaacagtattttaaaccgcggtttttatgccctgtcggggcgatccatgctgactacgtccacaggtctgtataccaatgcggttttcgcttttgtaaatatattgaacaaatatatcgaagaggaaaaccctgattatattgccgttgctttcgatcttagggcaaaaactttccggcacggtctatatgagggatacaaagcgcagcggaaaggcatgcccgatgaacttgcaatgcagatacccctcgcgaaggaagtactgagggcgatgaatattgccataatagagcatgaaggttatgaagccgacgatataatcggcagcctttcgttaaaggccgaaaaagagaattttgacgtaataatccttacgggggacagggattctttccagctgatcagcgacagggtgaaagttatcctgccttcgacgaaagccggaaaaacagagaccaacgtatatgataaacaggccatcattgacaaatacggagttttaccccatcagcttattgacgttaaaggcttaatgggagattcgtcagataatatacccggcgttccgggagtgggtgagaaaacggcgttaagccttatttcagcctacggtacactggaaggtgtttacgagcatattgatgaaataaaacagcctaagctgaaagcatcgctgattgaatataaggatcaggcgtttttaagccgtaagctgggtactattgtaagaaatctggagctgtgtgcttcgctggaggatctgaaaagaaaagaaataaaccgcaaagagcttttgaatgttttcagaaaactcgaatttgaaagtatcatatcaaaaatgaatcttgcttccgctgaggtgacagaattacctcccgcgccggaagagcttaaaataacccatatttcagcggcagaggatcttaagaaatggattgcttacctgcttaaccagaaaaacatttccgtccttcaactgattgaccgggaggattcatacagttcccgtctttcagggctggctttgtgcaccggggatgaggttttttatatcgagaccgggactgcactccccgagaatttgattgcaacagagctgaaagaactgtggcagaatgaaaatattcacaaaatcggacacaatataaaagaatttataacctggctgctgaaacacgatgttgaactgaacggcctttatttcgacactatgattgccgaatacctgatagattccataagaaacggctatcctatagcaagcctttctcacaaatacctgaatcgcagcgttccgtcgctggacgaacttttgggcaagggaaagggagcaaaaaagtactctgaaattccgcccgaaaggctgaaagattacagcgcttataacgtcaaagccatttttgacatatggccgatgcagaaaaaagttcttcaggaaaaccggcaggaggagctttttaatgacatagagcttcctcttataaccgtacttgccagtatggaataccacggtttcaaagttgacgccgcaaaacttcacgaatacggcgaagttcttctgtcacgcataaaagacctggaaaaggtaatttacatgctggccggtgaagaattcaacatcaattcaacgaagcagcttggtaccatattattcgaaaaactgaagcttcccgttgtaaaaagtacaaagaccggatactccaccgacgtcgaggttcttgaagagctttattacaagcatgatataataccatgcataatagaataccgccagcttacaaaactttacaccacctacgccgaaggtcttgaaaaagtgataaatcctgtaaccggtaaaattcattcaagttttaaccagacggttacggctacaggccgcatcagcagtacctctccaaatttacagaatatcccagtcagacacgaaatgggaagggaaatacggaaagcttttattccgtcgtcggaaaacgctgtttttgttgatgccgattattcacagatagagcttcgcgtgcttgcccatataacaggcgatgaagccctgataaatgctttcgttaagggggaagatattcatacggccacggcgtcgctggtatttgacgtagctcccgaagatgtgacgccggaactgcgcagaaaggcaaaagccgtaaatttcggcatagtgtacgggatcagtgattacgggctggcacgggatttgggaattacccggaaggaagcaaagcggtatatagacgactattttgccaaataccccaaagtaaaaacctatgtggatgaaattgtgcgggtcggccaggaacaggggtatgtggaaactctgttccacagaagaagataccttcccgagcttgcatctaaaaattttcaccagcgttctttcggaaaaagggttgcaatgaatacgcccatacagggcactgcagccgatattattaaaattgcgatggtgaaggtatacaaggctttgaaagaatccggccttaaatccaggcttatcctccaggtccatgacgaacttgttattgagacttttgaagacgaactggagactgtcaaggaacttgtcaaaaagtgcatggaagaggccgttgaattgagtgtgccgcttgttgtcgacgtttcaatcgggaaaaactggtatgaagcctcctgatatggatcc

SEQ ID NO: 547 - DNA, 2772 bp, Artificial Sequence
  Description of Artificial Sequence: Synthetic Clostridium stercorarium DNA Polymerase E664T
atgaaatacctgctgccgaccgctgctgctggtctgctgctcctcgctgcccagccggcgatggccatggatccaaaaataatccttatagacggaaacagtattttaaaccgcggtttttatgccctgtcggggcgatccatgctgactacgtccacaggtctgtataccaatgcggttttcgcttttgtaaatatattgaacaaatatatcgaagaggaaaaccctgattatattgccgttgctttcgatcttagggcaaaaactttccggcacggtctatatgagggatacaaagcgcagcggaaaggcatgcccgatgaacttgcaatgcagatacccctcgcgaaggaagtactgagggcgatgaatattgccataatagagcatgaaggttatgaagccgacgatataatcggcagcctttcgttaaaggccgaaaaagagaattttgacgtaataatccttacgggggacagggattctttccagctgatcagcgacagggtgaaagttatcctgccttcgacgaaagccggaaaaacagagaccaacgtatatgataaacaggccatcattgacaaatacggagttttaccccatcagcttattgacgttaaaggcttaatgggagattcgtcagataatatacccggcgttccgggagtgggtgagaaaacggcgttaagccttatttcagcctacggtacactggaaggtgtttacgagcatattgatgaaataaaacagcctaagctgaaagcatcgctgattgaatataaggatcaggcgtttttaagccgtaagctgggtactattgtaagaaatctggagctgtgtgcttcgctggaggatctgaaaagaaaagaaataaaccgcaaagagcttttgaatgttttcagaaaactcgaatttgaaagtatcatatcaaaaatgaatcttgcttccgctgaggtgacagaattacctcccgcgccggaagagcttaaaataacccatatttcagcggcagaggatcttaagaaatggattgcttacctgcttaaccagaaaaacatttccgtccttcaactgattgaccgggaggattcatacagttcccgtctttcagggctggctttgtgcaccggggatgaggttttttatatcgagaccgggactgcactccccgagaatttgattgcaacagagctgaaagaactgtggcagaatgaaaatattcacaaaatcggacacaatataaaagaatttataacctggctgctgaaacacgatgttgaactgaacggcctttatttcgacactatgattgccgaatacctgatagattccataagaaacggctatcctatagcaagcctttctcacaaatacctgaatcgcagcgttccgtcgctggacgaacttttgggcaagggaaagggagcaaaaaagtactctgaaattccgcccgaaaggctgaaagattacagcgcttataacgtcaaagccatttttgacatatggccgatgcagaaaaaagttcttcaggaaaaccggcaggaggagctttttaatgacatagagcttcctcttataaccgtacttgccagtatggaataccacggtttcaaagttgacgccgcaaaacttcacgaatacggcgaagttcttctgtcacgcataaaagacctggaaaaggtaatttacatgctggccggtgaagaattcaacatcaattcaacgaagcagcttggtaccatattattcgaaaaactgaagcttcccgttgtaaaaagtacaaagaccggatactccaccgacgtcgaggttcttgaagagctttattacaagcatgatataataccatgcataatagaataccgccagcttacaaaactttacaccacctacgccgaaggtcttgaaaaagtgataaatcctgtaaccggtaaaattcattcaagttttaaccagacggttacggctacaggccgcatcagcagtaccactccaaatttacagaatatcccagtcagacacgaaatgggaagggaaatacggaaagcttttattccgtcgtcggaaaacgctgtttttgttgatgccgattattcacagatagagcttcgcgtgcttgcccatataacaggcgatgaagccctgataaatgctttcgttaagggggaagatattcatacggccacggcgtcgctggtatttgacgtagctcccgaagatgtgacgccggaactgcgcagaaaggcaaaagccgtaaatttcggcatagtgtacgggatcagtgattacgggctggcacgggatttgggaattacccggaaggaagcaaagcggtatatagacgactattttgccaaataccccaaagtaaaaacctatgtggatgaaattgtgcgggtcggccaggaacaggggtatgtggaaactctgttccacagaagaagataccttcccgagcttgcatctaaaaattttcaccagcgttctttcggaaaaagggttgcaatgaatacgcccatacagggcactgcagccgatattattaaaattgcgatggtgaaggtatacaaggctttgaaagaatccggccttaaatccaggcttatcctccaggtccatgacgaacttgttattgagacttttgaagacgaactggagactgtcaaggaacttgtcaaaaagtgcatggaagaggccgttgaattgagtgtgccgcttgttgtcgacgtttcaatcgggaaaaactggtatgaagcctcctgatatggatcc

SEQ ID NO: 548 - DNA, 2772 bp, Artificial Sequence
  Description of Artificial Sequence: Synthetic Clostridium stercorarium DNA Polymerase E664V
atgaaatacctgctgccgaccgctgctgctggtctgctgctcctcgctgcccagccggcgatggccatggatccaaaaataatccttatagacggaaacagtattttaaaccgcggtttttatgccctgtcggggcgatccatgctgactacgtccacaggtctgtataccaatgcggttttcgcttttgtaaatatattgaacaaatatatcgaagaggaaaaccctgattatattgccgttgctttcgatcttagggcaaaaactttccggcacggtctatatgagggatacaaagcgcagcggaaaggcatgcccgatgaacttgcaatgcagatacccctcgcgaaggaagtactgagggcgatgaatattgccataatagagcatgaaggttatgaagccgacgatataatcggcagcctttcgttaaaggccgaaaaagagaattttgacgtaataatccttacgggggacagggattctttccagctgatcagcgacagggtgaaagttatcctgccttcgacgaaagccggaaaaacagagaccaacgtatatgataaacaggccatcattgacaaatacggagttttaccccatcagcttattgacgttaaaggcttaatgggagattcgtcagataatatacccggcgttccgggagtgggtgagaaaacggcgttaagccttatttcagcctacggtacactggaaggtgtttacgagcatattgatgaaataaaacagcctaagctgaaagcatcgctgattgaatataaggatcaggcgtttttaagccgtaagctgggtactattgtaagaaatctggagctgtgtgcttcgctggaggatctgaaaagaaaagaaataaaccgcaaagagcttttgaatgttttcagaaaactcgaatttgaaagtatcatatcaaaaatgaatcttgcttccgctgaggtgacagaattacctcccgcgccggaagagcttaaaataacccatatttcagcggcagaggatcttaagaaatggattgcttacctgcttaaccagaaaaacatttccgtccttcaactgattgaccgggaggattcatacagttcccgtctttcagggctggctttgtgcaccggggatgaggttttttatatcgagaccgggactgcactccccgagaatttgattgcaacagagctgaaagaactgtggcagaatgaaaatattcacaaaatcggacacaatataaaagaatttataacctggctgctgaaacacgatgttgaactgaacggcctttatttcgacactatgattgccgaatacctgatagattccataagaaacggctatcctatagcaagcctttctcacaaatacctgaatcgcagcgttccgtcgctggacgaacttttgggcaagggaaagggagcaaaaaagtactctgaaattccgcccgaaaggctgaaagattacagcgcttataacgtcaaagccatttttgacatatggccgatgcagaaaaaagttcttcaggaaaaccggcaggaggagctttttaatgacatagagcttcctcttataaccgtacttgccagtatggaataccacggtttcaaagttgacgccgcaaaacttcacgaatacggcgaagttcttctgtcacgcataaaagacctggaaaaggtaatttacatgctggccggtgaagaattcaacatcaattcaacgaagcagcttggtaccatattattcgaaaaactgaagcttcccgttgtaaaaagtacaaagaccggatactccaccgacgtcgaggttcttgaagagctttattacaagcatgatataataccatgcataatagaataccgccagcttacaaaactttacaccacctacgccgaaggtcttgaaaaagtgataaatcctgtaaccggtaaaattcattcaagttttaaccagacggttacggctacaggccgcatcagcagtaccgttccaaatttacagaatatcccagtcagacacgaaatgggaagggaaatacggaaagcttttattccgtcgtcggaaaacgctgtttttgttgatgccgattattcacagatagagcttcgcgtgcttgcccatataacaggcgatgaagccctgataaatgctttcgttaagggggaagatattcatacggccacggcgtcgctggtatttgacgtagctcccgaagatgtgacgccggaactgcgcagaaaggcaaaagccgtaaatttcggcatagtgtacgggatcagtgattacgggctggcacgggatttgggaattacccggaaggaagcaaagcggtatatagacgactattttgccaaataccccaaagtaaaaacctatgtggatgaaattgtgcgggtcggccaggaacaggggtatgtggaaactctgttccacagaagaagataccttcccgagcttgcatctaaaaattttcaccagcgttctttcggaaaaagggttgcaatgaatacgcccatacagggcactgcagccgatattattaaaattgcgatggtgaaggtatacaaggctttgaaagaatccggccttaaatccaggcttatcctccaggtccatgacgaacttgttattgagacttttgaagacgaactggagactgtcaaggaacttgtcaaaaagtgcatggaagaggccgttgaattgagtgtgccgcttgttgtcgacgtttcaatcgggaaaaactggtatgaagcctcctgatatggatcc

SEQ ID NO: 549 - DNA, 2772 bp, Artificial Sequence
  Description of Artificial Sequence: Synthetic Clostridium stercorarium DNA Polymerase E664W
atgaaatacctgctgccgaccgctgctgctggtctgctgctcctcgctgcccagccggcgatggccatggatccaaaaataatccttatagacggaaacagtattttaaaccgcggtttttatgccctgtcggggcgatccatgctgactacgtccacaggtctgtataccaatgcggttttcgcttttgtaaatatattgaacaaatatatcgaagaggaaaaccctgattatattgccgttgctttcgatcttagggcaaaaactttccggcacggtctatatgagggatacaaagcgcagcggaaaggcatgcccgatgaacttgcaatgcagatacccctcgcgaaggaagtactgagggcgatgaatattgccataatagagcatgaaggttatgaagccgacgatataatcggcagcctttcgttaaaggccgaaaaagagaattttgacgtaataatccttacgggggacagggattctttccagctgatcagcgacagggtgaaagttatcctgccttcgacgaaagccggaaaaacagagaccaacgtatatgataaacaggccatcattgacaaatacggagttttaccccatcagcttattgacgttaaaggcttaatgggagattcgtcagataatatacccggcgttccgggagtgggtgagaaaacggcgttaagccttatttcagcctacggtacactggaaggtgtttacgagcatattgatgaaataaaacagcctaagctgaaagcatcgctgattgaatataaggatcaggcgtttttaagccgtaagctgggtactattgtaagaaatctggagctgtgtgcttcgctggaggatctgaaaagaaaagaaataaaccgcaaagagcttttgaatgttttcagaaaactcgaatttgaaagtatcatatcaaaaatgaatcttgcttccgctgaggtgacagaattacctcccgcgccggaagagcttaaaataacccatatttcagcggcagaggatcttaagaaatggattgcttacctgcttaaccagaaaaacatttccgtccttcaactgattgaccgggaggattcatacagttcccgtctttcagggctggctttgtgcaccggggatgaggttttttatatcgagaccgggactgcactccccgagaatttgattgcaacagagctgaaagaactgtggcagaatgaaaatattcacaaaatcggacacaatataaaagaatttataacctggctgctgaaacacgatgttgaactgaacggcctttatttcgacactatgattgccgaatacctgatagattccataagaaacggctatcctatagcaagcctttctcacaaatacctgaatcgcagcgttccgtcgctggacgaacttttgggcaagggaaagggagcaaaaaagtactctgaaattccgcccgaaaggctgaaagattacagcgcttataacgtcaaagccatttttgacatatggccgatgcagaaaaaagttcttcaggaaaaccggcaggaggagctttttaatgacatagagcttcctcttataaccgtacttgccagtatggaataccacggtttcaaagttgacgccgcaaaacttcacgaatacggcgaagttcttctgtcacgcataaaagacctggaaaaggtaatttacatgctggccggtgaagaattcaacatcaattcaacgaagcagcttggtaccatattattcgaaaaactgaagcttcccgttgtaaaaagtacaaagaccggatactccaccgacgtcgaggttcttgaagagctttattacaagcatgatataataccatgcataatagaataccgccagcttacaaaactttacaccacctacgccgaaggtcttgaaaaagtgataaatcctgtaaccggtaaaattcattcaagttttaaccagacggttacggctacaggccgcatcagcagtacctggccaaatttacagaatatcccagtcagacacgaaatgggaagggaaatacggaaagcttttattccgtcgtcggaaaacgctgtttttgttgatgccgattattcacagatagagcttcgcgtgcttgcccatataacaggcgatgaagccctgataaatgctttcgttaagggggaagatattcatacggccacggcgtcgctggtatttgacgtagctcccgaagatgtgacgccggaactgcgcagaaaggcaaaagccgtaaatttcggcatagtgtacgggatcagtgattacgggctggcacgggatttgggaattacccggaaggaagcaaagcggtatatagacgactattttgccaaataccccaaagtaaaaacctatgtggatgaaattgtgcgggtcggccaggaacaggggtatgtggaaactctgttccacagaagaagataccttcccgagcttgcatctaaaaattttcaccagcgttctttcggaaaaagggttgcaatgaatacgcccatacagggcactgcagccgatattattaaaattgcgatggtgaaggtatacaaggctttgaaagaatccggccttaaatccaggcttatcctccaggtccatgacgaacttgttattgagacttttgaagacgaactggagactgtcaaggaacttgtcaaaaagtgcatggaagaggccgttgaattgagtgtgccgcttgttgtcgacgtttcaatcgggaaaaactggtatgaagcctcctgatatggatcc

SEQ ID NO: 550 - DNA, 2772 bp, Artificial Sequence
  Description of Artificial Sequence: Synthetic Clostridium stercorarium DNA Polymerase E664Y
atgaaatacctgctgccgaccgctgctgctggtctgctgctcctcgctgcccagccggcgatggccatggatccaaaaataatccttatagacggaaacagtattttaaaccgcggtttttatgccctgtcggggcgatccatgctgactacgtccacaggtctgtataccaatgcggttttcgcttttgtaaatatattgaacaaatatatcgaagaggaaaaccctgattatattgccgttgctttcgatcttagggcaaaaactttccggcacggtctatatgagggatacaaagcgcagcggaaaggcatgcccgatgaacttgcaatgcagatacccctcgcgaaggaagtactgagggcgatgaatattgccataatagagcatgaaggttatgaagccgacgatataatcggcagcctttcgttaaaggccgaaaaagagaattttgacgtaataatccttacgggggacagggattctttccagctgatcagcgacagggtgaaagttatcctgccttcgacgaaagccggaaaaacagagaccaacgtatatgataaacaggccatcattgacaaatacggagttttaccccatcagcttattgacgttaaaggcttaatgggagattcgtcagataatatacccggcgttccgggagtgggtgagaaaacggcgttaagccttatttcagcctacggtacactggaaggtgtttacgagcatattgatgaaataaaacagcctaagctgaaagcatcgctgattgaatataaggatcaggcgtttttaagccgtaagctgggtactattgtaagaaatctggagctgtgtgcttcgctggaggatctgaaaagaaaagaaataaaccgcaaagagcttttgaatgttttcagaaaactcgaatttgaaagtatcatatcaaaaatgaatcttgcttccgctgaggtgacagaattacctcccgcgccggaagagcttaaaataacccatatttcagcggcagaggatcttaagaaatggattgcttacctgcttaaccagaaaaacatttccgtccttcaactgattgaccgggaggattcatacagttcccgtctttcagggctggctttgtgcaccggggatgaggttttttatatcgagaccgggactgcactccccgagaatttgattgcaacagagctgaaagaactgtggcagaatgaaaatattcacaaaatcggacacaatataaaagaatttataacctggctgctgaaacacgatgttgaactgaacggcctttatttcgacactatgattgccgaatacctgatagattccataagaaacggctatcctatagcaagcctttctcacaaatacctgaatcgcagcgttccgtcgctggacgaacttttgggcaagggaaagggagcaaaaaagtactctgaaattccgcccgaaaggctgaaagattacagcgcttataacgtcaaagccatttttgacatatggccgatgcagaaaaaagttcttcaggaaaaccggcaggaggagctttttaatgacatagagcttcctcttataaccgtacttgccagtatggaataccacggtttcaaagttgacgccgcaaaacttcacgaatacggcgaagttcttctgtcacgcataaaagacctggaaaaggtaatttacatgctggccggtgaagaattcaacatcaattcaacgaagcagcttggtaccatattattcgaaaaactgaagcttcccgttgtaaaaagtacaaagaccggatactccaccgacgtcgaggttcttgaagagctttattacaagcatgatataataccatgcataatagaataccgccagcttacaaaactttacaccacctacgccgaaggtcttgaaaaagtgataaatcctgtaaccggtaaaattcattcaagttttaaccagacggttacggctacaggccgcatcagcagtacctatccaaatttacagaatatcccagtcagacacgaaatgggaagggaaatacggaaagcttttattccgtcgtcggaaaacgctgtttttgttgatgccgattattcacagatagagcttcgcgtgcttgcccatataacaggcgatgaagccctgataaatgctttcgttaagggggaagatattcatacggccacggcgtcgctggtatttgacgtagctcccgaagatgtgacgccggaactgcgcagaaaggcaaaagccgtaaatttcggcatagtgtacgggatcagtgattacgggctggcacgggatttgggaattacccggaaggaagcaaagcggtatatagacgactattttgccaaataccccaaagtaaaaacctatgtggatgaaattgtgcgggtcggccaggaacaggggtatgtggaaactctgttccacagaagaagataccttcccgagcttgcatctaaaaattttcaccagcgttctttcggaaaaagggttgcaatgaatacgcccatacagggcactgcagccgatattattaaaattgcgatggtgaaggtatacaaggctttgaaagaatccggccttaaatccaggcttatcctccaggtccatgacgaacttgttattgagacttttgaagacgaactggagactgtcaaggaacttgtcaaaaagtgcatggaagaggccgttgaattgagtgtgccgcttgttgtcgacgtttcaatcgggaaaaactggtatgaagcctcctgatatggatcc

SEQ ID NO: 551 - DNA, 2772 bp, Artificial Sequence
  Description of Artificial Sequence: Synthetic Clostridium stercorarium DNA Polymerase K748A
atgaaatacctgctgccgaccgctgctgctggtctgctgctcctcgctgcccagccggcgatggccatggatccaaaaataatccttatagacggaaacagtattttaaaccgcggtttttatgccctgtcggggcgatccatgctgactacgtccacaggtctgtataccaatgcggttttcgcttttgtaaatatattgaacaaatatatcgaagaggaaaaccctgattatattgccgttgctttcgatcttagggcaaaaactttccggcacggtctatatgagggatacaaagcgcagcggaaaggcatgcccgatgaacttgcaatgcagatacccctcgcgaaggaagtactgagggcgatgaatattgccataatagagcatgaaggttatgaagccgacgatataatcggcagcctttcgttaaaggccgaaaaagagaattttgacgtaataatccttacgggggacagggattctttccagctgatcagcgacagggtgaaagttatcctgccttcgacgaaagccggaaaaacagagaccaacgtatatgataaacaggccatcattgacaaatacggagttttaccccatcagcttattgacgttaaaggcttaatgggagattcgtcagataatatacccggcgttccgggagtgggtgagaaaacggcgttaagccttatttcagcctacggtacactggaaggtgtttacgagcatattgatgaaataaaacagcctaagctgaaagcatcgctgattgaatataaggatcaggcgtttttaagccgtaagctgggtactattgtaagaaatctggagctgtgtgcttcgctggaggatctgaaaagaaaagaaataaaccgcaaagagcttttgaatgttttcagaaaactcgaatttgaaagtatcatatcaaaaatgaatcttgcttccgctgaggtgacagaattacctcccgcgccggaagagcttaaaataacccatatttcagcggcagaggatcttaagaaatggattgcttacctgcttaaccagaaaaacatttccgtccttcaactgattgaccgggaggattcatacagttcccgtctttcagggctggctttgtgcaccggggatgaggttttttatatcgagaccgggactgcactccccgagaatttgattgcaacagagctgaaagaactgtggcagaatgaaaatattcacaaaatcggacacaatataaaagaatttataacctggctgctgaaacacgatgttgaactgaacggcctttatttcgacactatgattgccgaatacctgatagattccataagaaacggctatcctatagcaagcctttctcacaaatacctgaatcgcagcgttccgtcgctggacgaacttttgggcaagggaaagggagcaaaaaagtactctgaaattccgcccgaaaggctgaaagattacagcgcttataacgtcaaagccatttttgacatatggccgatgcagaaaaaagttcttcaggaaaaccggcaggaggagctttttaatgacatagagcttcctcttataaccgtacttgccagtatggaataccacggtttcaaagttgacgccgcaaaacttcacgaatacggcgaagttcttctgtcacgcataaaagacctggaaaaggtaatttacatgctggccggtgaagaattcaacatcaattcaacgaagcagcttggtaccatattattcgaaaaactgaagcttcccgttgtaaaaagtacaaagaccggatactccaccgacgtcgaggttcttgaagagctttattacaagcatgatataataccatgcataatagaataccgccagcttacaaaactttacaccacctacgccgaaggtcttgaaaaagtgataaatcctgtaaccggtaaaattcattcaagttttaaccagacggttacggctacaggccgcatcagcagtaccgaaccaaatttacagaatatcccagtcagacacgaaatgggaagggaaatacggaaagcttttattccgtcgtcggaaaacgctgtttttgttgatgccgattattcacagatagagcttcgcgtgcttgcccatataacaggcgatgaagccctgataaatgctttcgttaagggggaagatattcatacggccacggcgtcgctggtatttgacgtagctcccgaagatgtgacgccggaactgcgcagagctgcaaaagccgtaaatttcggcatagtgtacgggatcagtgattacgggctggcacgggatttgggaattacccggaaggaagcaaagcggtatatagacgactattttgccaaataccccaaagtaaaaacctatgtggatgaaattgtgcgggtcggccaggaacaggggtatgtggaaactctgttccacagaagaagataccttcccgagcttgcatctaaaaattttcaccagcgttctttcggaaaaagggttgcaatgaatacgcccatacagggcactgcagccgatattattaaaattgcgatggtgaaggtatacaaggctttgaaagaatccggccttaaatccaggcttatcctccaggtccatgacgaacttgttattgagacttttgaagacgaactggagactgtcaaggaacttgtcaaaaagtgcatggaagaggccgttgaattgagtgtgccgcttgttgtcgacgtttcaatcgggaaaaactggtatgaagcctcctgatatggatcc

SEQ ID NO: 552 - DNA, 2772 bp, Artificial Sequence
  Description of Artificial Sequence: Synthetic Clostridium stercorarium DNA Polymerase K748C
atgaaatacctgctgccgaccgctgctgctggtctgctgctcctcgctgcccagccggcgatggccatggatccaaaaataatccttatagacggaaacagtattttaaaccgcggtttttatgccctgtcggggcgatccatgctgactacgtccacaggtctgtataccaatgcggttttcgcttttgtaaatatattgaacaaatatatcgaagaggaaaaccctgattatattgccgttgctttcgatcttagggcaaaaactttccggcacggtctatatgagggatacaaagcgcagcggaaaggcatgcccgatgaacttgcaatgcagatacccctcgcgaaggaagtactgagggcgatgaatattgccataatagagcatgaaggttatgaagccgacgatataatcggcagcctttcgttaaaggccgaaaaagagaattttgacgtaataatccttacgggggacagggattctttccagctgatcagcgacagggtgaaagttatcctgccttcgacgaaagccggaaaaacagagaccaacgtatatgataaacaggccatcattgacaaatacggagttttaccccatcagcttattgacgttaaaggcttaatgggagattcgtcagataatatacccggcgttccgggagtgggtgagaaaacggcgttaagccttatttcagcctacggtacactggaaggtgtttacgagcatattgatgaaataaaacagcctaagctgaaagcatcgctgattgaatataaggatcaggcgtttttaagccgtaagctgggtactattgtaagaaatctggagctgtgtgcttcgctggaggatctgaaaagaaaagaaataaaccgcaaagagcttttgaatgttttcagaaaactcgaatttgaaagtatcatatcaaaaatgaatcttgcttccgctgaggtgacagaattacctcccgcgccggaagagcttaaaataacccatatttcagcggcagaggatcttaagaaatggattgcttacctgcttaaccagaaaaacatttccgtccttcaactgattgaccgggaggattcatacagttcccgtctttcagggctggctttgtgcaccggggatgaggttttttatatcgagaccgggactgcactccccgagaatttgattgcaacagagctgaaagaactgtggcagaatgaaaatattcacaaaatcggacacaatataaaagaatttataacctggctgctgaaacacgatgttgaactgaacggcctttatttcgacactatgattgccgaatacctgatagattccataagaaacggctatcctatagcaagcctttctcacaaatacctgaatcgcagcgttccgtcgctggacgaacttttgggcaagggaaagggagcaaaaaagtactctgaaattccgcccgaaaggctgaaagattacagcgcttataacgtcaaagccatttttgacatatggccgatgcagaaaaaagttcttcaggaaaaccggcaggaggagctttttaatgacatagagcttcctcttataaccgtacttgccagtatggaataccacggtttcaaagttgacgccgcaaaacttcacgaatacggcgaagttcttctgtcacgcataaaagacctggaaaaggtaatttacatgctggccggtgaagaattcaacatcaattcaacgaagcagcttggtaccatattattcgaaaaactgaagcttcccgttgtaaaaagtacaaagaccggatactccaccgacgtcgaggttcttgaagagctttattacaagcatgatataataccatgcataatagaataccgccagcttacaaaactttacaccacctacgccgaaggtcttgaaaaagtgataaatcctgtaaccggtaaaattcattcaagttttaaccagacggttacggctacaggccgcatcagcagtaccgaaccaaatttacagaatatcccagtcagacacgaaatgggaagggaaatacggaaagcttttattccgtcgtcggaaaacgctgtttttgttgatgccgattattcacagatagagcttcgcgtgcttgcccatataacaggcgatgaagccctgataaatgctttcgttaagggggaagatattcatacggccacggcgtcgctggtatttgacgtagctcccgaagatgtgacgccggaactgcgcagatgtgcaaaagccgtaaatttcggcatagtgtacgggatcagtgattacgggctggcacgggatttgggaattacccggaaggaagcaaagcggtatatagacgactattttgccaaataccccaaagtaaaaacctatgtggatgaaattgtgcgggtcggccaggaacaggggtatgtggaaactctgttccacagaagaagataccttcccgagcttgcatctaaaaattttcaccagcgttctttcggaaaaagggttgcaatgaatacgcccatacagggcactgcagccgatattattaaaattgcgatggtgaaggtatacaaggctttgaaagaatccggccttaaatccaggcttatcctccaggtccatgacgaacttgttattgagacttttgaagacgaactggagactgtcaaggaacttgtcaaaaagtgcatggaagaggccgttgaattgagtgtgccgcttgttgtcgacgtttcaatcgggaaaaactggtatgaagcctcctgatatggatcc

SEQ ID NO: 553 - DNA, 2772 bp, Artificial Sequence
  Description of Artificial Sequence: Synthetic Clostridium stercorarium DNA Polymerase K748D
atgaaatacctgctgccgaccgctgctgctggtctgctgctcctcgctgcccagccggcgatggccatggatccaaaaataatccttatagacggaaacagtattttaaaccgcggtttttatgccctgtcggggcgatccatgctgactacgtccacaggtctgtataccaatgcggttttcgcttttgtaaatatattgaacaaatatatcgaagaggaaaaccctgattatattgccgttgctttcgatcttagggcaaaaactttccggcacggtctatatgagggatacaaagcgcagcggaaaggcatgcccgatgaacttgcaatgcagatacccctcgcgaaggaagtactgagggcgatgaatattgccataatagagcatgaaggttatgaagccgacgatataatcggcagcctttcgttaaaggccgaaaaagagaattttgacgtaataatccttacgggggacagggattctttccagctgatcagcgacagggtgaaagttatcctgccttcgacgaaagccggaaaaacagagaccaacgtatatgataaacaggccatcattgacaaatacggagttttaccccatcagcttattgacgttaaaggcttaatgggagattcgtcagataatatacccggcgttccgggagtgggtgagaaaacggcgttaagccttatttcagcctacggtacactggaaggtgtttacgagcatattgatgaaataaaacagcctaagctgaaagcatcgctgattgaatataaggatcaggcgtttttaagccgtaagctgggtactattgtaagaaatctggagctgtgtgcttcgctggaggatctgaaaagaaaagaaataaaccgcaaagagcttttgaatgttttcagaaaactcgaatttgaaagtatcatatcaaaaatgaatcttgcttccgctgaggtgacagaattacctcccgcgccggaagagcttaaaataacccatatttcagcggcagaggatcttaagaaatggattgcttacctgcttaaccagaaaaacatttccgtccttcaactgattgaccgggaggattcatacagttcccgtctttcagggctggctttgtgcaccggggatgaggttttttatatcgagaccgggactgcactccccgagaatttgattgcaacagagctgaaagaactgtggcagaatgaaaatattcacaaaatcggacacaatataaaagaatttataacctggctgctgaaacacgatgttgaactgaacggcctttatttcgacactatgattgccgaatacctgatagattccataagaaacggctatcctatagcaagcctttctcacaaatacctgaatcgcagcgttccgtcgctggacgaacttttgggcaagggaaagggagcaaaaaagtactctgaaattccgcccgaaaggctgaaagattacagcgcttataacgtcaaagccatttttgacatatggccgatgcagaaaaaagttcttcaggaaaaccggcaggaggagctttttaatgacatagagcttcctcttataaccgtacttgccagtatggaataccacggtttcaaagttgacgccgcaaaacttcacgaatacggcgaagttcttctgtcacgcataaaagacctggaaaaggtaatttacatgctggccggtgaagaattcaacatcaattcaacgaagcagcttggtaccatattattcgaaaaactgaagcttcccgttgtaaaaagtacaaagaccggatactccaccgacgtcgaggttcttgaagagctttattacaagcatgatataataccatgcataatagaataccgccagcttacaaaactttacaccacctacgccgaaggtcttgaaaaagtgataaatcctgtaaccggtaaaattcattcaagttttaaccagacggttacggctacaggccgcatcagcagtaccgaaccaaatttacagaatatcccagtcagacacgaaatgggaagggaaatacggaaagcttttattccgtcgtcggaaaacgctgtttttgttgatgccgattattcacagatagagcttcgcgtgcttgcccatataacaggcgatgaagccctgataaatgctttcgttaagggggaagatattcatacggccacggcgtcgctggtatttgacgtagctcccgaagatgtgacgccggaactgcgcagagatgcaaaagccgtaaatttcggcatagtgtacgggatcagtgattacgggctggcacgggatttgggaattacccggaaggaagcaaagcggtatatagacgactattttgccaaataccccaaagtaaaaacctatgtggatgaaattgtgcgggtcggccaggaacaggggtatgtggaaactctgttccacagaagaagataccttcccgagcttgcatctaaaaattttcaccagcgttctttcggaaaaagggttgcaatgaatacgcccatacagggcactgcagccgatattattaaaattgcgatggtgaaggtatacaaggctttgaaagaatccggccttaaatccaggcttatcctccaggtccatgacgaacttgttattgagacttttgaagacgaactggagactgtcaaggaacttgtcaaaaagtgcatggaagaggccgttgaattgagtgtgccgcttgttgtcgacgtttcaatcgggaaaaactggtatgaagcctcctgatatggatcc

SEQ ID NO: 554 - DNA, 2772 bp, Artificial Sequence
  Description of Artificial Sequence: Synthetic Clostridium stercorarium DNA Polymerase K748F
atgaaatacctgctgccgaccgctgctgctggtctgctgctcctcgctgcccagccggcgatggccatggatccaaaaataatccttatagacggaaacagtattttaaaccgcggtttttatgccctgtcggggcgatccatgctgactacgtccacaggtctgtataccaatgcggttttcgcttttgtaaatatattgaacaaatatatcgaagaggaaaaccctgattatattgccgttgctttcgatcttagggcaaaaactttccggcacggtctatatgagggatacaaagcgcagcggaaaggcatgcccgatgaacttgcaatgcagatacccctcgcgaaggaagtactgagggcgatgaatattgccataatagagcatgaaggttatgaagccgacgatataatcggcagcctttcgttaaaggccgaaaaagagaattttgacgtaataatccttacgggggacagggattctttccagctgatcagcgacagggtgaaagttatcctgccttcgacgaaagccggaaaaacagagaccaacgtatatgataaacaggccatcattgacaaatacggagttttaccccatcagcttattgacgttaaaggcttaatgggagattcgtcagataatatacccggcgttccgggagtgggtgagaaaacggcgttaagccttatttcagcctacggtacactggaaggtgtttacgagcatattgatgaaataaaacagcctaagctgaaagcatcgctgattgaatataaggatcaggcgtttttaagccgtaagctgggtactattgtaagaaatctggagctgtgtgcttcgctggaggatctgaaaagaaaagaaataaaccgcaaagagcttttgaatgttttcagaaaactcgaatttgaaagtatcatatcaaaaatgaatcttgcttccgctgaggtgacagaattacctcccgcgccggaagagcttaaaataacccatatttcagcggcagaggatcttaagaaatggattgcttacctgcttaaccagaaaaacatttccgtccttcaactgattgaccgggaggattcatacagttcccgtctttcagggctggctttgtgcaccggggatgaggttttttatatcgagaccgggactgcactccccgagaatttgattgcaacagagctgaaagaactgtggcagaatgaaaatattcacaaaatcggacacaatataaaagaatttataacctggctgctgaaacacgatgttgaactgaacggcctttatttcgacactatgattgccgaatacctgatagattccataagaaacggctatcctatagcaagcctttctcacaaatacctgaatcgcagcgttccgtcgctggacgaacttttgggcaagggaaagggagcaaaaaagtactctgaaattccgcccgaaaggctgaaagattacagcgcttataacgtcaaagccatttttgacatatggccgatgcagaaaaaagttcttcaggaaaaccggcaggaggagctttttaatgacatagagcttcctcttataaccgtacttgccagtatggaataccacggtttcaaagttgacgccgcaaaacttcacgaatacggcgaagttcttctgtcacgcataaaagacctggaaaaggtaatttacatgctggccggtgaagaattcaacatcaattcaacgaagcagcttggtaccatattattcgaaaaactgaagcttcccgttgtaaaaagtacaaagaccggatactccaccgacgtcgaggttcttgaagagctttattacaagcatgatataataccatgcataatagaataccgccagcttacaaaactttacaccacctacgccgaaggtcttgaaaaagtgataaatcctgtaaccggtaaaattcattcaagttttaaccagacggttacggctacaggccgcatcagcagtaccgaaccaaatttacagaatatcccagtcagacacgaaatgggaagggaaatacggaaagcttttattccgtcgtcggaaaacgctgtttttgttgatgccgattattcacagatagagcttcgcgtgcttgcccatataacaggcgatgaagccctgataaatgctttcgttaagggggaagatattcatacggccacggcgtcgctggtatttgacgtagctcccgaagatgtgacgccggaactgcgcagatttgcaaaagccgtaaatttcggcatagtgtacgggatcagtgattacgggctggcacgggatttgggaattacccggaaggaagcaaagcggtatatagacgactattttgccaaataccccaaagtaaaaacctatgtggatgaaattgtgcgggtcggccaggaacaggggtatgtggaaactctgttccacagaagaagataccttcccgagcttgcatctaaaaattttcaccagcgttctttcggaaaaagggttgcaatgaatacgcccatacagggcactgcagccgatattattaaaattgcgatggtgaaggtatacaaggctttgaaagaatccggccttaaatccaggcttatcctccaggtccatgacgaacttgttattgagacttttgaagacgaactggagactgtcaaggaacttgtcaaaaagtgcatggaagaggccgttgaattgagtgtgccgcttgttgtcgacgtttcaatcgggaaaaactggtatgaagcctcctgatatggatcc

SEQ ID NO: 555 - DNA, 2772 bp, Artificial Sequence
  Description of Artificial Sequence: Synthetic Clostridium stercorarium DNA Polymerase K748G
atgaaatacctgctgccgaccgctgctgctggtctgctgctcctcgctgcccagccggcgatggccatggatccaaaaataatccttatagacggaaacagtattttaaaccgcggtttttatgccctgtcggggcgatccatgctgactacgtccacaggtctgtataccaatgcggttttcgcttttgtaaatatattgaacaaatatatcgaagaggaaaaccctgattatattgccgttgctttcgatcttagggcaaaaactttccggcacggtctatatgagggatacaaagcgcagcggaaaggcatgcccgatgaacttgcaatgcagatacccctcgcgaaggaagtactgagggcgatgaatattgccataatagagcatgaaggttatgaagccgacgatataatcggcagcctttcgttaaaggccgaaaaagagaattttgacgtaataatccttacgggggacagggattctttccagctgatcagcgacagggtgaaagttatcctgccttcgacgaaagccggaaaaacagagaccaacgtatatgataaacaggccatcattgacaaatacggagttttaccccatcagcttattgacgttaaaggcttaatgggagattcgtcagataatatacccggcgttccgggagtgggtgagaaaacggcgttaagccttatttcagcctacggtacactggaaggtgtttacgagcatattgatgaaataaaacagcctaagctgaaagcatcgctgattgaatataaggatcaggcgtttttaagccgtaagctgggtactattgtaagaaatctggagctgtgtgcttcgctggaggatctgaaaagaaaagaaataaaccgcaaagagcttttgaatgttttcagaaaactcgaatttgaaagtatcatatcaaaaatgaatcttgcttccgctgaggtgacagaattacctcccgcgccggaagagcttaaaataacccatatttcagcggcagaggatcttaagaaatggattgcttacctgcttaaccagaaaaacatttccgtccttcaactgattgaccgggaggattcatacagttcccgtctttcagggctggctttgtgcaccggggatgaggttttttatatcgagaccgggactgcactccccgagaatttgattgcaacagagctgaaagaactgtggcagaatgaaaatattcacaaaatcggacacaatataaaagaatttataacctggctgctgaaacacgatgttgaactgaacggcctttatttcgacactatgattgccgaatacctgatagattccataagaaacggctatcctatagcaagcctttctcacaaatacctgaatcgcagcgttccgtcgctggacgaacttttgggcaagggaaagggagcaaaaaagtactctgaaattccgcccgaaaggctgaaagattacagcgcttataacgtcaaagccatttttgacatatggccgatgcagaaaaaagttcttcaggaaaaccggcaggaggagctttttaatgacatagagcttcctcttataaccgtacttgccagtatggaataccacggtttcaaagttgacgccgcaaaacttcacgaatacggcgaagttcttctgtcacgcataaaagacctggaaaaggtaatttacatgctggccggtgaagaattcaacatcaattcaacgaagcagcttggtaccatattattcgaaaaactgaagcttcccgttgtaaaaagtacaaagaccggatactccaccgacgtcgaggttcttgaagagctttattacaagcatgatataataccatgcataatagaataccgccagcttacaaaactttacaccacctacgccgaaggtcttgaaaaagtgataaatcctgtaaccggtaaaattcattcaagttttaaccagacggttacggctacaggccgcatcagcagtaccgaaccaaatttacagaatatcccagtcagacacgaaatgggaagggaaatacggaaagcttttattccgtcgtcggaaaacgctgtttttgttgatgccgattattcacagatagagcttcgcgtgcttgcccatataacaggcgatgaagccctgataaatgctttcgttaagggggaagatattcatacggccacggcgtcgctggtatttgacgtagctcccgaagatgtgacgccggaactgcgcagaggtgcaaaagccgtaaatttcggcatagtgtacgggatcagtgattacgggctggcacgggatttgggaattacccggaaggaagcaaagcggtatatagacgactattttgccaaataccccaaagtaaaaacctatgtggatgaaattgtgcgggtcggccaggaacaggggtatgtggaaactctgttccacagaagaagataccttcccgagcttgcatctaaaaattttcaccagcgttctttcggaaaaagggttgcaatgaatacgcccatacagggcactgcagccgatattattaaaattgcgatggtgaaggtatacaaggctttgaaagaatccggccttaaatccaggcttatcctccaggtccatgacgaacttgttattgagacttttgaagacgaactggagactgtcaaggaacttgtcaaaaagtgcatggaagaggccgttgaattgagtgtgccgcttgttgtcgacgtttcaatcgggaaaaactggtatgaagcctcctgatatggatcc

SEQ ID NO: 556 - DNA, 2772 bp, Artificial Sequence
  Description of Artificial Sequence: Synthetic Clostridium stercorarium DNA Polymerase K748H
atgaaatacctgctgccgaccgctgctgctggtctgctgctcctcgctgcccagccggcgatggccatggatccaaaaataatccttatagacggaaacagtattttaaaccgcggtttttatgccctgtcggggcgatccatgctgactacgtccacaggtctgtataccaatgcggttttcgcttttgtaaatatattgaacaaatatatcgaagaggaaaaccctgattatattgccgttgctttcgatcttagggcaaaaactttccggcacggtctatatgagggatacaaagcgcagcggaaaggcatgcccgatgaacttgcaatgcagatacccctcgcgaaggaagtactgagggcgatgaatattgccataatagagcatgaaggttatgaagccgacgatataatcggcagcctttcgttaaaggccgaaaaagagaattttgacgtaataatccttacgggggacagggattctttccagctgatcagcgacagggtgaaagttatcctgccttcgacgaaagccggaaaaacagagaccaacgtatatgataaacaggccatcattgacaaatacggagttttaccccatcagcttattgacgttaaaggcttaatgggagattcgtcagataatatacccggcgttccgggagtgggtgagaaaacggcgttaagccttatttcagcctacggtacactggaaggtgtttacgagcatattgatgaaataaaacagcctaagctgaaagcatcgctgattgaatataaggatcaggcgtttttaagccgtaagctgggtactattgtaagaaatctggagctgtgtgcttcgctggaggatctgaaaagaaaagaaataaaccgcaaagagcttttgaatgttttcagaaaactcgaatttgaaagtatcatatcaaaaatgaatcttgcttccgctgaggtgacagaattacctcccgcgccggaagagcttaaaataacccatatttcagcggcagaggatcttaagaaatggattgcttacctgcttaaccagaaaaacatttccgtccttcaactgattgaccgggaggattcatacagttcccgtctttcagggctggctttgtgcaccggggatgaggttttttatatcgagaccgggactgcactccccgagaatttgattgcaacagagctgaaagaactgtggcagaatgaaaatattcacaaaatcggacacaatataaaagaatttataacctggctgctgaaacacgatgttgaactgaacggcctttatttcgacactatgattgccgaatacctgatagattccataagaaacggctatcctatagcaagcctttctcacaaatacctgaatcgcagcgttccgtcgctggacgaacttttgggcaagggaaagggagcaaaaaagtactctgaaattccgcccgaaaggctgaaagattacagcgcttataacgtcaaagccatttttgacatatggccgatgcagaaaaaagttcttcaggaaaaccggcaggaggagctttttaatgacatagagcttcctcttataaccgtacttgccagtatggaataccacggtttcaaagttgacgccgcaaaacttcacgaatacggcgaagttcttctgtcacgcataaaagacctggaaaaggtaatttacatgctggccggtgaagaattcaacatcaattcaacgaagcagcttggtaccatattattcgaaaaactgaagcttcccgttgtaaaaagtacaaagaccggatactccaccgacgtcgaggttcttgaagagctttattacaagcatgatataataccatgcataatagaataccgccagcttacaaaactttacaccacctacgccgaaggtcttgaaaaagtgataaatcctgtaaccggtaaaattcattcaagttttaaccagacggttacggctacaggccgcatcagcagtaccgaaccaaatttacagaatatcccagtcagacacgaaatgggaagggaaatacggaaagcttttattccgtcgtcggaaaacgctgtttttgttgatgccgattattcacagatagagcttcgcgtgcttgcccatataacaggcgatgaagccctgataaatgctttcgttaagggggaagatattcatacggccacggcgtcgctggtatttgacgtagctcccgaagatgtgacgccggaactgcgcagacatgcaaaagccgtaaatttcggcatagtgtacgggatcagtgattacgggctggcacgggatttgggaattacccggaaggaagcaaagcggtatatagacgactattttgccaaataccccaaagtaaaaacctatgtggatgaaattgtgcgggtcggccaggaacaggggtatgtggaaactctgttccacagaagaagataccttcccgagcttgcatctaaaaattttcaccagcgttctttcggaaaaagggttgcaatgaatacgcccatacagggcactgcagccgatattattaaaattgcgatggtgaaggtatacaaggctttgaaagaatccggccttaaatccaggcttatcctccaggtccatgacgaacttgttattgagacttttgaagacgaactggagactgtcaaggaacttgtcaaaaagtgcatggaagaggccgttgaattgagtgtgccgcttgttgtcgacgtttcaatcgggaaaaactggtatgaagcctcctgatatggatcc

SEQ ID NO: 557 - DNA, 2772 bp, Artificial Sequence
  Description of Artificial Sequence: Synthetic Clostridium stercorarium DNA Polymerase K748I
atgaaatacctgctgccgaccgctgctgctggtctgctgctcctcgctgcccagccggcgatggccatggatccaaaaataatccttatagacggaaacagtattttaaaccgcggtttttatgccctgtcggggcgatccatgctgactacgtccacaggtctgtataccaatgcggttttcgcttttgtaaatatattgaacaaatatatcgaagaggaaaaccctgattatattgccgttgctttcgatcttagggcaaaaactttccggcacggtctatatgagggatacaaagcgcagcggaaaggcatgcccgatgaacttgcaatgcagatacccctcgcgaaggaagtactgagggcgatgaatattgccataatagagcatgaaggttatgaagccgacgatataatcggcagcctttcgttaaaggccgaaaaagagaattttgacgtaataatccttacgggggacagggattctttccagctgatcagcgacagggtgaaagttatcctgccttcgacgaaagccggaaaaacagagaccaacgtatatgataaacaggccatcattgacaaatacggagttttaccccatcagcttattgacgttaaaggcttaatgggagattcgtcagataatatacccggcgttccgggagtgggtgagaaaacggcgttaagccttatttcagcctacggtacactggaaggtgtttacgagcatattgatgaaataaaacagcctaagctgaaagcatcgctgattgaatataaggatcaggcgtttttaagccgtaagctgggtactattgtaagaaatctggagctgtgtgcttcgctggaggatctgaaaagaaaagaaataaaccgcaaagagcttttgaatgttttcagaaaactcgaatttgaaagtatcatatcaaaaatgaatcttgcttccgctgaggtgacagaattacctcccgcgccggaagagcttaaaataacccatatttcagcggcagaggatcttaagaaatggattgcttacctgcttaaccagaaaaacatttccgtccttcaactgattgaccgggaggattcatacagttcccgtctttcagggctggctttgtgcaccggggatgaggttttttatatcgagaccgggactgcactccccgagaatttgattgcaacagagctgaaagaactgtggcagaatgaaaatattcacaaaatcggacacaatataaaagaatttataacctggctgctgaaacacgatgttgaactgaacggcctttatttcgacactatgattgccgaatacctgatagattccataagaaacggctatcctatagcaagcctttctcacaaatacctgaatcgcagcgttccgtcgctggacgaacttttgggcaagggaaagggagcaaaaaagtactctgaaattccgcccgaaaggctgaaagattacagcgcttataacgtcaaagccatttttgacatatggccgatgcagaaaaaagttcttcaggaaaaccggcaggaggagctttttaatgacatagagcttcctcttataaccgtacttgccagtatggaataccacggtttcaaagttgacgccgcaaaacttcacgaatacggcgaagttcttctgtcacgcataaaagacctggaaaaggtaatttacatgctggccggtgaagaattcaacatcaattcaacgaagcagcttggtaccatattattcgaaaaactgaagcttcccgttgtaaaaagtacaaagaccggatactccaccgacgtcgaggttcttgaagagctttattacaagcatgatataataccatgcataatagaataccgccagcttacaaaactttacaccacctacgccgaaggtcttgaaaaagtgataaatcctgtaaccggtaaaattcattcaagttttaaccagacggttacggctacaggccgcatcagcagtaccgaaccaaatttacagaatatcccagtcagacacgaaatgggaagggaaatacggaaagcttttattccgtcgtcggaaaacgctgtttttgttgatgccgattattcacagatagagcttcgcgtgcttgcccatataacaggcgatgaagccctgataaatgctttcgttaagggggaagatattcatacggccacggcgtcgctggtatttgacgtagctcccgaagatgtgacgccggaactgcgcagaattgcaaaagccgtaaatttcggcatagtgtacgggatcagtgattacgggctggcacgggatttgggaattacccggaaggaagcaaagcggtatatagacgactattttgccaaataccccaaagtaaaaacctatgtggatgaaattgtgcgggtcggccaggaacaggggtatgtggaaactctgttccacagaagaagataccttcccgagcttgcatctaaaaattttcaccagcgttctttcggaaaaagggttgcaatgaatacgcccatacagggcactgcagccgatattattaaaattgcgatggtgaaggtatacaaggctttgaaagaatccggccttaaatccaggcttatcctccaggtccatgacgaacttgttattgagacttttgaagacgaactggagactgtcaaggaacttgtcaaaaagtgcatggaagaggccgttgaattgagtgtgccgcttgttgtcgacgtttcaatcgggaaaaactggtatgaagcctcctgatatggatcc

SEQ ID NO: 558 - DNA, 2772 bp, Artificial Sequence
  Description of Artificial Sequence: Synthetic Clostridium stercorarium DNA Polymerase K748L
atgaaatacctgctgccgaccgctgctgctggtctgctgctcctcgctgcccagccggcgatggccatggatccaaaaataatccttatagacggaaacagtattttaaaccgcggtttttatgccctgtcggggcgatccatgctgactacgtccacaggtctgtataccaatgcggttttcgcttttgtaaatatattgaacaaatatatcgaagaggaaaaccctgattatattgccgttgctttcgatcttagggcaaaaactttccggcacggtctatatgagggatacaaagcgcagcggaaaggcatgcccgatgaacttgcaatgcagatacccctcgcgaaggaagtactgagggcgatgaatattgccataatagagcatgaaggttatgaagccgacgatataatcggcagcctttcgttaaaggccgaaaaagagaattttgacgtaataatccttacgggggacagggattctttccagctgatcagcgacagggtgaaagttatcctgccttcgacgaaagccggaaaaacagagaccaacgtatatgataaacaggccatcattgacaaatacggagttttaccccatcagcttattgacgttaaaggcttaatgggagattcgtcagataatatacccggcgttccgggagtgggtgagaaaacggcgttaagccttatttcagcctacggtacactggaaggtgtttacgagcatattgatgaaataaaacagcctaagctgaaagcatcgctgattgaatataaggatcaggcgtttttaagccgtaagctgggtactattgtaagaaatctggagctgtgtgcttcgctggaggatctgaaaagaaaagaaataaaccgcaaagagcttttgaatgttttcagaaaactcgaatttgaaagtatcatatcaaaaatgaatcttgcttccgctgaggtgacagaattacctcccgcgccggaagagcttaaaataacccatatttcagcggcagaggatcttaagaaatggattgcttacctgcttaaccagaaaaacatttccgtccttcaactgattgaccgggaggattcatacagttcccgtctttcagggctggctttgtgcaccggggatgaggttttttatatcgagaccgggactgcactccccgagaatttgattgcaacagagctgaaagaactgtggcagaatgaaaatattcacaaaatcggacacaatataaaagaatttataacctggctgctgaaacacgatgttgaactgaacggcctttatttcgacactatgattgccgaatacctgatagattccataagaaacggctatcctatagcaagcctttctcacaaatacctgaatcgcagcgttccgtcgctggacgaacttttgggcaagggaaagggagcaaaaaagtactctgaaattccgcccgaaaggctgaaagattacagcgcttataacgtcaaagccatttttgacatatggccgatgcagaaaaaagttcttcaggaaaaccggcaggaggagctttttaatgacatagagcttcctcttataaccgtacttgccagtatggaataccacggtttcaaagttgacgccgcaaaacttcacgaatacggcgaagttcttctgtcacgcataaaagacctggaaaaggtaatttacatgctggccggtgaagaattcaacatcaattcaacgaagcagcttggtaccatattattcgaaaaactgaagcttcccgttgtaaaaagtacaaagaccggatactccaccgacgtcgaggttcttgaagagctttattacaagcatgatataataccatgcataatagaataccgccagcttacaaaactttacaccacctacgccgaaggtcttgaaaaagtgataaatcctgtaaccggtaaaattcattcaagttttaaccagacggttacggctacaggccgcatcagcagtaccgaaccaaatttacagaatatcccagtcagacacgaaatgggaagggaaatacggaaagcttttattccgtcgtcggaaaacgctgtttttgttgatgccgattattcacagatagagcttcgcgtgcttgcccatataacaggcgatgaagccctgataaatgctttcgttaagggggaagatattcatacggccacggcgtcgctggtatttgacgtagctcccgaagatgtgacgccggaactgcgcagacttgcaaaagccgtaaatttcggcatagtgtacgggatcagtgattacgggctggcacgggatttgggaattacccggaaggaagcaaagcggtatatagacgactattttgccaaataccccaaagtaaaaacctatgtggatgaaattgtgcgggtcggccaggaacaggggtatgtggaaactctgttccacagaagaagataccttcccgagcttgcatctaaaaattttcaccagcgttctttcggaaaaagggttgcaatgaatacgcccatacagggcactgcagccgatattattaaaattgcgatggtgaaggtatacaaggctttgaaagaatccggccttaaatccaggcttatcctccaggtccatgacgaacttgttattgagacttttgaagacgaactggagactgtcaaggaacttgtcaaaaagtgcatggaagaggccgttgaattgagtgtgccgcttgttgtcgacgtttcaatcgggaaaaactggtatgaagcctcctgatatggatcc

SEQ ID NO: 559 - DNA, 2772 bp, Artificial Sequence
  Description of Artificial Sequence: Synthetic Clostridium stercorarium DNA Polymerase K748M
atgaaatacctgctgccgaccgctgctgctggtctgctgctcctcgctgcccagccggcgatggccatggatccaaaaataatccttatagacggaaacagtattttaaaccgcggtttttatgccctgtcggggcgatccatgctgactacgtccacaggtctgtataccaatgcggttttcgcttttgtaaatatattgaacaaatatatcgaagaggaaaaccctgattatattgccgttgctttcgatcttagggcaaaaactttccggcacggtctatatgagggatacaaagcgcagcggaaaggcatgcccgatgaacttgcaatgcagatacccctcgcgaaggaagtactgagggcgatgaatattgccataatagagcatgaaggttatgaagccgacgatataatcggcagcctttcgttaaaggccgaaaaagagaattttgacgtaataatccttacgggggacagggattctttccagctgatcagcgacagggtgaaagttatcctgccttcgacgaaagccggaaaaacagagaccaacgtatatgataaacaggccatcattgacaaatacggagttttaccccatcagcttattgacgttaaaggcttaatgggagattcgtcagataatatacccggcgttccgggagtgggtgagaaaacggcgttaagccttatttcagcctacggtacactggaaggtgtttacgagcatattgatgaaataaaacagcctaagctgaaagcatcgctgattgaatataaggatcaggcgtttttaagccgtaagctgggtactattgtaagaaatctggagctgtgtgcttcgctggaggatctgaaaagaaaagaaataaaccgcaaagagcttttgaatgttttcagaaaactcgaatttgaaagtatcatatcaaaaatgaatcttgcttccgctgaggtgacagaattacctcccgcgccggaagagcttaaaataacccatatttcagcggcagaggatcttaagaaatggattgcttacctgcttaaccagaaaaacatttccgtccttcaactgattgaccgggaggattcatacagttcccgtctttcagggctggctttgtgcaccggggatgaggttttttatatcgagaccgggactgcactccccgagaatttgattgcaacagagctgaaagaactgtggcagaatgaaaatattcacaaaatcggacacaatataaaagaatttataacctggctgctgaaacacgatgttgaactgaacggcctttatttcgacactatgattgccgaatacctgatagattccataagaaacggctatcctatagcaagcctttctcacaaatacctgaatcgcagcgttccgtcgctggacgaacttttgggcaagggaaagggagcaaaaaagtactctgaaattccgcccgaaaggctgaaagattacagcgcttataacgtcaaagccatttttgacatatggccgatgcagaaaaaagttcttcaggaaaaccggcaggaggagctttttaatgacatagagcttcctcttataaccgtacttgccagtatggaataccacggtttcaaagttgacgccgcaaaacttcacgaatacggcgaagttcttctgtcacgcataaaagacctggaaaaggtaatttacatgctggccggtgaagaattcaacatcaattcaacgaagcagcttggtaccatattattcgaaaaactgaagcttcccgttgtaaaaagtacaaagaccggatactccaccgacgtcgaggttcttgaagagctttattacaagcatgatataataccatgcataatagaataccgccagcttacaaaactttacaccacctacgccgaaggtcttgaaaaagtgataaatcctgtaaccggtaaaattcattcaagttttaaccagacggttacggctacaggccgcatcagcagtaccgaaccaaatttacagaatatcccagtcagacacgaaatgggaagggaaatacggaaagcttttattccgtcgtcggaaaacgctgtttttgttgatgccgattattcacagatagagcttcgcgtgcttgcccatataacaggcgatgaagccctgataaatgctttcgttaagggggaagatattcatacggccacggcgtcgctggtatttgacgtagctcccgaagatgtgacgccggaactgcgcagaatggcaaaagccgtaaatttcggcatagtgtacgggatcagtgattacgggctggcacgggatttgggaattacccggaaggaagcaaagcggtatatagacgactattttgccaaataccccaaagtaaaaacctatgtggatgaaattgtgcgggtcggccaggaacaggggtatgtggaaactctgttccacagaagaagataccttcccgagcttgcatctaaaaattttcaccagcgttctttcggaaaaagggttgcaatgaatacgcccatacagggcactgcagccgatattattaaaattgcgatggtgaaggtatacaaggctttgaaagaatccggccttaaatccaggcttatcctccaggtccatgacgaacttgttattgagacttttgaagacgaactggagactgtcaaggaacttgtcaaaaagtgcatggaagaggccgttgaattgagtgtgccgcttgttgtcgacgtttcaatcgggaaaaactggtatgaagcctcctgatatggatcc

SEQ ID NO: 560 - DNA, 2772 bp, Artificial Sequence
  Description of Artificial Sequence: Synthetic Clostridium stercorarium DNA Polymerase K748N
atgaaatacctgctgccgaccgctgctgctggtctgctgctcctcgctgcccagccggcgatggccatggatccaaaaataatccttatagacggaaacagtattttaaaccgcggtttttatgccctgtcggggcgatccatgctgactacgtccacaggtctgtataccaatgcggttttcgcttttgtaaatatattgaacaaatatatcgaagaggaaaaccctgattatattgccgttgctttcgatcttagggcaaaaactttccggcacggtctatatgagggatacaaagcgcagcggaaaggcatgcccgatgaacttgcaatgcagatacccctcgcgaaggaagtactgagggcgatgaatattgccataatagagcatgaaggttatgaagccgacgatataatcggcagcctttcgttaaaggccgaaaaagagaattttgacgtaataatccttacgggggacagggattctttccagctgatcagcgacagggtgaaagttatcctgccttcgacgaaagccggaaaaacagagaccaacgtatatgataaacaggccatcattgacaaatacggagttttaccccatcagcttattgacgttaaaggcttaatgggagattcgtcagataatatacccggcgttccgggagtgggtgagaaaacggcgttaagccttatttcagcctacggtacactggaaggtgtttacgagcatattgatgaaataaaacagcctaagctgaaagcatcgctgattgaatataaggatcaggcgtttttaagccgtaagctgggtactattgtaagaaatctggagctgtgtgcttcgctggaggatctgaaaagaaaagaaataaaccgcaaagagcttttgaatgttttcagaaaactcgaatttgaaagtatcatatcaaaaatgaatcttgcttccgctgaggtgacagaattacctcccgcgccggaagagcttaaaataacccatatttcagcggcagaggatcttaagaaatggattgcttacctgcttaaccagaaaaacatttccgtccttcaactgattgaccgggaggattcatacagttcccgtctttcagggctggctttgtgcaccggggatgaggttttttatatcgagaccgggactgcactccccgagaatttgattgcaacagagctgaaagaactgtggcagaatgaaaatattcacaaaatcggacacaatataaaagaatttataacctggctgctgaaacacgatgttgaactgaacggcctttatttcgacactatgattgccgaatacctgatagattccataagaaacggctatcctatagcaagcctttctcacaaatacctgaatcgcagcgttccgtcgctggacgaacttttgggcaagggaaagggagcaaaaaagtactctgaaattccgcccgaaaggctgaaagattacagcgcttataacgtcaaagccatttttgacatatggccgatgcagaaaaaagttcttcaggaaaaccggcaggaggagctttttaatgacatagagcttcctcttataaccgtacttgccagtatggaataccacggtttcaaagttgacgccgcaaaacttcacgaatacggcgaagttcttctgtcacgcataaaagacctggaaaaggtaatttacatgctggccggtgaagaattcaacatcaattcaacgaagcagcttggtaccatattattcgaaaaactgaagcttcccgttgtaaaaagtacaaagaccggatactccaccgacgtcgaggttcttgaagagctttattacaagcatgatataataccatgcataatagaataccgccagcttacaaaactttacaccacctacgccgaaggtcttgaaaaagtgataaatcctgtaaccggtaaaattcattcaagttttaaccagacggttacggctacaggccgcatcagcagtaccgaaccaaatttacagaatatcccagtcagacacgaaatgggaagggaaatacggaaagcttttattccgtcgtcggaaaacgctgtttttgttgatgccgattattcacagatagagcttcgcgtgcttgcccatataacaggcgatgaagccctgataaatgctttcgttaagggggaagatattcatacggccacggcgtcgctggtatttgacgtagctcccgaagatgtgacgccggaactgcgcagaaatgcaaaagccgtaaatttcggcatagtgtacgggatcagtgattacgggctggcacgggatttgggaattacccggaaggaagcaaagcggtatatagacgactattttgccaaataccccaaagtaaaaacctatgtggatgaaattgtgcgggtcggccaggaacaggggtatgtggaaactctgttccacagaagaagataccttcccgagcttgcatctaaaaattttcaccagcgttctttcggaaaaagggttgcaatgaatacgcccatacagggcactgcagccgatattattaaaattgcgatggtgaaggtatacaaggctttgaaagaatccggccttaaatccaggcttatcctccaggtccatgacgaacttgttattgagacttttgaagacgaactggagactgtcaaggaacttgtcaaaaagtgcatggaagaggccgttgaattgagtgtgccgcttgttgtcgacgtttcaatcgggaaaaactggtatgaagcctcctgatatggatcc

SEQ ID NO: 561 - DNA, 2772 bp, Artificial Sequence
  Description of Artificial Sequence: Synthetic Clostridium stercorarium DNA Polymerase K748P
atgaaatacctgctgccgaccgctgctgctggtctgctgctcctcgctgcccagccggcgatggccatggatccaaaaataatccttatagacggaaacagtattttaaaccgcggtttttatgccctgtcggggcgatccatgctgactacgtccacaggtctgtataccaatgcggttttcgcttttgtaaatatattgaacaaatatatcgaagaggaaaaccctgattatattgccgttgctttcgatcttagggcaaaaactttccggcacggtctatatgagggatacaaagcgcagcggaaaggcatgcccgatgaacttgcaatgcagatacccctcgcgaaggaagtactgagggcgatgaatattgccataatagagcatgaaggttatgaagccgacgatataatcggcagcctttcgttaaaggccgaaaaagagaattttgacgtaataatccttacgggggacagggattctttccagctgatcagcgacagggtgaaagttatcctgccttcgacgaaagccggaaaaacagagaccaacgtatatgataaacaggccatcattgacaaatacggagttttaccccatcagcttattgacgttaaaggcttaatgggagattcgtcagataatatacccggcgttccgggagtgggtgagaaaacggcgttaagccttatttcagcctacggtacactggaaggtgtttacgagcatattgatgaaataaaacagcctaagctgaaagcatcgctgattgaatataaggatcaggcgtttttaagccgtaagctgggtactattgtaagaaatctggagctgtgtgcttcgctggaggatctgaaaagaaaagaaataaaccgcaaagagcttttgaatgttttcagaaaactcgaatttgaaagtatcatatcaaaaatgaatcttgcttccgctgaggtgacagaattacctcccgcgccggaagagcttaaaataacccatatttcagcggcagaggatcttaagaaatggattgcttacctgcttaaccagaaaaacatttccgtccttcaactgattgaccgggaggattcatacagttcccgtctttcagggctggctttgtgcaccggggatgaggttttttatatcgagaccgggactgcactccccgagaatttgattgcaacagagctgaaagaactgtggcagaatgaaaatattcacaaaatcggacacaatataaaagaatttataacctggctgctgaaacacgatgttgaactgaacggcctttatttcgacactatgattgccgaatacctgatagattccataagaaacggctatcctatagcaagcctttctcacaaatacctgaatcgcagcgttccgtcgctggacgaacttttgggcaagggaaagggagcaaaaaagtactctgaaattccgcccgaaaggctgaaagattacagcgcttataacgtcaaagccatttttgacatatggccgatgcagaaaaaagttcttcaggaaaaccggcaggaggagctttttaatgacatagagcttcctcttataaccgtacttgccagtatggaataccacggtttcaaagttgacgccgcaaaacttcacgaatacggcgaagttcttctgtcacgcataaaagacctggaaaaggtaatttacatgctggccggtgaagaattcaacatcaattcaacgaagcagcttggtaccatattattcgaaaaactgaagcttcccgttgtaaaaagtacaaagaccggatactccaccgacgtcgaggttcttgaagagctttattacaagcatgatataataccatgcataatagaataccgccagcttacaaaactttacaccacctacgccgaaggtcttgaaaaagtgataaatcctgtaaccggtaaaattcattcaagttttaaccagacggttacggctacaggccgcatcagcagtaccgaaccaaatttacagaatatcccagtcagacacgaaatgggaagggaaatacggaaagcttttattccgtcgtcggaaaacgctgtttttgttgatgccgattattcacagatagagcttcgcgtgcttgcccatataacaggcgatgaagccctgataaatgctttcgttaagggggaagatattcatacggccacggcgtcgctggtatttgacgtagctcccgaagatgtgacgccggaactgcgcagacctgcaaaagccgtaaatttcggcatagtgtacgggatcagtgattacgggctggcacgggatttgggaattacccggaaggaagcaaagcggtatatagacgactattttgccaaataccccaaagtaaaaacctatgtggatgaaattgtgcgggtcggccaggaacaggggtatgtggaaactctgttccacagaagaagataccttcccgagcttgcatctaaaaattttcaccagcgttctttcggaaaaagggttgcaatgaatacgcccatacagggcactgcagccgatattattaaaattgcgatggtgaaggtatacaaggctttgaaagaatccggccttaaatccaggcttatcctccaggtccatgacgaacttgttattgagacttttgaagacgaactggagactgtcaaggaacttgtcaaaaagtgcatggaagaggccgttgaattgagtgtgccgcttgttgtcgacgtttcaatcgggaaaaactggtatgaagcctcctgatatggatcc

SEQ ID NO: 562 - DNA, 2772 bp, Artificial Sequence
  Description of Artificial Sequence: Synthetic Clostridium stercorarium DNA Polymerase K748Q
atgaaatacctgctgccgaccgctgctgctggtctgctgctcctcgctgcccagccggcgatggccatggatccaaaaataatccttatagacggaaacagtattttaaaccgcggtttttatgccctgtcggggcgatccatgctgactacgtccacaggtctgtataccaatgcggttttcgcttttgtaaatatattgaacaaatatatcgaagaggaaaaccctgattatattgccgttgctttcgatcttagggcaaaaactttccggcacggtctatatgagggatacaaagcgcagcggaaaggcatgcccgatgaacttgcaatgcagatacccctcgcgaaggaagtactgagggcgatgaatattgccataatagagcatgaaggttatgaagccgacgatataatcggcagcctttcgttaaaggccgaaaaagagaattttgacgtaataatccttacgggggacagggattctttccagctgatcagcgacagggtgaaagttatcctgccttcgacgaaagccggaaaaacagagaccaacgtatatgataaacaggccatcattgacaaatacggagttttaccccatcagcttattgacgttaaaggcttaatgggagattcgtcagataatatacccggcgttccgggagtgggtgagaaaacggcgttaagccttatttcagcctacggtacactggaaggtgtttacgagcatattgatgaaataaaacagcctaagctgaaagcatcgctgattgaatataaggatcaggcgtttttaagccgtaagctgggtactattgtaagaaatctggagctgtgtgcttcgctggaggatctgaaaagaaaagaaataaaccgcaaagagcttttgaatgttttcagaaaactcgaatttgaaagtatcatatcaaaaatgaatcttgcttccgctgaggtgacagaattacctcccgcgccggaagagcttaaaataacccatatttcagcggcagaggatcttaagaaatggattgcttacctgcttaaccagaaaaacatttccgtccttcaactgattgaccgggaggattcatacagttcccgtctttcagggctggctttgtgcaccggggatgaggttttttatatcgagaccgggactgcactccccgagaatttgattgcaacagagctgaaagaactgtggcagaatgaaaatattcacaaaatcggacacaatataaaagaatttataacctggctgctgaaacacgatgttgaactgaacggcctttatttcgacactatgattgccgaatacctgatagattccataagaaacggctatcctatagcaagcctttctcacaaatacctgaatcgcagcgttccgtcgctggacgaacttttgggcaagggaaagggagcaaaaaagtactctgaaattccgcccgaaaggctgaaagattacagcgcttataacgtcaaagccatttttgacatatggccgatgcagaaaaaagttcttcaggaaaaccggcaggaggagctttttaatgacatagagcttcctcttataaccgtacttgccagtatggaataccacggtttcaaagttgacgccgcaaaacttcacgaatacggcgaagttcttctgtcacgcataaaagacctggaaaaggtaatttacatgctggccggtgaagaattcaacatcaattcaacgaagcagcttggtaccatattattcgaaaaactgaagcttcccgttgtaaaaagtacaaagaccggatactccaccgacgtcgaggttcttgaagagctttattacaagcatgatataataccatgcataatagaataccgccagcttacaaaactttacaccacctacgccgaaggtcttgaaaaagtgataaatcctgtaaccggtaaaattcattcaagttttaaccagacggttacggctacaggccgcatcagcagtaccgaaccaaatttacagaatatcccagtcagacacgaaatgggaagggaaatacggaaagcttttattccgtcgtcggaaaacgctgtttttgttgatgccgattattcacagatagagcttcgcgtgcttgcccatataacaggcgatgaagccctgataaatgctttcgttaagggggaagatattcatacggccacggcgtcgctggtatttgacgtagctcccgaagatgtgacgccggaactgcgcagacaagcaaaagccgtaaatttcggcatagtgtacgggatcagtgattacgggctggcacgggatttgggaattacccggaaggaagcaaagcggtatatagacgactattttgccaaataccccaaagtaaaaacctatgtggatgaaattgtgcgggtcggccaggaacaggggtatgtggaaactctgttccacagaagaagataccttcccgagcttgcatctaaaaattttcaccagcgttctttcggaaaaagggttgcaatgaatacgcccatacagggcactgcagccgatattattaaaattgcgatggtgaaggtatacaaggctttgaaagaatccggccttaaatccaggcttatcctccaggtccatgacgaacttgttattgagacttttgaagacgaactggagactgtcaaggaacttgtcaaaaagtgcatggaagaggccgttgaattgagtgtgccgcttgttgtcgacgtttcaatcgggaaaaactggtatgaagcctcctgatatggatcc

SEQ ID NO: 563 - DNA, 2772 bp, Artificial Sequence
  Description of Artificial Sequence: Synthetic Clostridium stercorarium DNA Polymerase K748R
atgaaatacctgctgccgaccgctgctgctggtctgctgctcctcgctgcccagccggcgatggccatggatccaaaaataatccttatagacggaaacagtattttaaaccgcggtttttatgccctgtcggggcgatccatgctgactacgtccacaggtctgtataccaatgcggttttcgcttttgtaaatatattgaacaaatatatcgaagaggaaaaccctgattatattgccgttgctttcgatcttagggcaaaaactttccggcacggtctatatgagggatacaaagcgcagcggaaaggcatgcccgatgaacttgcaatgcagatacccctcgcgaaggaagtactgagggcgatgaatattgccataatagagcatgaaggttatgaagccgacgatataatcggcagcctttcgttaaaggccgaaaaagagaattttgacgtaataatccttacgggggacagggattctttccagctgatcagcgacagggtgaaagttatcctgccttcgacgaaagccggaaaaacagagaccaacgtatatgataaacaggccatcattgacaaatacggagttttaccccatcagcttattgacgttaaaggcttaatgggagattcgtcagataatatacccggcgttccgggagtgggtgagaaaacggcgttaagccttatttcagcctacggtacactggaaggtgtttacgagcatattgatgaaataaaacagcctaagctgaaagcatcgctgattgaatataaggatcaggcgtttttaagccgtaagctgggtactattgtaagaaatctggagctgtgtgcttcgctggaggatctgaaaagaaaagaaataaaccgcaaagagcttttgaatgttttcagaaaactcgaatttgaaagtatcatatcaaaaatgaatcttgcttccgctgaggtgacagaattacctcccgcgccggaagagcttaaaataacccatatttcagcggcagaggatcttaagaaatggattgcttacctgcttaaccagaaaaacatttccgtccttcaactgattgaccgggaggattcatacagttcccgtctttcagggctggctttgtgcaccggggatgaggttttttatatcgagaccgggactgcactccccgagaatttgattgcaacagagctgaaagaactgtggcagaatgaaaatattcacaaaatcggacacaatataaaagaatttataacctggctgctgaaacacgatgttgaactgaacggcctttatttcgacactatgattgccgaatacctgatagattccataagaaacggctatcctatagcaagcctttctcacaaatacctgaatcgcagcgttccgtcgctggacgaacttttgggcaagggaaagggagcaaaaaagtactctgaaattccgcccgaaaggctgaaagattacagcgcttataacgtcaaagccatttttgacatatggccgatgcagaaaaaagttcttcaggaaaaccggcaggaggagctttttaatgacatagagcttcctcttataaccgtacttgccagtatggaataccacggtttcaaagttgacgccgcaaaacttcacgaatacggcgaagttcttctgtcacgcataaaagacctggaaaaggtaatttacatgctggccggtgaagaattcaacatcaattcaacgaagcagcttggtaccatattattcgaaaaactgaagcttcccgttgtaaaaagtacaaagaccggatactccaccgacgtcgaggttcttgaagagctttattacaagcatgatataataccatgcataatagaataccgccagcttacaaaactttacaccacctacgccgaaggtcttgaaaaagtgataaatcctgtaaccggtaaaattcattcaagttttaaccagacggttacggctacaggccgcatcagcagtaccgaaccaaatttacagaatatcccagtcagacacgaaatgggaagggaaatacggaaagcttttattccgtcgtcggaaaacgctgtttttgttgatgccgattattcacagatagagcttcgcgtgcttgcccatataacaggcgatgaagccctgataaatgctttcgttaagggggaagatattcatacggccacggcgtcgctggtatttgacgtagctcccgaagatgtgacgccggaactgcgcagacgtgcaaaagccgtaaatttcggcatagtgtacgggatcagtgattacgggctggcacgggatttgggaattacccggaaggaagcaaagcggtatatagacgactattttgccaaataccccaaagtaaaaacctatgtggatgaaattgtgcgggtcggccaggaacaggggtatgtggaaactctgttccacagaagaagataccttcccgagcttgcatctaaaaattttcaccagcgttctttcggaaaaagggttgcaatgaatacgcccatacagggcactgcagccgatattattaaaattgcgatggtgaaggtatacaaggctttgaaagaatccggccttaaatccaggcttatcctccaggtccatgacgaacttgttattgagacttttgaagacgaactggagactgtcaaggaacttgtcaaaaagtgcatggaagaggccgttgaattgagtgtgccgcttgttgtcgacgtttcaatcgggaaaaactggtatgaagcctcctgatatggatcc

SEQ ID NO: 564 - DNA, 2772 bp, Artificial Sequence
  Description of Artificial Sequence: Synthetic Clostridium stercorarium DNA Polymerase K748S
atgaaatacctgctgccgaccgctgctgctggtctgctgctcctcgctgcccagccggcgatggccatggatccaaaaataatccttatagacggaaacagtattttaaaccgcggtttttatgccctgtcggggcgatccatgctgactacgtccacaggtctgtataccaatgcggttttcgcttttgtaaatatattgaacaaatatatcgaagaggaaaaccctgattatattgccgttgctttcgatcttagggcaaaaactttccggcacggtctatatgagggatacaaagcgcagcggaaaggcatgcccgatgaacttgcaatgcagatacccctcgcgaaggaagtactgagggcgatgaatattgccataatagagcatgaaggttatgaagccgacgatataatcggcagcctttcgttaaaggccgaaaaagagaattttgacgtaataatccttacgggggacagggattctttccagctgatcagcgacagggtgaaagttatcctgccttcgacgaaagccggaaaaacagagaccaacgtatatgataaacaggccatcattgacaaatacggagttttaccccatcagcttattgacgttaaaggcttaatgggagattcgtcagataatatacccggcgttccgggagtgggtgagaaaacggcgttaagccttatttcagcctacggtacactggaaggtgtttacgagcatattgatgaaataaaacagcctaagctgaaagcatcgctgattgaatataaggatcaggcgtttttaagccgtaagctgggtactattgtaagaaatctggagctgtgtgcttcgctggaggatctgaaaagaaaagaaataaaccgcaaagagcttttgaatgttttcagaaaactcgaatttgaaagtatcatatcaaaaatgaatcttgcttccgctgaggtgacagaattacctcccgcgccggaagagcttaaaataacccatatttcagcggcagaggatcttaagaaatggattgcttacctgcttaaccagaaaaacatttccgtccttcaactgattgaccgggaggattcatacagttcccgtctttcagggctggctttgtgcaccggggatgaggttttttatatcgagaccgggactgcactccccgagaatttgattgcaacagagctgaaagaactgtggcagaatgaaaatattcacaaaatcggacacaatataaaagaatttataacctggctgctgaaacacgatgttgaactgaacggcctttatttcgacactatgattgccgaatacctgatagattccataagaaacggctatcctatagcaagcctttctcacaaatacctgaatcgcagcgttccgtcgctggacgaacttttgggcaagggaaagggagcaaaaaagtactctgaaattccgcccgaaaggctgaaagattacagcgcttataacgtcaaagccatttttgacatatggccgatgcagaaaaaagttcttcaggaaaaccggcaggaggagctttttaatgacatagagcttcctcttataaccgtacttgccagtatggaataccacggtttcaaagttgacgccgcaaaacttcacgaatacggcgaagttcttctgtcacgcataaaagacctggaaaaggtaatttacatgctggccggtgaagaattcaacatcaattcaacgaagcagcttggtaccatattattcgaaaaactgaagcttcccgttgtaaaaagtacaaagaccggatactccaccgacgtcgaggttcttgaagagctttattacaagcatgatataataccatgcataatagaataccgccagcttacaaaactttacaccacctacgccgaaggtcttgaaaaagtgataaatcctgtaaccggtaaaattcattcaagttttaaccagacggttacggctacaggccgcatcagcagtaccgaaccaaatttacagaatatcccagtcagacacgaaatgggaagggaaatacggaaagcttttattccgtcgtcggaaaacgctgtttttgttgatgccgattattcacagatagagcttcgcgtgcttgcccatataacaggcgatgaagccctgataaatgctttcgttaagggggaagatattcatacggccacggcgtcgctggtatttgacgtagctcccgaagatgtgacgccggaactgcgcagatctgcaaaagccgtaaatttcggcatagtgtacgggatcagtgattacgggctggcacgggatttgggaattacccggaaggaagcaaagcggtatatagacgactattttgccaaataccccaaagtaaaaacctatgtggatgaaattgtgcgggtcggccaggaacaggggtatgtggaaactctgttccacagaagaagataccttcccgagcttgcatctaaaaattttcaccagcgttctttcggaaaaagggttgcaatgaatacgcccatacagggcactgcagccgatattattaaaattgcgatggtgaaggtatacaaggctttgaaagaatccggccttaaatccaggcttatcctccaggtccatgacgaacttgttattgagacttttgaagacgaactggagactgtcaaggaacttgtcaaaaagtgcatggaagaggccgttgaattgagtgtgccgcttgttgtcgacgtttcaatcgggaaaaactggtatgaagcctcctgatatggatcc

SEQ ID NO: 565 - DNA, 2772 bp, Artificial Sequence
  Description of Artificial Sequence: Synthetic Clostridium stercorarium DNA Polymerase K748T
atgaaatacctgctgccgaccgctgctgctggtctgctgctcctcgctgcccagccggcgatggccatggatccaaaaataatccttatagacggaaacagtattttaaaccgcggtttttatgccctgtcggggcgatccatgctgactacgtccacaggtctgtataccaatgcggttttcgcttttgtaaatatattgaacaaatatatcgaagaggaaaaccctgattatattgccgttgctttcgatcttagggcaaaaactttccggcacggtctatatgagggatacaaagcgcagcggaaaggcatgcccgatgaacttgcaatgcagatacccctcgcgaaggaagtactgagggcgatgaatattgccataatagagcatgaaggttatgaagccgacgatataatcggcagcctttcgttaaaggccgaaaaagagaattttgacgtaataatccttacgggggacagggattctttccagctgatcagcgacagggtgaaagttatcctgccttcgacgaaagccggaaaaacagagaccaacgtatatgataaacaggccatcattgacaaatacggagttttaccccatcagcttattgacgttaaaggcttaatgggagattcgtcagataatatacccggcgttccgggagtgggtgagaaaacggcgttaagccttatttcagcctacggtacactggaaggtgtttacgagcatattgatgaaataaaacagcctaagctgaaagcatcgctgattgaatataaggatcaggcgtttttaagccgtaagctgggtactattgtaagaaatctggagctgtgtgcttcgctggaggatctgaaaagaaaagaaataaaccgcaaagagcttttgaatgttttcagaaaactcgaatttgaaagtatcatatcaaaaatgaatcttgcttccgctgaggtgacagaattacctcccgcgccggaagagcttaaaataacccatatttcagcggcagaggatcttaagaaatggattgcttacctgcttaaccagaaaaacatttccgtccttcaactgattgaccgggaggattcatacagttcccgtctttcagggctggctttgtgcaccggggatgaggttttttatatcgagaccgggactgcactccccgagaatttgattgcaacagagctgaaagaactgtggcagaatgaaaatattcacaaaatcggacacaatataaaagaatttataacctggctgctgaaacacgatgttgaactgaacggcctttatttcgacactatgattgccgaatacctgatagattccataagaaacggctatcctatagcaagcctttctcacaaatacctgaatcgcagcgttccgtcgctggacgaacttttgggcaagggaaagggagcaaaaaagtactctgaaattccgcccgaaaggctgaaagattacagcgcttataacgtcaaagccatttttgacatatggccgatgcagaaaaaagttcttcaggaaaaccggcaggaggagctttttaatgacatagagcttcctcttataaccgtacttgccagtatggaataccacggtttcaaagttgacgccgcaaaacttcacgaatacggcgaagttcttctgtcacgcataaaagacctggaaaaggtaatttacatgctggccggtgaagaattcaacatcaattcaacgaagcagcttggtaccatattattcgaaaaactgaagcttcccgttgtaaaaagtacaaagaccggatactccaccgacgtcgaggttcttgaagagctttattacaagcatgatataataccatgcataatagaataccgccagcttacaaaactttacaccacctacgccgaaggtcttgaaaaagtgataaatcctgtaaccggtaaaattcattcaagttttaaccagacggttacggctacaggccgcatcagcagtaccgaaccaaatttacagaatatcccagtcagacacgaaatgggaagggaaatacggaaagcttttattccgtcgtcggaaaacgctgtttttgttgatgccgattattcacagatagagcttcgcgtgcttgcccatataacaggcgatgaagccctgataaatgctttcgttaagggggaagatattcatacggccacggcgtcgctggtatttgacgtagctcccgaagatgtgacgccggaactgcgcagaactgcaaaagccgtaaatttcggcatagtgtacgggatcagtgattacgggctggcacgggatttgggaattacccggaaggaagcaaagcggtatatagacgactattttgccaaataccccaaagtaaaaacctatgtggatgaaattgtgcgggtcggccaggaacaggggtatgtggaaactctgttccacagaagaagataccttcccgagcttgcatctaaaaattttcaccagcgttctttcggaaaaagggttgcaatgaatacgcccatacagggcactgcagccgatattattaaaattgcgatggtgaaggtatacaaggctttgaaagaatccggccttaaatccaggcttatcctccaggtccatgacgaacttgttattgagacttttgaagacgaactggagactgtcaaggaacttgtcaaaaagtgcatggaagaggccgttgaattgagtgtgccgcttgttgtcgacgtttcaatcgggaaaaactggtatgaagcctcctgatatggatcc

SEQ ID NO: 566 - DNA, 2772 bp, Artificial Sequence
  Description of Artificial Sequence: Synthetic Clostridium stercorarium DNA Polymerase K748V
atgaaatacctgctgccgaccgctgctgctggtctgctgctcctcgctgcccagccggcgatggccatggatccaaaaataatccttatagacggaaacagtattttaaaccgcggtttttatgccctgtcggggcgatccatgctgactacgtccacaggtctgtataccaatgcggttttcgcttttgtaaatatattgaacaaatatatcgaagaggaaaaccctgattatattgccgttgctttcgatcttagggcaaaaactttccggcacggtctatatgagggatacaaagcgcagcggaaaggcatgcccgatgaacttgcaatgcagatacccctcgcgaaggaagtactgagggcgatgaatattgccataatagagcatgaaggttatgaagccgacgatataatcggcagcctttcgttaaaggccgaaaaagagaattttgacgtaataatccttacgggggacagggattctttccagctgatcagcgacagggtgaaagttatcctgccttcgacgaaagccggaaaaacagagaccaacgtatatgataaacaggccatcattgacaaatacggagttttaccccatcagcttattgacgttaaaggcttaatgggagattcgtcagataatatacccggcgttccgggagtgggtgagaaaacggcgttaagccttatttcagcctacggtacactggaaggtgtttacgagcatattgatgaaataaaacagcctaagctgaaagcatcgctgattgaatataaggatcaggcgtttttaagccgtaagctgggtactattgtaagaaatctggagctgtgtgcttcgctggaggatctgaaaagaaaagaaataaaccgcaaagagcttttgaatgttttcagaaaactcgaatttgaaagtatcatatcaaaaatgaatcttgcttccgctgaggtgacagaattacctcccgcgccggaagagcttaaaataacccatatttcagcggcagaggatcttaagaaatggattgcttacctgcttaaccagaaaaacatttccgtccttcaactgattgaccgggaggattcatacagttcccgtctttcagggctggctttgtgcaccggggatgaggttttttatatcgagaccgggactgcactccccgagaatttgattgcaacagagctgaaagaactgtggcagaatgaaaatattcacaaaatcggacacaatataaaagaatttataacctggctgctgaaacacgatgttgaactgaacggcctttatttcgacactatgattgccgaatacctgatagattccataagaaacggctatcctatagcaagcctttctcacaaatacctgaatcgcagcgttccgtcgctggacgaacttttgggcaagggaaagggagcaaaaaagtactctgaaattccgcccgaaaggctgaaagattacagcgcttataacgtcaaagccatttttgacatatggccgatgcagaaaaaagttcttcaggaaaaccggcaggaggagctttttaatgacatagagcttcctcttataaccgtacttgccagtatggaataccacggtttcaaagttgacgccgcaaaacttcacgaatacggcgaagttcttctgtcacgcataaaagacctggaaaaggtaatttacatgctggccggtgaagaattcaacatcaattcaacgaagcagcttggtaccatattattcgaaaaactgaagcttcccgttgtaaaaagtacaaagaccggatactccaccgacgtcgaggttcttgaagagctttattacaagcatgatataataccatgcataatagaataccgccagcttacaaaactttacaccacctacgccgaaggtcttgaaaaagtgataaatcctgtaaccggtaaaattcattcaagttttaaccagacggttacggctacaggccgcatcagcagtaccgaaccaaatttacagaatatcccagtcagacacgaaatgggaagggaaatacggaaagcttttattccgtcgtcggaaaacgctgtttttgttgatgccgattattcacagatagagcttcgcgtgcttgcccatataacaggcgatgaagccctgataaatgctttcgttaagggggaagatattcatacggccacggcgtcgctggtatttgacgtagctcccgaagatgtgacgccggaactgcgcagagttgcaaaagccgtaaatttcggcatagtgtacgggatcagtgattacgggctggcacgggatttgggaattacccggaaggaagcaaagcggtatatagacgactattttgccaaataccccaaagtaaaaacctatgtggatgaaattgtgcgggtcggccaggaacaggggtatgtggaaactctgttccacagaagaagataccttcccgagcttgcatctaaaaattttcaccagcgttctttcggaaaaagggttgcaatgaatacgcccatacagggcactgcagccgatattattaaaattgcgatggtgaaggtatacaaggctttgaaagaatccggccttaaatccaggcttatcctccaggtccatgacgaacttgttattgagacttttgaagacgaactggagactgtcaaggaacttgtcaaaaagtgcatggaagaggccgttgaattgagtgtgccgcttgttgtcgacgtttcaatcgggaaaaactggtatgaagcctcctgatatggatcc

SEQ ID NO: 567 - DNA, 2772 bp, Artificial Sequence
  Description of Artificial Sequence: Synthetic Clostridium stercorarium DNA Polymerase K748W
atgaaatacctgctgccgaccgctgctgctggtctgctgctcctcgctgcccagccggcgatggccatggatccaaaaataatccttatagacggaaacagtattttaaaccgcggtttttatgccctgtcggggcgatccatgctgactacgtccacaggtctgtataccaatgcggttttcgcttttgtaaatatattgaacaaatatatcgaagaggaaaaccctgattatattgccgttgctttcgatcttagggcaaaaactttccggcacggtctatatgagggatacaaagcgcagcggaaaggcatgcccgatgaacttgcaatgcagatacccctcgcgaaggaagtactgagggcgatgaatattgccataatagagcatgaaggttatgaagccgacgatataatcggcagcctttcgttaaaggccgaaaaagagaattttgacgtaataatccttacgggggacagggattctttccagctgatcagcgacagggtgaaagttatcctgccttcgacgaaagccggaaaaacagagaccaacgtatatgataaacaggccatcattgacaaatacggagttttaccccatcagcttattgacgttaaaggcttaatgggagattcgtcagataatatacccggcgttccgggagtgggtgagaaaacggcgttaagccttatttcagcctacggtacactggaaggtgtttacgagcatattgatgaaataaaacagcctaagctgaaagcatcgctgattgaatataaggatcaggcgtttttaagccgtaagctgggtactattgtaagaaatctggagctgtgtgcttcgctggaggatctgaaaagaaaagaaataaaccgcaaagagcttttgaatgttttcagaaaactcgaatttgaaagtatcatatcaaaaatgaatcttgcttccgctgaggtgacagaattacctcccgcgccggaagagcttaaaataacccatatttcagcggcagaggatcttaagaaatggattgcttacctgcttaaccagaaaaacatttccgtccttcaactgattgaccgggaggattcatacagttcccgtctttcagggctggctttgtgcaccggggatgaggttttttatatcgagaccgggactgcactccccgagaatttgattgcaacagagctgaaagaactgtggcagaatgaaaatattcacaaaatcggacacaatataaaagaatttataacctggctgctgaaacacgatgttgaactgaacggcctttatttcgacactatgattgccgaatacctgatagattccataagaaacggctatcctatagcaagcctttctcacaaatacctgaatcgcagcgttccgtcgctggacgaacttttgggcaagggaaagggagcaaaaaagtactctgaaattccgcccgaaaggctgaaagattacagcgcttataacgtcaaagccatttttgacatatggccgatgcagaaaaaagttcttcaggaaaaccggcaggaggagctttttaatgacatagagcttcctcttataaccgtacttgccagtatggaataccacggtttcaaagttgacgccgcaaaacttcacgaatacggcgaagttcttctgtcacgcataaaagacctggaaaaggtaatttacatgctggccggtgaagaattcaacatcaattcaacgaagcagcttggtaccatattattcgaaaaactgaagcttcccgttgtaaaaagtacaaagaccggatactccaccgacgtcgaggttcttgaagagctttattacaagcatgatataataccatgcataatagaataccgccagcttacaaaactttacaccacctacgccgaaggtcttgaaaaagtgataaatcctgtaaccggtaaaattcattcaagttttaaccagacggttacggctacaggccgcatcagcagtaccgaaccaaatttacagaatatcccagtcagacacgaaatgggaagggaaatacggaaagcttttattccgtcgtcggaaaacgctgtttttgttgatgccgattattcacagatagagcttcgcgtgcttgcccatataacaggcgatgaagccctgataaatgctttcgttaagggggaagatattcatacggccacggcgtcgctggtatttgacgtagctcccgaagatgtgacgccggaactgcgcagatgggcaaaagccgtaaatttcggcatagtgtacgggatcagtgattacgggctggcacgggatttgggaattacccggaaggaagcaaagcggtatatagacgactattttgccaaataccccaaagtaaaaacctatgtggatgaaattgtgcgggtcggccaggaacaggggtatgtggaaactctgttccacagaagaagataccttcccgagcttgcatctaaaaattttcaccagcgttctttcggaaaaagggttgcaatgaatacgcccatacagggcactgcagccgatattattaaaattgcgatggtgaaggtatacaaggctttgaaagaatccggccttaaatccaggcttatcctccaggtccatgacgaacttgttattgagacttttgaagacgaactggagactgtcaaggaacttgtcaaaaagtgcatggaagaggccgttgaattgagtgtgccgcttgttgtcgacgtttcaatcgggaaaaactggtatgaagcctcctgatatggatcc

SEQ ID NO: 568 - DNA, 2772 bp, Artificial Sequence
  Description of Artificial Sequence: Synthetic Clostridium stercorarium DNA Polymerase K748Y
atgaaatacctgctgccgaccgctgctgctggtctgctgctcctcgctgcccagccggcgatggccatggatccaaaaataatccttatagacggaaacagtattttaaaccgcggtttttatgccctgtcggggcgatccatgctgactacgtccacaggtctgtataccaatgcggttttcgcttttgtaaatatattgaacaaatatatcgaagaggaaaaccctgattatattgccgttgctttcgatcttagggcaaaaactttccggcacggtctatatgagggatacaaagcgcagcggaaaggcatgcccgatgaacttgcaatgcagatacccctcgcgaaggaagtactgagggcgatgaatattgccataatagagcatgaaggttatgaagccgacgatataatcggcagcctttcgttaaaggccgaaaaagagaattttgacgtaataatccttacgggggacagggattctttccagctgatcagcgacagggtgaaagttatcctgccttcgacgaaagccggaaaaacagagaccaacgtatatgataaacaggccatcattgacaaatacggagttttaccccatcagcttattgacgttaaaggcttaatgggagattcgtcagataatatacccggcgttccgggagtgggtgagaaaacggcgttaagccttatttcagcctacggtacactggaaggtgtttacgagcatattgatgaaataaaacagcctaagctgaaagcatcgctgattgaatataaggatcaggcgtttttaagccgtaagctgggtactattgtaagaaatctggagctgtgtgcttcgctggaggatctgaaaagaaaagaaataaaccgcaaagagcttttgaatgttttcagaaaactcgaatttgaaagtatcatatcaaaaatgaatcttgcttccgctgaggtgacagaattacctcccgcgccggaagagcttaaaataacccatatttcagcggcagaggatcttaagaaatggattgcttacctgcttaaccagaaaaacatttccgtccttcaactgattgaccgggaggattcatacagttcccgtctttcagggctggctttgtgcaccggggatgaggttttttatatcgagaccgggactgcactccccgagaatttgattgcaacagagctgaaagaactgtggcagaatgaaaatattcacaaaatcggacacaatataaaagaatttataacctggctgctgaaacacgatgttgaactgaacggcctttatttcgacactatgattgccgaatacctgatagattccataagaaacggctatcctatagcaagcctttctcacaaatacctgaatcgcagcgttccgtcgctggacgaacttttgggcaagggaaagggagcaaaaaagtactctgaaattccgcccgaaaggctgaaagattacagcgcttataacgtcaaagccatttttgacatatggccgatgcagaaaaaagttcttcaggaaaaccggcaggaggagctttttaatgacatagagcttcctcttataaccgtacttgccagtatggaataccacggtttcaaagttgacgccgcaaaacttcacgaatacggcgaagttcttctgtcacgcataaaagacctggaaaaggtaatttacatgctggccggtgaagaattcaacatcaattcaacgaagcagcttggtaccatattattcgaaaaactgaagcttcccgttgtaaaaagtacaaagaccggatactccaccgacgtcgaggttcttgaagagctttattacaagcatgatataataccatgcataatagaataccgccagcttacaaaactttacaccacctacgccgaaggtcttgaaaaagtgataaatcctgtaaccggtaaaattcattcaagttttaaccagacggttacggctacaggccgcatcagcagtaccgaaccaaatttacagaatatcccagtcagacacgaaatgggaagggaaatacggaaagcttttattccgtcgtcggaaaacgctgtttttgttgatgccgattattcacagatagagcttcgcgtgcttgcccatataacaggcgatgaagccctgataaatgctttcgttaagggggaagatattcatacggccacggcgtcgctggtatttgacgtagctcccgaagatgtgacgccggaactgcgcagatatgcaaaagccgtaaatttcggcatagtgtacgggatcagtgattacgggctggcacgggatttgggaattacccggaaggaagcaaagcggtatatagacgactattttgccaaataccccaaagtaaaaacctatgtggatgaaattgtgcgggtcggccaggaacaggggtatgtggaaactctgttccacagaagaagataccttcccgagcttgcatctaaaaattttcaccagcgttctttcggaaaaagggttgcaatgaatacgcccatacagggcactgcagccgatattattaaaattgcgatggtgaaggtatacaaggctttgaaagaatccggccttaaatccaggcttatcctccaggtccatgacgaacttgttattgagacttttgaagacgaactggagactgtcaaggaacttgtcaaaaagtgcatggaagaggccgttgaattgagtgtgccgcttgttgtcgacgtttcaatcgggaaaaactggtatgaagcctcctgatatggatcc

SEQ ID NO: 569 - DNA, 2678 bp, Artificial Sequence
  Description of Artificial Sequence: Synthetic Clostridium thermosulfurogenes DNA Polymerase R784A
atgaaatacctgctgccgaccgctgctgctggtctgctgctcctcgctgcccagccggcgatggccatggcgaaatttttgatcatagatggtaatagcttgatgtacagggcgtattttgccctgcctgatttgatgaacagcgaaggaatgcatacaaatgccatatacggtttttcaatgatgcttcttaaattgctggaggaggagaaaccagactacatagcaatagctttcgataaaaaggcttctacatttaggcacaaggagtacagtgcttataaaggaacccgccagtcgatgccagaagagctgatagaacaggtggatattttaaaagatgtgataaatgcatttaacataaagaccatcgagatagagggatttgaagcagatgatatcattggtacagtatcaaaaattgcttccgaaagtgggatggatgtgcttatcgtcacaggcgacagagatgcgcttcagcttgtgtcggcaaatgtaaaagtaaaaatatgtaaaaaaggcataacgcagatggatgagtacgatgaaaaggcggtctttgaaaagtatgaagtgacgccgcttcaattcatagacttgaaagggcttatgggagacaaatcagacaacattccaggagtgcccaatataggggagaagacggccataaagcttgttaaagaatttggatcaattgaaaatttactgatgaatacagataagttaaaagggaaaataaaagaaaatgtagaaaacaatgcagaattagctgttttaagcaaacggcttgctacgattgagagaaatgttcctattgatattgatttgaatgaatacgcggttaaaaattacgatgtcaataagcttacagagctatttgaaaaattggaattttcaagcctcatctcagatttaaaagatgatagtcgtgatacaaaggatattaaagaatggcctgtaagagattttacatacgttaaaaatgttttaggaaagtttgatgttttgtcattgtatccattcatatatgatggaaagataaaagcagtatcatttgcttgcggtgacggatcgttttttgtagagattgatgattatgacaattttaaattgcttaataatgataagcttacgttgataggacacgatctgaaagattttttagtaaacatttcatactgcggtattgaacttaattgtaagattttagatacggccataatgacttatcttttaaatccgtctgagtcgaattacgacataagtcgcgtattgaaaaaatacttgaaagaggatttgcaaaacatagatgatatagtaggcaagggcaggaataaaaagagctacgatgacattgacaaaaagcttttagtcgattatatgtgttcagccgcatcaaacttatctaagttaaaagataagctcatgtcatttataaaagagatggagatggaagatcttttaaaaaatgtggaaattccgcttattgaagtgctaaaatctatggaggtgtacggctttacattagataaagatgtacttagaagtatttctaaagaaatagatgaaaagacagataagattgtaaaagatatttacgatgctgctggatacgaatttaatattaactctacaaagcagttatcagaatttttgtttgataaactgaatttgccagcaataaaaaagactaaaacagggtattcgactgacatggaagtccttgcagaacttataccgtacaatgacatagtaggagaaataatagaatatagacagcttatgaagcttaaatctacgtacatagatggcttcattcccatcatggatgaaaataatagggtccactctacgtttaaacaaacagttgctgctacagggagaattagctcaacagagcctaatctgcagaacatacctgtaagagaagaatttggcaggaggataagaaaggcatttgtatcaagttatgaagatgggcttataatatctgctgattattctcagattgagctaagggttcttgcacatctttcagaggatgaaaaacttattgagtcatttttgaacaacgaagatatacatttaaggacggcatcggaggtttttaaggtttcgaaagaagaagtgacaagtgaaatgagaaggcgggcgaaagctgtcaactttggtattgtatatggtataagcgattacggcttatctaaagacttaaagatttcgcgaaaagaagcgaaagaatacatagacaattattttgacaggtacaagggcgtcaaaaattacatcgactcaattgtcaaatttgcaaaggaaaatgggtatgttacgactatcttaaataggagagcttacataccggaaatcaattcaaaaaattttaaccaaagatcttttggcgagagaatggcaatgaatacacctattcaaggtagcgctgcggatataataaagatgtcgatggttaaagtatacaatgaattaaaggaaagaggattgaaatcaagacttattcttcaggtgcacgatgagcttataattgacacacatcctgatgaagttgaaatagtcaaggagcttctaaaatcaataatggaaaatatcataaagttgaaagttcctttagttgtagatatagggcaagggaaaaactggtatgatgcaaaataaaaggatcc

SEQ ID NO: 570 - DNA, 2678 bp, Artificial Sequence
  Description of Artificial Sequence: Synthetic Clostridium thermosulfurogenes DNA Polymerase R784N
atgaaatacctgctgccgaccgctgctgctggtctgctgctcctcgctgcccagccggcgatggccatggcgaaatttttgatcatagatggtaatagcttgatgtacagggcgtattttgccctgcctgatttgatgaacagcgaaggaatgcatacaaatgccatatacggtttttcaatgatgcttcttaaattgctggaggaggagaaaccagactacatagcaatagctttcgataaaaaggcttctacatttaggcacaaggagtacagtgcttataaaggaacccgccagtcgatgccagaagagctgatagaacaggtggatattttaaaagatgtgataaatgcatttaacataaagaccatcgagatagagggatttgaagcagatgatatcattggtacagtatcaaaaattgcttccgaaagtgggatggatgtgcttatcgtcacaggcgacagagatgcgcttcagcttgtgtcggcaaatgtaaaagtaaaaatatgtaaaaaaggcataacgcagatggatgagtacgatgaaaaggcggtctttgaaaagtatgaagtgacgccgcttcaattcatagacttgaaagggcttatgggagacaaatcagacaacattccaggagtgcccaatataggggagaagacggccataaagcttgttaaagaatttggatcaattgaaaatttactgatgaatacagataagttaaaagggaaaataaaagaaaatgtagaaaacaatgcagaattagctgttttaagcaaacggcttgctacgattgagagaaatgttcctattgatattgatttgaatgaatacgcggttaaaaattacgatgtcaataagcttacagagctatttgaaaaattggaattttcaagcctcatctcagatttaaaagatgatagtcgtgatacaaaggatattaaagaatggcctgtaagagattttacatacgttaaaaatgttttaggaaagtttgatgttttgtcattgtatccattcatatatgatggaaagataaaagcagtatcatttgcttgcggtgacggatcgttttttgtagagattgatgattatgacaattttaaattgcttaataatgataagcttacgttgataggacacgatctgaaagattttttagtaaacatttcatactgcggtattgaacttaattgtaagattttagatacggccataatgacttatcttttaaatccgtctgagtcgaattacgacataagtcgcgtattgaaaaaatacttgaaagaggatttgcaaaacatagatgatatagtaggcaagggcaggaataaaaagagctacgatgacattgacaaaaagcttttagtcgattatatgtgttcagccgcatcaaacttatctaagttaaaagataagctcatgtcatttataaaagagatggagatggaagatcttttaaaaaatgtggaaattccgcttattgaagtgctaaaatctatggaggtgtacggctttacattagataaagatgtacttagaagtatttctaaagaaatagatgaaaagacagataagattgtaaaagatatttacgatgctgctggatacgaatttaatattaactctacaaagcagttatcagaatttttgtttgataaactgaatttgccagcaataaaaaagactaaaacagggtattcgactgacatggaagtccttgcagaacttataccgtacaatgacatagtaggagaaataatagaatatagacagcttatgaagcttaaatctacgtacatagatggcttcattcccatcatggatgaaaataatagggtccactctacgtttaaacaaacagttgctgctacagggagaattagctcaacagagcctaatctgcagaacatacctgtaagagaagaatttggcaggaggataagaaaggcatttgtatcaagttatgaagatgggcttataatatctgctgattattctcagattgagctaagggttcttgcacatctttcagaggatgaaaaacttattgagtcatttttgaacaacgaagatatacatttaaggacggcatcggaggtttttaaggtttcgaaagaagaagtgacaagtgaaatgagaaggcgggcgaaagctgtcaactttggtattgtatatggtataagcgattacggcttatctaaagacttaaagatttcgcgaaaagaagcgaaagaatacatagacaattattttgacaggtacaagggcgtcaaaaattacatcgactcaattgtcaaatttgcaaaggaaaatgggtatgttacgactatcttaaataggagaaattacataccggaaatcaattcaaaaaattttaaccaaagatcttttggcgagagaatggcaatgaatacacctattcaaggtagcgctgcggatataataaagatgtcgatggttaaagtatacaatgaattaaaggaaagaggattgaaatcaagacttattcttcaggtgcacgatgagcttataattgacacacatcctgatgaagttgaaatagtcaaggagcttctaaaatcaataatggaaaatatcataaagttgaaagttcctttagttgtagatatagggcaagggaaaaactggtatgatgcaaaataaaaggatcc

SEQ ID NO: 571 - DNA, 2678 bp, Artificial Sequence
  Description of Artificial Sequence: Synthetic Clostridium thermosulfurogenes DNA Polymerase R784D
atgaaatacctgctgccgaccgctgctgctggtctgctgctcctcgctgcccagccggcgatggccatggcgaaatttttgatcatagatggtaatagcttgatgtacagggcgtattttgccctgcctgatttgatgaacagcgaaggaatgcatacaaatgccatatacggtttttcaatgatgcttcttaaattgctggaggaggagaaaccagactacatagcaatagctttcgataaaaaggcttctacatttaggcacaaggagtacagtgcttataaaggaacccgccagtcgatgccagaagagctgatagaacaggtggatattttaaaagatgtgataaatgcatttaacataaagaccatcgagatagagggatttgaagcagatgatatcattggtacagtatcaaaaattgcttccgaaagtgggatggatgtgcttatcgtcacaggcgacagagatgcgcttcagcttgtgtcggcaaatgtaaaagtaaaaatatgtaaaaaaggcataacgcagatggatgagtacgatgaaaaggcggtctttgaaaagtatgaagtgacgccgcttcaattcatagacttgaaagggcttatgggagacaaatcagacaacattccaggagtgcccaatataggggagaagacggccataaagcttgttaaagaatttggatcaattgaaaatttactgatgaatacagataagttaaaagggaaaataaaagaaaatgtagaaaacaatgcagaattagctgttttaagcaaacggcttgctacgattgagagaaatgttcctattgatattgatttgaatgaatacgcggttaaaaattacgatgtcaataagcttacagagctatttgaaaaattggaattttcaagcctcatctcagatttaaaagatgatagtcgtgatacaaaggatattaaagaatggcctgtaagagattttacatacgttaaaaatgttttaggaaagtttgatgttttgtcattgtatccattcatatatgatggaaagataaaagcagtatcatttgcttgcggtgacggatcgttttttgtagagattgatgattatgacaattttaaattgcttaataatgataagcttacgttgataggacacgatctgaaagattttttagtaaacatttcatactgcggtattgaacttaattgtaagattttagatacggccataatgacttatcttttaaatccgtctgagtcgaattacgacataagtcgcgtattgaaaaaatacttgaaagaggatttgcaaaacatagatgatatagtaggcaagggcaggaataaaaagagctacgatgacattgacaaaaagcttttagtcgattatatgtgttcagccgcatcaaacttatctaagttaaaagataagctcatgtcatttataaaagagatggagatggaagatcttttaaaaaatgtggaaattccgcttattgaagtgctaaaatctatggaggtgtacggctttacattagataaagatgtacttagaagtatttctaaagaaatagatgaaaagacagataagattgtaaaagatatttacgatgctgctggatacgaatttaatattaactctacaaagcagttatcagaatttttgtttgataaactgaatttgccagcaataaaaaagactaaaacagggtattcgactgacatggaagtccttgcagaacttataccgtacaatgacatagtaggagaaataatagaatatagacagcttatgaagcttaaatctacgtacatagatggcttcattcccatcatggatgaaaataatagggtccactctacgtttaaacaaacagttgctgctacagggagaattagctcaacagagcctaatctgcagaacatacctgtaagagaagaatttggcaggaggataagaaaggcatttgtatcaagttatgaagatgggcttataatatctgctgattattctcagattgagctaagggttcttgcacatctttcagaggatgaaaaacttattgagtcatttttgaacaacgaagatatacatttaaggacggcatcggaggtttttaaggtttcgaaagaagaagtgacaagtgaaatgagaaggcgggcgaaagctgtcaactttggtattgtatatggtataagcgattacggcttatctaaagacttaaagatttcgcgaaaagaagcgaaagaatacatagacaattattttgacaggtacaagggcgtcaaaaattacatcgactcaattgtcaaatttgcaaaggaaaatgggtatgttacgactatcttaaataggagagattacataccggaaatcaattcaaaaaattttaaccaaagatcttttggcgagagaatggcaatgaatacacctattcaaggtagcgctgcggatataataaagatgtcgatggttaaagtatacaatgaattaaaggaaagaggattgaaatcaagacttattcttcaggtgcacgatgagcttataattgacacacatcctgatgaagttgaaatagtcaaggagcttctaaaatcaataatggaaaatatcataaagttgaaagttcctttagttgtagatatagggcaagggaaaaactggtatgatgcaaaataaaaggatcc

SEQ ID NO: 572 - DNA, 2678 bp, Artificial Sequence
  Description of Artificial Sequence: Synthetic Clostridium thermosulfurogenes DNA Polymerase R784C
atgaaatacctgctgccgaccgctgctgctggtctgctgctcctcgctgcccagccggcgatggccatggcgaaatttttgatcatagatggtaatagcttgatgtacagggcgtattttgccctgcctgatttgatgaacagcgaaggaatgcatacaaatgccatatacggtttttcaatgatgcttcttaaattgctggaggaggagaaaccagactacatagcaatagctttcgataaaaaggcttctacatttaggcacaaggagtacagtgcttataaaggaacccgccagtcgatgccagaagagctgatagaacaggtggatattttaaaagatgtgataaatgcatttaacataaagaccatcgagatagagggatttgaagcagatgatatcattggtacagtatcaaaaattgcttccgaaagtgggatggatgtgcttatcgtcacaggcgacagagatgcgcttcagcttgtgtcggcaaatgtaaaagtaaaaatatgtaaaaaaggcataacgcagatggatgagtacgatgaaaaggcggtctttgaaaagtatgaagtgacgccgcttcaattcatagacttgaaagggcttatgggagacaaatcagacaacattccaggagtgcccaatataggggagaagacggccataaagcttgttaaagaatttggatcaattgaaaatttactgatgaatacagataagttaaaagggaaaataaaagaaaatgtagaaaacaatgcagaattagctgttttaagcaaacggcttgctacgattgagagaaatgttcctattgatattgatttgaatgaatacgcggttaaaaattacgatgtcaataagcttacagagctatttgaaaaattggaattttcaagcctcatctcagatttaaaagatgatagtcgtgatacaaaggatattaaagaatggcctgtaagagattttacatacgttaaaaatgttttaggaaagtttgatgttttgtcattgtatccattcatatatgatggaaagataaaagcagtatcatttgcttgcggtgacggatcgttttttgtagagattgatgattatgacaattttaaattgcttaataatgataagcttacgttgataggacacgatctgaaagattttttagtaaacatttcatactgcggtattgaacttaattgtaagattttagatacggccataatgacttatcttttaaatccgtctgagtcgaattacgacataagtcgcgtattgaaaaaatacttgaaagaggatttgcaaaacatagatgatatagtaggcaagggcaggaataaaaagagctacgatgacattgacaaaaagcttttagtcgattatatgtgttcagccgcatcaaacttatctaagttaaaagataagctcatgtcatttataaaagagatggagatggaagatcttttaaaaaatgtggaaattccgcttattgaagtgctaaaatctatggaggtgtacggctttacattagataaagatgtacttagaagtatttctaaagaaatagatgaaaagacagataagattgtaaaagatatttacgatgctgctggatacgaatttaatattaactctacaaagcagttatcagaatttttgtttgataaactgaatttgccagcaataaaaaagactaaaacagggtattcgactgacatggaagtccttgcagaacttataccgtacaatgacatagtaggagaaataatagaatatagacagcttatgaagcttaaatctacgtacatagatggcttcattcccatcatggatgaaaataatagggtccactctacgtttaaacaaacagttgctgctacagggagaattagctcaacagagcctaatctgcagaacatacctgtaagagaagaatttggcaggaggataagaaaggcatttgtatcaagttatgaagatgggcttataatatctgctgattattctcagattgagctaagggttcttgcacatctttcagaggatgaaaaacttattgagtcatttttgaacaacgaagatatacatttaaggacggcatcggaggtttttaaggtttcgaaagaagaagtgacaagtgaaatgagaaggcgggcgaaagctgtcaactttggtattgtatatggtataagcgattacggcttatctaaagacttaaagatttcgcgaaaagaagcgaaagaatacatagacaattattttgacaggtacaagggcgtcaaaaattacatcgactcaattgtcaaatttgcaaaggaaaatgggtatgttacgactatcttaaataggagatgttacataccggaaatcaattcaaaaaattttaaccaaagatcttttggcgagagaatggcaatgaatacacctattcaaggtagcgctgcggatataataaagatgtcgatggttaaagtatacaatgaattaaaggaaagaggattgaaatcaagacttattcttcaggtgcacgatgagcttataattgacacacatcctgatgaagttgaaatagtcaaggagcttctaaaatcaataatggaaaatatcataaagttgaaagttcctttagttgtagatatagggcaagggaaaaactggtatgatgcaaaataaaaggatcc

SEQ ID NO: 573 - DNA, 2678 bp, Artificial Sequence
  Description of Artificial Sequence: Synthetic Clostridium thermosulfurogenes DNA Polymerase R784E
atgaaatacctgctgccgaccgctgctgctggtctgctgctcctcgctgcccagccggcgatggccatggcgaaatttttgatcatagatggtaatagcttgatgtacagggcgtattttgccctgcctgatttgatgaacagcgaaggaatgcatacaaatgccatatacggtttttcaatgatgcttcttaaattgctggaggaggagaaaccagactacatagcaatagctttcgataaaaaggcttctacatttaggcacaaggagtacagtgcttataaaggaacccgccagtcgatgccagaagagctgatagaacaggtggatattttaaaagatgtgataaatgcatttaacataaagaccatcgagatagagggatttgaagcagatgatatcattggtacagtatcaaaaattgcttccgaaagtgggatggatgtgcttatcgtcacaggcgacagagatgcgcttcagcttgtgtcggcaaatgtaaaagtaaaaatatgtaaaaaaggcataacgcagatggatgagtacgatgaaaaggcggtctttgaaaagtatgaagtgacgccgcttcaattcatagacttgaaagggcttatgggagacaaatcagacaacattccaggagtgcccaatataggggagaagacggccataaagcttgttaaagaatttggatcaattgaaaatttactgatgaatacagataagttaaaagggaaaataaaagaaaatgtagaaaacaatgcagaattagctgttttaagcaaacggcttgctacgattgagagaaatgttcctattgatattgatttgaatgaatacgcggttaaaaattacgatgtcaataagcttacagagctatttgaaaaattggaattttcaagcctcatctcagatttaaaagatgatagtcgtgatacaaaggatattaaagaatggcctgtaagagattttacatacgttaaaaatgttttaggaaagtttgatgttttgtcattgtatccattcatatatgatggaaagataaaagcagtatcatttgcttgcggtgacggatcgttttttgtagagattgatgattatgacaattttaaattgcttaataatgataagcttacgttgataggacacgatctgaaagattttttagtaaacatttcatactgcggtattgaacttaattgtaagattttagatacggccataatgacttatcttttaaatccgtctgagtcgaattacgacataagtcgcgtattgaaaaaatacttgaaagaggatttgcaaaacatagatgatatagtaggcaagggcaggaataaaaagagctacgatgacattgacaaaaagcttttagtcgattatatgtgttcagccgcatcaaacttatctaagttaaaagataagctcatgtcatttataaaagagatggagatggaagatcttttaaaaaatgtggaaattccgcttattgaagtgctaaaatctatggaggtgtacggctttacattagataaagatgtacttagaagtatttctaaagaaatagatgaaaagacagataagattgtaaaagatatttacgatgctgctggatacgaatttaatattaactctacaaagcagttatcagaatttttgtttgataaactgaatttgccagcaataaaaaagactaaaacagggtattcgactgacatggaagtccttgcagaacttataccgtacaatgacatagtaggagaaataatagaatatagacagcttatgaagcttaaatctacgtacatagatggcttcattcccatcatggatgaaaataatagggtccactctacgtttaaacaaacagttgctgctacagggagaattagctcaacagagcctaatctgcagaacatacctgtaagagaagaatttggcaggaggataagaaaggcatttgtatcaagttatgaagatgggcttataatatctgctgattattctcagattgagctaagggttcttgcacatctttcagaggatgaaaaacttattgagtcatttttgaacaacgaagatatacatttaaggacggcatcggaggtttttaaggtttcgaaagaagaagtgacaagtgaaatgagaaggcgggcgaaagctgtcaactttggtattgtatatggtataagcgattacggcttatctaaagacttaaagatttcgcgaaaagaagcgaaagaatacatagacaattattttgacaggtacaagggcgtcaaaaattacatcgactcaattgtcaaatttgcaaaggaaaatgggtatgttacgactatcttaaataggagagaatacataccggaaatcaattcaaaaaattttaaccaaagatcttttggcgagagaatggcaatgaatacacctattcaaggtagcgctgcggatataataaagatgtcgatggttaaagtatacaatgaattaaaggaaagaggattgaaatcaagacttattcttcaggtgcacgatgagcttataattgacacacatcctgatgaagttgaaatagtcaaggagcttctaaaatcaataatggaaaatatcataaagttgaaagttcctttagttgtagatatagggcaagggaaaaactggtatgatgcaaaataaaaggatcc

SEQ ID NO: 574 - DNA, 2678 bp, Artificial Sequence
  Description of Artificial Sequence: Synthetic Clostridium thermosulfurogenes DNA Polymerase R784Q
atgaaatacctgctgccgaccgctgctgctggtctgctgctcctcgctgcccagccggcgatggccatggcgaaatttttgatcatagatggtaatagcttgatgtacagggcgtattttgccctgcctgatttgatgaacagcgaaggaatgcatacaaatgccatatacggtttttcaatgatgcttcttaaattgctggaggaggagaaaccagactacatagcaatagctttcgataaaaaggcttctacatttaggcacaaggagtacagtgcttataaaggaacccgccagtcgatgccagaagagctgatagaacaggtggatattttaaaagatgtgataaatgcatttaacataaagaccatcgagatagagggatttgaagcagatgatatcattggtacagtatcaaaaattgcttccgaaagtgggatggatgtgcttatcgtcacaggcgacagagatgcgcttcagcttgtgtcggcaaatgtaaaagtaaaaatatgtaaaaaaggcataacgcagatggatgagtacgatgaaaaggcggtctttgaaaagtatgaagtgacgccgcttcaattcatagacttgaaagggcttatgggagacaaatcagacaacattccaggagtgcccaatataggggagaagacggccataaagcttgttaaagaatttggatcaattgaaaatttactgatgaatacagataagttaaaagggaaaataaaagaaaatgtagaaaacaatgcagaattagctgttttaagcaaacggcttgctacgattgagagaaatgttcctattgatattgatttgaatgaatacgcggttaaaaattacgatgtcaataagcttacagagctatttgaaaaattggaattttcaagcctcatctcagatttaaaagatgatagtcgtgatacaaaggatattaaagaatggcctgtaagagattttacatacgttaaaaatgttttaggaaagtttgatgttttgtcattgtatccattcatatatgatggaaagataaaagcagtatcatttgcttgcggtgacggatcgttttttgtagagattgatgattatgacaattttaaattgcttaataatgataagcttacgttgataggacacgatctgaaagattttttagtaaacatttcatactgcggtattgaacttaattgtaagattttagatacggccataatgacttatcttttaaatccgtctgagtcgaattacgacataagtcgcgtattgaaaaaatacttgaaagaggatttgcaaaacatagatgatatagtaggcaagggcaggaataaaaagagctacgatgacattgacaaaaagcttttagtcgattatatgtgttcagccgcatcaaacttatctaagttaaaagataagctcatgtcatttataaaagagatggagatggaagatcttttaaaaaatgtggaaattccgcttattgaagtgctaaaatctatggaggtgtacggctttacattagataaagatgtacttagaagtatttctaaagaaatagatgaaaagacagataagattgtaaaagatatttacgatgctgctggatacgaatttaatattaactctacaaagcagttatcagaatttttgtttgataaactgaatttgccagcaataaaaaagactaaaacagggtattcgactgacatggaagtccttgcagaacttataccgtacaatgacatagtaggagaaataatagaatatagacagcttatgaagcttaaatctacgtacatagatggcttcattcccatcatggatgaaaataatagggtccactctacgtttaaacaaacagttgctgctacagggagaattagctcaacagagcctaatctgcagaacatacctgtaagagaagaatttggcaggaggataagaaaggcatttgtatcaagttatgaagatgggcttataatatctgctgattattctcagattgagctaagggttcttgcacatctttcagaggatgaaaaacttattgagtcatttttgaacaacgaagatatacatttaaggacggcatcggaggtttttaaggtttcgaaagaagaagtgacaagtgaaatgagaaggcgggcgaaagctgtcaactttggtattgtatatggtataagcgattacggcttatctaaagacttaaagatttcgcgaaaagaagcgaaagaatacatagacaattattttgacaggtacaagggcgtcaaaaattacatcgactcaattgtcaaatttgcaaaggaaaatgggtatgttacgactatcttaaataggagacaatacataccggaaatcaattcaaaaaattttaaccaaagatcttttggcgagagaatggcaatgaatacacctattcaaggtagcgctgcggatataataaagatgtcgatggttaaagtatacaatgaattaaaggaaagaggattgaaatcaagacttattcttcaggtgcacgatgagcttataattgacacacatcctgatgaagttgaaatagtcaaggagcttctaaaatcaataatggaaaatatcataaagttgaaagttcctttagttgtagatatagggcaagggaaaaactggtatgatgcaaaataaaaggatcc

SEQ ID NO: 575 - DNA, 2678 bp, Artificial Sequence
  Description of Artificial Sequence: Synthetic Clostridium thermosulfurogenes DNA Polymerase R784G
atgaaatacctgctgccgaccgctgctgctggtctgctgctcctcgctgcccagccggcgatggccatggcgaaatttttgatcatagatggtaatagcttgatgtacagggcgtattttgccctgcctgatttgatgaacagcgaaggaatgcatacaaatgccatatacggtttttcaatgatgcttcttaaattgctggaggaggagaaaccagactacatagcaatagctttcgataaaaaggcttctacatttaggcacaaggagtacagtgcttataaaggaacccgccagtcgatgccagaagagctgatagaacaggtggatattttaaaagatgtgataaatgcatttaacataaagaccatcgagatagagggatttgaagcagatgatatcattggtacagtatcaaaaattgcttccgaaagtgggatggatgtgcttatcgtcacaggcgacagagatgcgcttcagcttgtgtcggcaaatgtaaaagtaaaaatatgtaaaaaaggcataacgcagatggatgagtacgatgaaaaggcggtctttgaaaagtatgaagtgacgccgcttcaattcatagacttgaaagggcttatgggagacaaatcagacaacattccaggagtgcccaatataggggagaagacggccataaagcttgttaaagaatttggatcaattgaaaatttactgatgaatacagataagttaaaagggaaaataaaagaaaatgtagaaaacaatgcagaattagctgttttaagcaaacggcttgctacgattgagagaaatgttcctattgatattgatttgaatgaatacgcggttaaaaattacgatgtcaataagcttacagagctatttgaaaaattggaattttcaagcctcatctcagatttaaaagatgatagtcgtgatacaaaggatattaaagaatggcctgtaagagattttacatacgttaaaaatgttttaggaaagtttgatgttttgtcattgtatccattcatatatgatggaaagataaaagcagtatcatttgcttgcggtgacggatcgttttttgtagagattgatgattatgacaattttaaattgcttaataatgataagcttacgttgataggacacgatctgaaagattttttagtaaacatttcatactgcggtattgaacttaattgtaagattttagatacggccataatgacttatcttttaaatccgtctgagtcgaattacgacataagtcgcgtattgaaaaaatacttgaaagaggatttgcaaaacatagatgatatagtaggcaagggcaggaataaaaagagctacgatgacattgacaaaaagcttttagtcgattatatgtgttcagccgcatcaaacttatctaagttaaaagataagctcatgtcatttataaaagagatggagatggaagatcttttaaaaaatgtggaaattccgcttattgaagtgctaaaatctatggaggtgtacggctttacattagataaagatgtacttagaagtatttctaaagaaatagatgaaaagacagataagattgtaaaagatatttacgatgctgctggatacgaatttaatattaactctacaaagcagttatcagaatttttgtttgataaactgaatttgccagcaataaaaaagactaaaacagggtattcgactgacatggaagtccttgcagaacttataccgtacaatgacatagtaggagaaataatagaatatagacagcttatgaagcttaaatctacgtacatagatggcttcattcccatcatggatgaaaataatagggtccactctacgtttaaacaaacagttgctgctacagggagaattagctcaacagagcctaatctgcagaacatacctgtaagagaagaatttggcaggaggataagaaaggcatttgtatcaagttatgaagatgggcttataatatctgctgattattctcagattgagctaagggttcttgcacatctttcagaggatgaaaaacttattgagtcatttttgaacaacgaagatatacatttaaggacggcatcggaggtttttaaggtttcgaaagaagaagtgacaagtgaaatgagaaggcgggcgaaagctgtcaactttggtattgtatatggtataagcgattacggcttatctaaagacttaaagatttcgcgaaaagaagcgaaagaatacatagacaattattttgacaggtacaagggcgtcaaaaattacatcgactcaattgtcaaatttgcaaaggaaaatgggtatgttacgactatcttaaataggagaggttacataccggaaatcaattcaaaaaattttaaccaaagatcttttggcgagagaatggcaatgaatacacctattcaaggtagcgctgcggatataataaagatgtcgatggttaaagtatacaatgaattaaaggaaagaggattgaaatcaagacttattcttcaggtgcacgatgagcttataattgacacacatcctgatgaagttgaaatagtcaaggagcttctaaaatcaataatggaaaatatcataaagttgaaagttcctttagttgtagatatagggcaagggaaaaactggtatgatgcaaaataaaaggatcc

SEQ ID NO: 576 - DNA, 2678 bp, Artificial Sequence
  Description of Artificial Sequence: Synthetic Clostridium thermosulfurogenes DNA Polymerase R784H
atgaaatacctgctgccgaccgctgctgctggtctgctgctcctcgctgcccagccggcgatggccatggcgaaatttttgatcatagatggtaatagcttgatgtacagggcgtattttgccctgcctgatttgatgaacagcgaaggaatgcatacaaatgccatatacggtttttcaatgatgcttcttaaattgctggaggaggagaaaccagactacatagcaatagctttcgataaaaaggcttctacatttaggcacaaggagtacagtgcttataaaggaacccgccagtcgatgccagaagagctgatagaacaggtggatattttaaaagatgtgataaatgcatttaacataaagaccatcgagatagagggatttgaagcagatgatatcattggtacagtatcaaaaattgcttccgaaagtgggatggatgtgcttatcgtcacaggcgacagagatgcgcttcagcttgtgtcggcaaatgtaaaagtaaaaatatgtaaaaaaggcataacgcagatggatgagtacgatgaaaaggcggtctttgaaaagtatgaagtgacgccgcttcaattcatagacttgaaagggcttatgggagacaaatcagacaacattccaggagtgcccaatataggggagaagacggccataaagcttgttaaagaatttggatcaattgaaaatttactgatgaatacagataagttaaaagggaaaataaaagaaaatgtagaaaacaatgcagaattagctgttttaagcaaacggcttgctacgattgagagaaatgttcctattgatattgatttgaatgaatacgcggttaaaaattacgatgtcaataagcttacagagctatttgaaaaattggaattttcaagcctcatctcagatttaaaagatgatagtcgtgatacaaaggatattaaagaatggcctgtaagagattttacatacgttaaaaatgttttaggaaagtttgatgttttgtcattgtatccattcatatatgatggaaagataaaagcagtatcatttgcttgcggtgacggatcgttttttgtagagattgatgattatgacaattttaaattgcttaataatgataagcttacgttgataggacacgatctgaaagattttttagtaaacatttcatactgcggtattgaacttaattgtaagattttagatacggccataatgacttatcttttaaatccgtctgagtcgaattacgacataagtcgcgtattgaaaaaatacttgaaagaggatttgcaaaacatagatgatatagtaggcaagggcaggaataaaaagagctacgatgacattgacaaaaagcttttagtcgattatatgtgttcagccgcatcaaacttatctaagttaaaagataagctcatgtcatttataaaagagatggagatggaagatcttttaaaaaatgtggaaattccgcttattgaagtgctaaaatctatggaggtgtacggctttacattagataaagatgtacttagaagtatttctaaagaaatagatgaaaagacagataagattgtaaaagatatttacgatgctgctggatacgaatttaatattaactctacaaagcagttatcagaatttttgtttgataaactgaatttgccagcaataaaaaagactaaaacagggtattcgactgacatggaagtccttgcagaacttataccgtacaatgacatagtaggagaaataatagaatatagacagcttatgaagcttaaatctacgtacatagatggcttcattcccatcatggatgaaaataatagggtccactctacgtttaaacaaacagttgctgctacagggagaattagctcaacagagcctaatctgcagaacatacctgtaagagaagaatttggcaggaggataagaaaggcatttgtatcaagttatgaagatgggcttataatatctgctgattattctcagattgagctaagggttcttgcacatctttcagaggatgaaaaacttattgagtcatttttgaacaacgaagatatacatttaaggacggcatcggaggtttttaaggtttcgaaagaagaagtgacaagtgaaatgagaaggcgggcgaaagctgtcaactttggtattgtatatggtataagcgattacggcttatctaaagacttaaagatttcgcgaaaagaagcgaaagaatacatagacaattattttgacaggtacaagggcgtcaaaaattacatcgactcaattgtcaaatttgcaaaggaaaatgggtatgttacgactatcttaaataggagacattacataccggaaatcaattcaaaaaattttaaccaaagatcttttggcgagagaatggcaatgaatacacctattcaaggtagcgctgcggatataataaagatgtcgatggttaaagtatacaatgaattaaaggaaagaggattgaaatcaagacttattcttcaggtgcacgatgagcttataattgacacacatcctgatgaagttgaaatagtcaaggagcttctaaaatcaataatggaaaatatcataaagttgaaagttcctttagttgtagatatagggcaagggaaaaactggtatgatgcaaaataaaaggatcc

SEQ ID NO: 577 - DNA, 2678 bp, Artificial Sequence
  Description of Artificial Sequence: Synthetic Clostridium thermosulfurogenes DNA Polymerase R784I
atgaaatacctgctgccgaccgctgctgctggtctgctgctcctcgctgcccagccggcgatggccatggcgaaatttttgatcatagatggtaatagcttgatgtacagggcgtattttgccctgcctgatttgatgaacagcgaaggaatgcatacaaatgccatatacggtttttcaatgatgcttcttaaattgctggaggaggagaaaccagactacatagcaatagctttcgataaaaaggcttctacatttaggcacaaggagtacagtgcttataaaggaacccgccagtcgatgccagaagagctgatagaacaggtggatattttaaaagatgtgataaatgcatttaacataaagaccatcgagatagagggatttgaagcagatgatatcattggtacagtatcaaaaattgcttccgaaagtgggatggatgtgcttatcgtcacaggcgacagagatgcgcttcagcttgtgtcggcaaatgtaaaagtaaaaatatgtaaaaaaggcataacgcagatggatgagtacgatgaaaaggcggtctttgaaaagtatgaagtgacgccgcttcaattcatagacttgaaagggcttatgggagacaaatcagacaacattccaggagtgcccaatataggggagaagacggccataaagcttgttaaagaatttggatcaattgaaaatttactgatgaatacagataagttaaaagggaaaataaaagaaaatgtagaaaacaatgcagaattagctgttttaagcaaacggcttgctacgattgagagaaatgttcctattgatattgatttgaatgaatacgcggttaaaaattacgatgtcaataagcttacagagctatttgaaaaattggaattttcaagcctcatctcagatttaaaagatgatagtcgtgatacaaaggatattaaagaatggcctgtaagagattttacatacgttaaaaatgttttaggaaagtttgatgttttgtcattgtatccattcatatatgatggaaagataaaagcagtatcatttgcttgcggtgacggatcgttttttgtagagattgatgattatgacaattttaaattgcttaataatgataagcttacgttgataggacacgatctgaaagattttttagtaaacatttcatactgcggtattgaacttaattgtaagattttagatacggccataatgacttatcttttaaatccgtctgagtcgaattacgacataagtcgcgtattgaaaaaatacttgaaagaggatttgcaaaacatagatgatatagtaggcaagggcaggaataaaaagagctacgatgacattgacaaaaagcttttagtcgattatatgtgttcagccgcatcaaacttatctaagttaaaagataagctcatgtcatttataaaagagatggagatggaagatcttttaaaaaatgtggaaattccgcttattgaagtgctaaaatctatggaggtgtacggctttacattagataaagatgtacttagaagtatttctaaagaaatagatgaaaagacagataagattgtaaaagatatttacgatgctgctggatacgaatttaatattaactctacaaagcagttatcagaatttttgtttgataaactgaatttgccagcaataaaaaagactaaaacagggtattcgactgacatggaagtccttgcagaacttataccgtacaatgacatagtaggagaaataatagaatatagacagcttatgaagcttaaatctacgtacatagatggcttcattcccatcatggatgaaaataatagggtccactctacgtttaaacaaacagttgctgctacagggagaattagctcaacagagcctaatctgcagaacatacctgtaagagaagaatttggcaggaggataagaaaggcatttgtatcaagttatgaagatgggcttataatatctgctgattattctcagattgagctaagggttcttgcacatctttcagaggatgaaaaacttattgagtcatttttgaacaacgaagatatacatttaaggacggcatcggaggtttttaaggtttcgaaagaagaagtgacaagtgaaatgagaaggcgggcgaaagctgtcaactttggtattgtatatggtataagcgattacggcttatctaaagacttaaagatttcgcgaaaagaagcgaaagaatacatagacaattattttgacaggtacaagggcgtcaaaaattacatcgactcaattgtcaaatttgcaaaggaaaatgggtatgttacgactatcttaaataggagaatttacataccggaaatcaattcaaaaaattttaaccaaagatcttttggcgagagaatggcaatgaatacacctattcaaggtagcgctgcggatataataaagatgtcgatggttaaagtatacaatgaattaaaggaaagaggattgaaatcaagacttattcttcaggtgcacgatgagcttataattgacacacatcctgatgaagttgaaatagtcaaggagcttctaaaatcaataatggaaaatatcataaagttgaaagttcctttagttgtagatatagggcaagggaaaaactggtatgatgcaaaataaaaggatcc

SEQ ID NO: 578 - DNA, 2678 bp, Artificial Sequence
  Description of Artificial Sequence: Synthetic Clostridium thermosulfurogenes DNA Polymerase R784L
atgaaatacctgctgccgaccgctgctgctggtctgctgctcctcgctgcccagccggcgatggccatggcgaaatttttgatcatagatggtaatagcttgatgtacagggcgtattttgccctgcctgatttgatgaacagcgaaggaatgcatacaaatgccatatacggtttttcaatgatgcttcttaaattgctggaggaggagaaaccagactacatagcaatagctttcgataaaaaggcttctacatttaggcacaaggagtacagtgcttataaaggaacccgccagtcgatgccagaagagctgatagaacaggtggatattttaaaagatgtgataaatgcatttaacataaagaccatcgagatagagggatttgaagcagatgatatcattggtacagtatcaaaaattgcttccgaaagtgggatggatgtgcttatcgtcacaggcgacagagatgcgcttcagcttgtgtcggcaaatgtaaaagtaaaaatatgtaaaaaaggcataacgcagatggatgagtacgatgaaaaggcggtctttgaaaagtatgaagtgacgccgcttcaattcatagacttgaaagggcttatgggagacaaatcagacaacattccaggagtgcccaatataggggagaagacggccataaagcttgttaaagaatttggatcaattgaaaatttactgatgaatacagataagttaaaagggaaaataaaagaaaatgtagaaaacaatgcagaattagctgttttaagcaaacggcttgctacgattgagagaaatgttcctattgatattgatttgaatgaatacgcggttaaaaattacgatgtcaataagcttacagagctatttgaaaaattggaattttcaagcctcatctcagatttaaaagatgatagtcgtgatacaaaggatattaaagaatggcctgtaagagattttacatacgttaaaaatgttttaggaaagtttgatgttttgtcattgtatccattcatatatgatggaaagataaaagcagtatcatttgcttgcggtgacggatcgttttttgtagagattgatgattatgacaattttaaattgcttaataatgataagcttacgttgataggacacgatctgaaagattttttagtaaacatttcatactgcggtattgaacttaattgtaagattttagatacggccataatgacttatcttttaaatccgtctgagtcgaattacgacataagtcgcgtattgaaaaaatacttgaaagaggatttgcaaaacatagatgatatagtaggcaagggcaggaataaaaagagctacgatgacattgacaaaaagcttttagtcgattatatgtgttcagccgcatcaaacttatctaagttaaaagataagctcatgtcatttataaaagagatggagatggaagatcttttaaaaaatgtggaaattccgcttattgaagtgctaaaatctatggaggtgtacggctttacattagataaagatgtacttagaagtatttctaaagaaatagatgaaaagacagataagattgtaaaagatatttacgatgctgctggatacgaatttaatattaactctacaaagcagttatcagaatttttgtttgataaactgaatttgccagcaataaaaaagactaaaacagggtattcgactgacatggaagtccttgcagaacttataccgtacaatgacatagtaggagaaataatagaatatagacagcttatgaagcttaaatctacgtacatagatggcttcattcccatcatggatgaaaataatagggtccactctacgtttaaacaaacagttgctgctacagggagaattagctcaacagagcctaatctgcagaacatacctgtaagagaagaatttggcaggaggataagaaaggcatttgtatcaagttatgaagatgggcttataatatctgctgattattctcagattgagctaagggttcttgcacatctttcagaggatgaaaaacttattgagtcatttttgaacaacgaagatatacatttaaggacggcatcggaggtttttaaggtttcgaaagaagaagtgacaagtgaaatgagaaggcgggcgaaagctgtcaactttggtattgtatatggtataagcgattacggcttatctaaagacttaaagatttcgcgaaaagaagcgaaagaatacatagacaattattttgacaggtacaagggcgtcaaaaattacatcgactcaattgtcaaatttgcaaaggaaaatgggtatgttacgactatcttaaataggagactttacataccggaaatcaattcaaaaaattttaaccaaagatcttttggcgagagaatggcaatgaatacacctattcaaggtagcgctgcggatataataaagatgtcgatggttaaagtatacaatgaattaaaggaaagaggattgaaatcaagacttattcttcaggtgcacgatgagcttataattgacacacatcctgatgaagttgaaatagtcaaggagcttctaaaatcaataatggaaaatatcataaagttgaaagttcctttagttgtagatatagggcaagggaaaaactggtatgatgcaaaataaaaggatcc

SEQ ID NO: 579 - DNA, 2678 bp, Artificial Sequence
  Description of Artificial Sequence: Synthetic Clostridium thermosulfurogenes DNA Polymerase R784K
atgaaatacctgctgccgaccgctgctgctggtctgctgctcctcgctgcccagccggcgatggccatggcgaaatttttgatcatagatggtaatagcttgatgtacagggcgtattttgccctgcctgatttgatgaacagcgaaggaatgcatacaaatgccatatacggtttttcaatgatgcttcttaaattgctggaggaggagaaaccagactacatagcaatagctttcgataaaaaggcttctacatttaggcacaaggagtacagtgcttataaaggaacccgccagtcgatgccagaagagctgatagaacaggtggatattttaaaagatgtgataaatgcatttaacataaagaccatcgagatagagggatttgaagcagatgatatcattggtacagtatcaaaaattgcttccgaaagtgggatggatgtgcttatcgtcacaggcgacagagatgcgcttcagcttgtgtcggcaaatgtaaaagtaaaaatatgtaaaaaaggcataacgcagatggatgagtacgatgaaaaggcggtctttgaaaagtatgaagtgacgccgcttcaattcatagacttgaaagggcttatgggagacaaatcagacaacattccaggagtgcccaatataggggagaagacggccataaagcttgttaaagaatttggatcaattgaaaatttactgatgaatacagataagttaaaagggaaaataaaagaaaatgtagaaaacaatgcagaattagctgttttaagcaaacggcttgctacgattgagagaaatgttcctattgatattgatttgaatgaatacgcggttaaaaattacgatgtcaataagcttacagagctatttgaaaaattggaattttcaagcctcatctcagatttaaaagatgatagtcgtgatacaaaggatattaaagaatggcctgtaagagattttacatacgttaaaaatgttttaggaaagtttgatgttttgtcattgtatccattcatatatgatggaaagataaaagcagtatcatttgcttgcggtgacggatcgttttttgtagagattgatgattatgacaattttaaattgcttaataatgataagcttacgttgataggacacgatctgaaagattttttagtaaacatttcatactgcggtattgaacttaattgtaagattttagatacggccataatgacttatcttttaaatccgtctgagtcgaattacgacataagtcgcgtattgaaaaaatacttgaaagaggatttgcaaaacatagatgatatagtaggcaagggcaggaataaaaagagctacgatgacattgacaaaaagcttttagtcgattatatgtgttcagccgcatcaaacttatctaagttaaaagataagctcatgtcatttataaaagagatggagatggaagatcttttaaaaaatgtggaaattccgcttattgaagtgctaaaatctatggaggtgtacggctttacattagataaagatgtacttagaagtatttctaaagaaatagatgaaaagacagataagattgtaaaagatatttacgatgctgctggatacgaatttaatattaactctacaaagcagttatcagaatttttgtttgataaactgaatttgccagcaataaaaaagactaaaacagggtattcgactgacatggaagtccttgcagaacttataccgtacaatgacatagtaggagaaataatagaatatagacagcttatgaagcttaaatctacgtacatagatggcttcattcccatcatggatgaaaataatagggtccactctacgtttaaacaaacagttgctgctacagggagaattagctcaacagagcctaatctgcagaacatacctgtaagagaagaatttggcaggaggataagaaaggcatttgtatcaagttatgaagatgggcttataatatctgctgattattctcagattgagctaagggttcttgcacatctttcagaggatgaaaaacttattgagtcatttttgaacaacgaagatatacatttaaggacggcatcggaggtttttaaggtttcgaaagaagaagtgacaagtgaaatgagaaggcgggcgaaagctgtcaactttggtattgtatatggtataagcgattacggcttatctaaagacttaaagatttcgcgaaaagaagcgaaagaatacatagacaattattttgacaggtacaagggcgtcaaaaattacatcgactcaattgtcaaatttgcaaaggaaaatgggtatgttacgactatcttaaataggagaaaatacataccggaaatcaattcaaaaaattttaaccaaagatcttttggcgagagaatggcaatgaatacacctattcaaggtagcgctgcggatataataaagatgtcgatggttaaagtatacaatgaattaaaggaaagaggattgaaatcaagacttattcttcaggtgcacgatgagcttataattgacacacatcctgatgaagttgaaatagtcaaggagcttctaaaatcaataatggaaaatatcataaagttgaaagttcctttagttgtagatatagggcaagggaaaaactggtatgatgcaaaataaaaggatcc

SEQ ID NO: 580 - DNA, 2678 bp, Artificial Sequence
  Description of Artificial Sequence: Synthetic Clostridium thermosulfurogenes DNA Polymerase R784M
atgaaatacctgctgccgaccgctgctgctggtctgctgctcctcgctgcccagccggcgatggccatggcgaaatttttgatcatagatggtaatagcttgatgtacagggcgtattttgccctgcctgatttgatgaacagcgaaggaatgcatacaaatgccatatacggtttttcaatgatgcttcttaaattgctggaggaggagaaaccagactacatagcaatagctttcgataaaaaggcttctacatttaggcacaaggagtacagtgcttataaaggaacccgccagtcgatgccagaagagctgatagaacaggtggatattttaaaagatgtgataaatgcatttaacataaagaccatcgagatagagggatttgaagcagatgatatcattggtacagtatcaaaaattgcttccgaaagtgggatggatgtgcttatcgtcacaggcgacagagatgcgcttcagcttgtgtcggcaaatgtaaaagtaaaaatatgtaaaaaaggcataacgcagatggatgagtacgatgaaaaggcggtctttgaaaagtatgaagtgacgccgcttcaattcatagacttgaaagggcttatgggagacaaatcagacaacattccaggagtgcccaatataggggagaagacggccataaagcttgttaaagaatttggatcaattgaaaatttactgatgaatacagataagttaaaagggaaaataaaagaaaatgtagaaaacaatgcagaattagctgttttaagcaaacggcttgctacgattgagagaaatgttcctattgatattgatttgaatgaatacgcggttaaaaattacgatgtcaataagcttacagagctatttgaaaaattggaattttcaagcctcatctcagatttaaaagatgatagtcgtgatacaaaggatattaaagaatggcctgtaagagattttacatacgttaaaaatgttttaggaaagtttgatgttttgtcattgtatccattcatatatgatggaaagataaaagcagtatcatttgcttgcggtgacggatcgttttttgtagagattgatgattatgacaattttaaattgcttaataatgataagcttacgttgataggacacgatctgaaagattttttagtaaacatttcatactgcggtattgaacttaattgtaagattttagatacggccataatgacttatcttttaaatccgtctgagtcgaattacgacataagtcgcgtattgaaaaaatacttgaaagaggatttgcaaaacatagatgatatagtaggcaagggcaggaataaaaagagctacgatgacattgacaaaaagcttttagtcgattatatgtgttcagccgcatcaaacttatctaagttaaaagataagctcatgtcatttataaaagagatggagatggaagatcttttaaaaaatgtggaaattccgcttattgaagtgctaaaatctatggaggtgtacggctttacattagataaagatgtacttagaagtatttctaaagaaatagatgaaaagacagataagattgtaaaagatatttacgatgctgctggatacgaatttaatattaactctacaaagcagttatcagaatttttgtttgataaactgaatttgccagcaataaaaaagactaaaacagggtattcgactgacatggaagtccttgcagaacttataccgtacaatgacatagtaggagaaataatagaatatagacagcttatgaagcttaaatctacgtacatagatggcttcattcccatcatggatgaaaataatagggtccactctacgtttaaacaaacagttgctgctacagggagaattagctcaacagagcctaatctgcagaacatacctgtaagagaagaatttggcaggaggataagaaaggcatttgtatcaagttatgaagatgggcttataatatctgctgattattctcagattgagctaagggttcttgcacatctttcagaggatgaaaaacttattgagtcatttttgaacaacgaagatatacatttaaggacggcatcggaggtttttaaggtttcgaaagaagaagtgacaagtgaaatgagaaggcgggcgaaagctgtcaactttggtattgtatatggtataagcgattacggcttatctaaagacttaaagatttcgcgaaaagaagcgaaagaatacatagacaattattttgacaggtacaagggcgtcaaaaattacatcgactcaattgtcaaatttgcaaaggaaaatgggtatgttacgactatcttaaataggagaatgtacataccggaaatcaattcaaaaaattttaaccaaagatcttttggcgagagaatggcaatgaatacacctattcaaggtagcgctgcggatataataaagatgtcgatggttaaagtatacaatgaattaaaggaaagaggattgaaatcaagacttattcttcaggtgcacgatgagcttataattgacacacatcctgatgaagttgaaatagtcaaggagcttctaaaatcaataatggaaaatatcataaagttgaaagttcctttagttgtagatatagggcaagggaaaaactggtatgatgcaaaataaaaggatcc

SEQ ID NO: 581 - DNA, 2678 bp, Artificial Sequence
  Description of Artificial Sequence: Synthetic Clostridium thermosulfurogenes DNA Polymerase R784F
atgaaatacctgctgccgaccgctgctgctggtctgctgctcctcgctgcccagccggcgatggccatggcgaaatttttgatcatagatggtaatagcttgatgtacagggcgtattttgccctgcctgatttgatgaacagcgaaggaatgcatacaaatgccatatacggtttttcaatgatgcttcttaaattgctggaggaggagaaaccagactacatagcaatagctttcgataaaaaggcttctacatttaggcacaaggagtacagtgcttataaaggaacccgccagtcgatgccagaagagctgatagaacaggtggatattttaaaagatgtgataaatgcatttaacataaagaccatcgagatagagggatttgaagcagatgatatcattggtacagtatcaaaaattgcttccgaaagtgggatggatgtgcttatcgtcacaggcgacagagatgcgcttcagcttgtgtcggcaaatgtaaaagtaaaaatatgtaaaaaaggcataacgcagatggatgagtacgatgaaaaggcggtctttgaaaagtatgaagtgacgccgcttcaattcatagacttgaaagggcttatgggagacaaatcagacaacattccaggagtgcccaatataggggagaagacggccataaagcttgttaaagaatttggatcaattgaaaatttactgatgaatacagataagttaaaagggaaaataaaagaaaatgtagaaaacaatgcagaattagctgttttaagcaaacggcttgctacgattgagagaaatgttcctattgatattgatttgaatgaatacgcggttaaaaattacgatgtcaataagcttacagagctatttgaaaaattggaattttcaagcctcatctcagatttaaaagatgatagtcgtgatacaaaggatattaaagaatggcctgtaagagattttacatacgttaaaaatgttttaggaaagtttgatgttttgtcattgtatccattcatatatgatggaaagataaaagcagtatcatttgcttgcggtgacggatcgttttttgtagagattgatgattatgacaattttaaattgcttaataatgataagcttacgttgataggacacgatctgaaagattttttagtaaacatttcatactgcggtattgaacttaattgtaagattttagatacggccataatgacttatcttttaaatccgtctgagtcgaattacgacataagtcgcgtattgaaaaaatacttgaaagaggatttgcaaaacatagatgatatagtaggcaagggcaggaataaaaagagctacgatgacattgacaaaaagcttttagtcgattatatgtgttcagccgcatcaaacttatctaagttaaaagataagctcatgtcatttataaaagagatggagatggaagatcttttaaaaaatgtggaaattccgcttattgaagtgctaaaatctatggaggtgtacggctttacattagataaagatgtacttagaagtatttctaaagaaatagatgaaaagacagataagattgtaaaagatatttacgatgctgctggatacgaatttaatattaactctacaaagcagttatcagaatttttgtttgataaactgaatttgccagcaataaaaaagactaaaacagggtattcgactgacatggaagtccttgcagaacttataccgtacaatgacatagtaggagaaataatagaatatagacagcttatgaagcttaaatctacgtacatagatggcttcattcccatcatggatgaaaataatagggtccactctacgtttaaacaaacagttgctgctacagggagaattagctcaacagagcctaatctgcagaacatacctgtaagagaagaatttggcaggaggataagaaaggcatttgtatcaagttatgaagatgggcttataatatctgctgattattctcagattgagctaagggttcttgcacatctttcagaggatgaaaaacttattgagtcatttttgaacaacgaagatatacatttaaggacggcatcggaggtttttaaggtttcgaaagaagaagtgacaagtgaaatgagaaggcgggcgaaagctgtcaactttggtattgtatatggtataagcgattacggcttatctaaagacttaaagatttcgcgaaaagaagcgaaagaatacatagacaattattttgacaggtacaagggcgtcaaaaattacatcgactcaattgtcaaatttgcaaaggaaaatgggtatgttacgactatcttaaataggagattttacataccggaaatcaattcaaaaaattttaaccaaagatcttttggcgagagaatggcaatgaatacacctattcaaggtagcgctgcggatataataaagatgtcgatggttaaagtatacaatgaattaaaggaaagaggattgaaatcaagacttattcttcaggtgcacgatgagcttataattgacacacatcctgatgaagttgaaatagtcaaggagcttctaaaatcaataatggaaaatatcataaagttgaaagttcctttagttgtagatatagggcaagggaaaaactggtatgatgcaaaataaaaggatcc

SEQ ID NO: 582 - DNA, 2678 bp, Artificial Sequence
  Description of Artificial Sequence: Synthetic Clostridium thermosulfurogenes DNA Polymerase R784P
atgaaatacctgctgccgaccgctgctgctggtctgctgctcctcgctgcccagccggcgatggccatggcgaaatttttgatcatagatggtaatagcttgatgtacagggcgtattttgccctgcctgatttgatgaacagcgaaggaatgcatacaaatgccatatacggtttttcaatgatgcttcttaaattgctggaggaggagaaaccagactacatagcaatagctttcgataaaaaggcttctacatttaggcacaaggagtacagtgcttataaaggaacccgccagtcgatgccagaagagctgatagaacaggtggatattttaaaagatgtgataaatgcatttaacataaagaccatcgagatagagggatttgaagcagatgatatcattggtacagtatcaaaaattgcttccgaaagtgggatggatgtgcttatcgtcacaggcgacagagatgcgcttcagcttgtgtcggcaaatgtaaaagtaaaaatatgtaaaaaaggcataacgcagatggatgagtacgatgaaaaggcggtctttgaaaagtatgaagtgacgccgcttcaattcatagacttgaaagggcttatgggagacaaatcagacaacattccaggagtgcccaatataggggagaagacggccataaagcttgttaaagaatttggatcaattgaaaatttactgatgaatacagataagttaaaagggaaaataaaagaaaatgtagaaaacaatgcagaattagctgttttaagcaaacggcttgctacgattgagagaaatgttcctattgatattgatttgaatgaatacgcggttaaaaattacgatgtcaataagcttacagagctatttgaaaaattggaattttcaagcctcatctcagatttaaaagatgatagtcgtgatacaaaggatattaaagaatggcctgtaagagattttacatacgttaaaaatgttttaggaaagtttgatgttttgtcattgtatccattcatatatgatggaaagataaaagcagtatcatttgcttgcggtgacggatcgttttttgtagagattgatgattatgacaattttaaattgcttaataatgataagcttacgttgataggacacgatctgaaagattttttagtaaacatttcatactgcggtattgaacttaattgtaagattttagatacggccataatgacttatcttttaaatccgtctgagtcgaattacgacataagtcgcgtattgaaaaaatacttgaaagaggatttgcaaaacatagatgatatagtaggcaagggcaggaataaaaagagctacgatgacattgacaaaaagcttttagtcgattatatgtgttcagccgcatcaaacttatctaagttaaaagataagctcatgtcatttataaaagagatggagatggaagatcttttaaaaaatgtggaaattccgcttattgaagtgctaaaatctatggaggtgtacggctttacattagataaagatgtacttagaagtatttctaaagaaatagatgaaaagacagataagattgtaaaagatatttacgatgctgctggatacgaatttaatattaactctacaaagcagttatcagaatttttgtttgataaactgaatttgccagcaataaaaaagactaaaacagggtattcgactgacatggaagtccttgcagaacttataccgtacaatgacatagtaggagaaataatagaatatagacagcttatgaagcttaaatctacgtacatagatggcttcattcccatcatggatgaaaataatagggtccactctacgtttaaacaaacagttgctgctacagggagaattagctcaacagagcctaatctgcagaacatacctgtaagagaagaatttggcaggaggataagaaaggcatttgtatcaagttatgaagatgggcttataatatctgctgattattctcagattgagctaagggttcttgcacatctttcagaggatgaaaaacttattgagtcatttttgaacaacgaagatatacatttaaggacggcatcggaggtttttaaggtttcgaaagaagaagtgacaagtgaaatgagaaggcgggcgaaagctgtcaactttggtattgtatatggtataagcgattacggcttatctaaagacttaaagatttcgcgaaaagaagcgaaagaatacatagacaattattttgacaggtacaagggcgtcaaaaattacatcgactcaattgtcaaatttgcaaaggaaaatgggtatgttacgactatcttaaataggagaccttacataccggaaatcaattcaaaaaattttaaccaaagatcttttggcgagagaatggcaatgaatacacctattcaaggtagcgctgcggatataataaagatgtcgatggttaaagtatacaatgaattaaaggaaagaggattgaaatcaagacttattcttcaggtgcacgatgagcttataattgacacacatcctgatgaagttgaaatagtcaaggagcttctaaaatcaataatggaaaatatcataaagttgaaagttcctttagttgtagatatagggcaagggaaaaactggtatgatgcaaaataaaaggatcc

SEQ ID NO: 583 - DNA, 2678 bp, Artificial Sequence
  Description of Artificial Sequence: Synthetic Clostridium thermosulfurogenes DNA Polymerase R784S
atgaaatacctgctgccgaccgctgctgctggtctgctgctcctcgctgcccagccggcgatggccatggcgaaatttttgatcatagatggtaatagcttgatgtacagggcgtattttgccctgcctgatttgatgaacagcgaaggaatgcatacaaatgccatatacggtttttcaatgatgcttcttaaattgctggaggaggagaaaccagactacatagcaatagctttcgataaaaaggcttctacatttaggcacaaggagtacagtgcttataaaggaacccgccagtcgatgccagaagagctgatagaacaggtggatattttaaaagatgtgataaatgcatttaacataaagaccatcgagatagagggatttgaagcagatgatatcattggtacagtatcaaaaattgcttccgaaagtgggatggatgtgcttatcgtcacaggcgacagagatgcgcttcagcttgtgtcggcaaatgtaaaagtaaaaatatgtaaaaaaggcataacgcagatggatgagtacgatgaaaaggcggtctttgaaaagtatgaagtgacgccgcttcaattcatagacttgaaagggcttatgggagacaaatcagacaacattccaggagtgcccaatataggggagaagacggccataaagcttgttaaagaatttggatcaattgaaaatttactgatgaatacagataagttaaaagggaaaataaaagaaaatgtagaaaacaatgcagaattagctgttttaagcaaacggcttgctacgattgagagaaatgttcctattgatattgatttgaatgaatacgcggttaaaaattacgatgtcaataagcttacagagctatttgaaaaattggaattttcaagcctcatctcagatttaaaagatgatagtcgtgatacaaaggatattaaagaatggcctgtaagagattttacatacgttaaaaatgttttaggaaagtttgatgttttgtcattgtatccattcatatatgatggaaagataaaagcagtatcatttgcttgcggtgacggatcgttttttgtagagattgatgattatgacaattttaaattgcttaataatgataagcttacgttgataggacacgatctgaaagattttttagtaaacatttcatactgcggtattgaacttaattgtaagattttagatacggccataatgacttatcttttaaatccgtctgagtcgaattacgacataagtcgcgtattgaaaaaatacttgaaagaggatttgcaaaacatagatgatatagtaggcaagggcaggaataaaaagagctacgatgacattgacaaaaagcttttagtcgattatatgtgttcagccgcatcaaacttatctaagttaaaagataagctcatgtcatttataaaagagatggagatggaagatcttttaaaaaatgtggaaattccgcttattgaagtgctaaaatctatggaggtgtacggctttacattagataaagatgtacttagaagtatttctaaagaaatagatgaaaagacagataagattgtaaaagatatttacgatgctgctggatacgaatttaatattaactctacaaagcagttatcagaatttttgtttgataaactgaatttgccagcaataaaaaagactaaaacagggtattcgactgacatggaagtccttgcagaacttataccgtacaatgacatagtaggagaaataatagaatatagacagcttatgaagcttaaatctacgtacatagatggcttcattcccatcatggatgaaaataatagggtccactctacgtttaaacaaacagttgctgctacagggagaattagctcaacagagcctaatctgcagaacatacctgtaagagaagaatttggcaggaggataagaaaggcatttgtatcaagttatgaagatgggcttataatatctgctgattattctcagattgagctaagggttcttgcacatctttcagaggatgaaaaacttattgagtcatttttgaacaacgaagatatacatttaaggacggcatcggaggtttttaaggtttcgaaagaagaagtgacaagtgaaatgagaaggcgggcgaaagctgtcaactttggtattgtatatggtataagcgattacggcttatctaaagacttaaagatttcgcgaaaagaagcgaaagaatacatagacaattattttgacaggtacaagggcgtcaaaaattacatcgactcaattgtcaaatttgcaaaggaaaatgggtatgttacgactatcttaaataggagatcttacataccggaaatcaattcaaaaaattttaaccaaagatcttttggcgagagaatggcaatgaatacacctattcaaggtagcgctgcggatataataaagatgtcgatggttaaagtatacaatgaattaaaggaaagaggattgaaatcaagacttattcttcaggtgcacgatgagcttataattgacacacatcctgatgaagttgaaatagtcaaggagcttctaaaatcaataatggaaaatatcataaagttgaaagttcctttagttgtagatatagggcaagggaaaaactggtatgatgcaaaataaaaggatcc

SEQ ID NO: 584 - DNA, 2678 bp, Artificial Sequence
  Description of Artificial Sequence: Synthetic Clostridium thermosulfurogenes DNA Polymerase R784T
atgaaatacctgctgccgaccgctgctgctggtctgctgctcctcgctgcccagccggcgatggccatggcgaaatttttgatcatagatggtaatagcttgatgtacagggcgtattttgccctgcctgatttgatgaacagcgaaggaatgcatacaaatgccatatacggtttttcaatgatgcttcttaaattgctggaggaggagaaaccagactacatagcaatagctttcgataaaaaggcttctacatttaggcacaaggagtacagtgcttataaaggaacccgccagtcgatgccagaagagctgatagaacaggtggatattttaaaagatgtgataaatgcatttaacataaagaccatcgagatagagggatttgaagcagatgatatcattggtacagtatcaaaaattgcttccgaaagtgggatggatgtgcttatcgtcacaggcgacagagatgcgcttcagcttgtgtcggcaaatgtaaaagtaaaaatatgtaaaaaaggcataacgcagatggatgagtacgatgaaaaggcggtctttgaaaagtatgaagtgacgccgcttcaattcatagacttgaaagggcttatgggagacaaatcagacaacattccaggagtgcccaatataggggagaagacggccataaagcttgttaaagaatttggatcaattgaaaatttactgatgaatacagataagttaaaagggaaaataaaagaaaatgtagaaaacaatgcagaattagctgttttaagcaaacggcttgctacgattgagagaaatgttcctattgatattgatttgaatgaatacgcggttaaaaattacgatgtcaataagcttacagagctatttgaaaaattggaattttcaagcctcatctcagatttaaaagatgatagtcgtgatacaaaggatattaaagaatggcctgtaagagattttacatacgttaaaaatgttttaggaaagtttgatgttttgtcattgtatccattcatatatgatggaaagataaaagcagtatcatttgcttgcggtgacggatcgttttttgtagagattgatgattatgacaattttaaattgcttaataatgataagcttacgttgataggacacgatctgaaagattttttagtaaacatttcatactgcggtattgaacttaattgtaagattttagatacggccataatgacttatcttttaaatccgtctgagtcgaattacgacataagtcgcgtattgaaaaaatacttgaaagaggatttgcaaaacatagatgatatagtaggcaagggcaggaataaaaagagctacgatgacattgacaaaaagcttttagtcgattatatgtgttcagccgcatcaaacttatctaagttaaaagataagctcatgtcatttataaaagagatggagatggaagatcttttaaaaaatgtggaaattccgcttattgaagtgctaaaatctatggaggtgtacggctttacattagataaagatgtacttagaagtatttctaaagaaatagatgaaaagacagataagattgtaaaagatatttacgatgctgctggatacgaatttaatattaactctacaaagcagttatcagaatttttgtttgataaactgaatttgccagcaataaaaaagactaaaacagggtattcgactgacatggaagtccttgcagaacttataccgtacaatgacatagtaggagaaataatagaatatagacagcttatgaagcttaaatctacgtacatagatggcttcattcccatcatggatgaaaataatagggtccactctacgtttaaacaaacagttgctgctacagggagaattagctcaacagagcctaatctgcagaacatacctgtaagagaagaatttggcaggaggataagaaaggcatttgtatcaagttatgaagatgggcttataatatctgctgattattctcagattgagctaagggttcttgcacatctttcagaggatgaaaaacttattgagtcatttttgaacaacgaagatatacatttaaggacggcatcggaggtttttaaggtttcgaaagaagaagtgacaagtgaaatgagaaggcgggcgaaagctgtcaactttggtattgtatatggtataagcgattacggcttatctaaagacttaaagatttcgcgaaaagaagcgaaagaatacatagacaattattttgacaggtacaagggcgtcaaaaattacatcgactcaattgtcaaatttgcaaaggaaaatgggtatgttacgactatcttaaataggagaacttacataccggaaatcaattcaaaaaattttaaccaaagatcttttggcgagagaatggcaatgaatacacctattcaaggtagcgctgcggatataataaagatgtcgatggttaaagtatacaatgaattaaaggaaagaggattgaaatcaagacttattcttcaggtgcacgatgagcttataattgacacacatcctgatgaagttgaaatagtcaaggagcttctaaaatcaataatggaaaatatcataaagttgaaagttcctttagttgtagatatagggcaagggaaaaactggtatgatgcaaaataaaaggatcc

SEQ ID NO: 585 - DNA, 2678 bp, Artificial Sequence
  Description of Artificial Sequence: Synthetic Clostridium thermosulfurogenes DNA Polymerase R784W
atgaaatacctgctgccgaccgctgctgctggtctgctgctcctcgctgcccagccggcgatggccatggcgaaatttttgatcatagatggtaatagcttgatgtacagggcgtattttgccctgcctgatttgatgaacagcgaaggaatgcatacaaatgccatatacggtttttcaatgatgcttcttaaattgctggaggaggagaaaccagactacatagcaatagctttcgataaaaaggcttctacatttaggcacaaggagtacagtgcttataaaggaacccgccagtcgatgccagaagagctgatagaacaggtggatattttaaaagatgtgataaatgcatttaacataaagaccatcgagatagagggatttgaagcagatgatatcattggtacagtatcaaaaattgcttccgaaagtgggatggatgtgcttatcgtcacaggcgacagagatgcgcttcagcttgtgtcggcaaatgtaaaagtaaaaatatgtaaaaaaggcataacgcagatggatgagtacgatgaaaaggcggtctttgaaaagtatgaagtgacgccgcttcaattcatagacttgaaagggcttatgggagacaaatcagacaacattccaggagtgcccaatataggggagaagacggccataaagcttgttaaagaatttggatcaattgaaaatttactgatgaatacagataagttaaaagggaaaataaaagaaaatgtagaaaacaatgcagaattagctgttttaagcaaacggcttgctacgattgagagaaatgttcctattgatattgatttgaatgaatacgcggttaaaaattacgatgtcaataagcttacagagctatttgaaaaattggaattttcaagcctcatctcagatttaaaagatgatagtcgtgatacaaaggatattaaagaatggcctgtaagagattttacatacgttaaaaatgttttaggaaagtttgatgttttgtcattgtatccattcatatatgatggaaagataaaagcagtatcatttgcttgcggtgacggatcgttttttgtagagattgatgattatgacaattttaaattgcttaataatgataagcttacgttgataggacacgatctgaaagattttttagtaaacatttcatactgcggtattgaacttaattgtaagattttagatacggccataatgacttatcttttaaatccgtctgagtcgaattacgacataagtcgcgtattgaaaaaatacttgaaagaggatttgcaaaacatagatgatatagtaggcaagggcaggaataaaaagagctacgatgacattgacaaaaagcttttagtcgattatatgtgttcagccgcatcaaacttatctaagttaaaagataagctcatgtcatttataaaagagatggagatggaagatcttttaaaaaatgtggaaattccgcttattgaagtgctaaaatctatggaggtgtacggctttacattagataaagatgtacttagaagtatttctaaagaaatagatgaaaagacagataagattgtaaaagatatttacgatgctgctggatacgaatttaatattaactctacaaagcagttatcagaatttttgtttgataaactgaatttgccagcaataaaaaagactaaaacagggtattcgactgacatggaagtccttgcagaacttataccgtacaatgacatagtaggagaaataatagaatatagacagcttatgaagcttaaatctacgtacatagatggcttcattcccatcatggatgaaaataatagggtccactctacgtttaaacaaacagttgctgctacagggagaattagctcaacagagcctaatctgcagaacatacctgtaagagaagaatttggcaggaggataagaaaggcatttgtatcaagttatgaagatgggcttataatatctgctgattattctcagattgagctaagggttcttgcacatctttcagaggatgaaaaacttattgagtcatttttgaacaacgaagatatacatttaaggacggcatcggaggtttttaaggtttcgaaagaagaagtgacaagtgaaatgagaaggcgggcgaaagctgtcaactttggtattgtatatggtataagcgattacggcttatctaaagacttaaagatttcgcgaaaagaagcgaaagaatacatagacaattattttgacaggtacaagggcgtcaaaaattacatcgactcaattgtcaaatttgcaaaggaaaatgggtatgttacgactatcttaaataggagatggtacataccggaaatcaattcaaaaaattttaaccaaagatcttttggcgagagaatggcaatgaatacacctattcaaggtagcgctgcggatataataaagatgtcgatggttaaagtatacaatgaattaaaggaaagaggattgaaatcaagacttattcttcaggtgcacgatgagcttataattgacacacatcctgatgaagttgaaatagtcaaggagcttctaaaatcaataatggaaaatatcataaagttgaaagttcctttagttgtagatatagggcaagggaaaaactggtatgatgcaaaataaaaggatcc

SEQ ID NO: 586 - DNA, 2678 bp, Artificial Sequence
  Description of Artificial Sequence: Synthetic Clostridium thermosulfurogenes DNA Polymerase R784Y
atgaaatacctgctgccgaccgctgctgctggtctgctgctcctcgctgcccagccggcgatggccatggcgaaatttttgatcatagatggtaatagcttgatgtacagggcgtattttgccctgcctgatttgatgaacagcgaaggaatgcatacaaatgccatatacggtttttcaatgatgcttcttaaattgctggaggaggagaaaccagactacatagcaatagctttcgataaaaaggcttctacatttaggcacaaggagtacagtgcttataaaggaacccgccagtcgatgccagaagagctgatagaacaggtggatattttaaaagatgtgataaatgcatttaacataaagaccatcgagatagagggatttgaagcagatgatatcattggtacagtatcaaaaattgcttccgaaagtgggatggatgtgcttatcgtcacaggcgacagagatgcgcttcagcttgtgtcggcaaatgtaaaagtaaaaatatgtaaaaaaggcataacgcagatggatgagtacgatgaaaaggcggtctttgaaaagtatgaagtgacgccgcttcaattcatagacttgaaagggcttatgggagacaaatcagacaacattccaggagtgcccaatataggggagaagacggccataaagcttgttaaagaatttggatcaattgaaaatttactgatgaatacagataagttaaaagggaaaataaaagaaaatgtagaaaacaatgcagaattagctgttttaagcaaacggcttgctacgattgagagaaatgttcctattgatattgatttgaatgaatacgcggttaaaaattacgatgtcaataagcttacagagctatttgaaaaattggaattttcaagcctcatctcagatttaaaagatgatagtcgtgatacaaaggatattaaagaatggcctgtaagagattttacatacgttaaaaatgttttaggaaagtttgatgttttgtcattgtatccattcatatatgatggaaagataaaagcagtatcatttgcttgcggtgacggatcgttttttgtagagattgatgattatgacaattttaaattgcttaataatgataagcttacgttgataggacacgatctgaaagattttttagtaaacatttcatactgcggtattgaacttaattgtaagattttagatacggccataatgacttatcttttaaatccgtctgagtcgaattacgacataagtcgcgtattgaaaaaatacttgaaagaggatttgcaaaacatagatgatatagtaggcaagggcaggaataaaaagagctacgatgacattgacaaaaagcttttagtcgattatatgtgttcagccgcatcaaacttatctaagttaaaagataagctcatgtcatttataaaagagatggagatggaagatcttttaaaaaatgtggaaattccgcttattgaagtgctaaaatctatggaggtgtacggctttacattagataaagatgtacttagaagtatttctaaagaaatagatgaaaagacagataagattgtaaaagatatttacgatgctgctggatacgaatttaatattaactctacaaagcagttatcagaatttttgtttgataaactgaatttgccagcaataaaaaagactaaaacagggtattcgactgacatggaagtccttgcagaacttataccgtacaatgacatagtaggagaaataatagaatatagacagcttatgaagcttaaatctacgtacatagatggcttcattcccatcatggatgaaaataatagggtccactctacgtttaaacaaacagttgctgctacagggagaattagctcaacagagcctaatctgcagaacatacctgtaagagaagaatttggcaggaggataagaaaggcatttgtatcaagttatgaagatgggcttataatatctgctgattattctcagattgagctaagggttcttgcacatctttcagaggatgaaaaacttattgagtcatttttgaacaacgaagatatacatttaaggacggcatcggaggtttttaaggtttcgaaagaagaagtgacaagtgaaatgagaaggcgggcgaaagctgtcaactttggtattgtatatggtataagcgattacggcttatctaaagacttaaagatttcgcgaaaagaagcgaaagaatacatagacaattattttgacaggtacaagggcgtcaaaaattacatcgactcaattgtcaaatttgcaaaggaaaatgggtatgttacgactatcttaaataggagatattacataccggaaatcaattcaaaaaattttaaccaaagatcttttggcgagagaatggcaatgaatacacctattcaaggtagcgctgcggatataataaagatgtcgatggttaaagtatacaatgaattaaaggaaagaggattgaaatcaagacttattcttcaggtgcacgatgagcttataattgacacacatcctgatgaagttgaaatagtcaaggagcttctaaaatcaataatggaaaatatcataaagttgaaagttcctttagttgtagatatagggcaagggaaaaactggtatgatgcaaaataaaaggatcc

SEQ ID NO: 587 - DNA, 2678 bp, Artificial Sequence
  Description of Artificial Sequence: Synthetic Clostridium thermosulfurogenes DNA Polymerase R784V
atgaaatacctgctgccgaccgctgctgctggtctgctgctcctcgctgcccagccggcgatggccatggcgaaatttttgatcatagatggtaatagcttgatgtacagggcgtattttgccctgcctgatttgatgaacagcgaaggaatgcatacaaatgccatatacggtttttcaatgatgcttcttaaattgctggaggaggagaaaccagactacatagcaatagctttcgataaaaaggcttctacatttaggcacaaggagtacagtgcttataaaggaacccgccagtcgatgccagaagagctgatagaacaggtggatattttaaaagatgtgataaatgcatttaacataaagaccatcgagatagagggatttgaagcagatgatatcattggtacagtatcaaaaattgcttccgaaagtgggatggatgtgcttatcgtcacaggcgacagagatgcgcttcagcttgtgtcggcaaatgtaaaagtaaaaatatgtaaaaaaggcataacgcagatggatgagtacgatgaaaaggcggtctttgaaaagtatgaagtgacgccgcttcaattcatagacttgaaagggcttatgggagacaaatcagacaacattccaggagtgcccaatataggggagaagacggccataaagcttgttaaagaatttggatcaattgaaaatttactgatgaatacagataagttaaaagggaaaataaaagaaaatgtagaaaacaatgcagaattagctgttttaagcaaacggcttgctacgattgagagaaatgttcctattgatattgatttgaatgaatacgcggttaaaaattacgatgtcaataagcttacagagctatttgaaaaattggaattttcaagcctcatctcagatttaaaagatgatagtcgtgatacaaaggatattaaagaatggcctgtaagagattttacatacgttaaaaatgttttaggaaagtttgatgttttgtcattgtatccattcatatatgatggaaagataaaagcagtatcatttgcttgcggtgacggatcgttttttgtagagattgatgattatgacaattttaaattgcttaataatgataagcttacgttgataggacacgatctgaaagattttttagtaaacatttcatactgcggtattgaacttaattgtaagattttagatacggccataatgacttatcttttaaatccgtctgagtcgaattacgacataagtcgcgtattgaaaaaatacttgaaagaggatttgcaaaacatagatgatatagtaggcaagggcaggaataaaaagagctacgatgacattgacaaaaagcttttagtcgattatatgtgttcagccgcatcaaacttatctaagttaaaagataagctcatgtcatttataaaagagatggagatggaagatcttttaaaaaatgtggaaattccgcttattgaagtgctaaaatctatggaggtgtacggctttacattagataaagatgtacttagaagtatttctaaagaaatagatgaaaagacagataagattgtaaaagatatttacgatgctgctggatacgaatttaatattaactctacaaagcagttatcagaatttttgtttgataaactgaatttgccagcaataaaaaagactaaaacagggtattcgactgacatggaagtccttgcagaacttataccgtacaatgacatagtaggagaaataatagaatatagacagcttatgaagcttaaatctacgtacatagatggcttcattcccatcatggatgaaaataatagggtccactctacgtttaaacaaacagttgctgctacagggagaattagctcaacagagcctaatctgcagaacatacctgtaagagaagaatttggcaggaggataagaaaggcatttgtatcaagttatgaagatgggcttataatatctgctgattattctcagattgagctaagggttcttgcacatctttcagaggatgaaaaacttattgagtcatttttgaacaacgaagatatacatttaaggacggcatcggaggtttttaaggtttcgaaagaagaagtgacaagtgaaatgagaaggcgggcgaaagctgtcaactttggtattgtatatggtataagcgattacggcttatctaaagacttaaagatttcgcgaaaagaagcgaaagaatacatagacaattattttgacaggtacaagggcgtcaaaaattacatcgactcaattgtcaaatttgcaaaggaaaatgggtatgttacgactatcttaaataggagagtttacataccggaaatcaattcaaaaaattttaaccaaagatcttttggcgagagaatggcaatgaatacacctattcaaggtagcgctgcggatataataaagatgtcgatggttaaagtatacaatgaattaaaggaaagaggattgaaatcaagacttattcttcaggtgcacgatgagcttataattgacacacatcctgatgaagttgaaatagtcaaggagcttctaaaatcaataatggaaaatatcataaagttgaaagttcctttagttgtagatatagggcaagggaaaaactggtatgatgcaaaataaaaggatcc

SEQ ID NO: 588 - DNA, 2678 bp, Artificial Sequence
  Description of Artificial Sequence: Synthetic Clostridium thermosulfurogenes DNA Polymerase Y785A
atgaaatacctgctgccgaccgctgctgctggtctgctgctcctcgctgcccagccggcgatggccatggcgaaatttttgatcatagatggtaatagcttgatgtacagggcgtattttgccctgcctgatttgatgaacagcgaaggaatgcatacaaatgccatatacggtttttcaatgatgcttcttaaattgctggaggaggagaaaccagactacatagcaatagctttcgataaaaaggcttctacatttaggcacaaggagtacagtgcttataaaggaacccgccagtcgatgccagaagagctgatagaacaggtggatattttaaaagatgtgataaatgcatttaacataaagaccatcgagatagagggatttgaagcagatgatatcattggtacagtatcaaaaattgcttccgaaagtgggatggatgtgcttatcgtcacaggcgacagagatgcgcttcagcttgtgtcggcaaatgtaaaagtaaaaatatgtaaaaaaggcataacgcagatggatgagtacgatgaaaaggcggtctttgaaaagtatgaagtgacgccgcttcaattcatagacttgaaagggcttatgggagacaaatcagacaacattccaggagtgcccaatataggggagaagacggccataaagcttgttaaagaatttggatcaattgaaaatttactgatgaatacagataagttaaaagggaaaataaaagaaaatgtagaaaacaatgcagaattagctgttttaagcaaacggcttgctacgattgagagaaatgttcctattgatattgatttgaatgaatacgcggttaaaaattacgatgtcaataagcttacagagctatttgaaaaattggaattttcaagcctcatctcagatttaaaagatgatagtcgtgatacaaaggatattaaagaatggcctgtaagagattttacatacgttaaaaatgttttaggaaagtttgatgttttgtcattgtatccattcatatatgatggaaagataaaagcagtatcatttgcttgcggtgacggatcgttttttgtagagattgatgattatgacaattttaaattgcttaataatgataagcttacgttgataggacacgatctgaaagattttttagtaaacatttcatactgcggtattgaacttaattgtaagattttagatacggccataatgacttatcttttaaatccgtctgagtcgaattacgacataagtcgcgtattgaaaaaatacttgaaagaggatttgcaaaacatagatgatatagtaggcaagggcaggaataaaaagagctacgatgacattgacaaaaagcttttagtcgattatatgtgttcagccgcatcaaacttatctaagttaaaagataagctcatgtcatttataaaagagatggagatggaagatcttttaaaaaatgtggaaattccgcttattgaagtgctaaaatctatggaggtgtacggctttacattagataaagatgtacttagaagtatttctaaagaaatagatgaaaagacagataagattgtaaaagatatttacgatgctgctggatacgaatttaatattaactctacaaagcagttatcagaatttttgtttgataaactgaatttgccagcaataaaaaagactaaaacagggtattcgactgacatggaagtccttgcagaacttataccgtacaatgacatagtaggagaaataatagaatatagacagcttatgaagcttaaatctacgtacatagatggcttcattcccatcatggatgaaaataatagggtccactctacgtttaaacaaacagttgctgctacagggagaattagctcaacagagcctaatctgcagaacatacctgtaagagaagaatttggcaggaggataagaaaggcatttgtatcaagttatgaagatgggcttataatatctgctgattattctcagattgagctaagggttcttgcacatctttcagaggatgaaaaacttattgagtcatttttgaacaacgaagatatacatttaaggacggcatcggaggtttttaaggtttcgaaagaagaagtgacaagtgaaatgagaaggcgggcgaaagctgtcaactttggtattgtatatggtataagcgattacggcttatctaaagacttaaagatttcgcgaaaagaagcgaaagaatacatagacaattattttgacaggtacaagggcgtcaaaaattacatcgactcaattgtcaaatttgcaaaggaaaatgggtatgttacgactatcttaaataggagaagagctataccggaaatcaattcaaaaaattttaaccaaagatcttttggcgagagaatggcaatgaatacacctattcaaggtagcgctgcggatataataaagatgtcgatggttaaagtatacaatgaattaaaggaaagaggattgaaatcaagacttattcttcaggtgcacgatgagcttataattgacacacatcctgatgaagttgaaatagtcaaggagcttctaaaatcaataatggaaaatatcataaagttgaaagttcctttagttgtagatatagggcaagggaaaaactggtatgatgcaaaataaaaggatcc

SEQ ID NO: 589 - DNA, 2678 bp, Artificial Sequence
  Description of Artificial Sequence: Synthetic Clostridium thermosulfurogenes DNA Polymerase Y785R
atgaaatacctgctgccgaccgctgctgctggtctgctgctcctcgctgcccagccggcgatggccatggcgaaatttttgatcatagatggtaatagcttgatgtacagggcgtattttgccctgcctgatttgatgaacagcgaaggaatgcatacaaatgccatatacggtttttcaatgatgcttcttaaattgctggaggaggagaaaccagactacatagcaatagctttcgataaaaaggcttctacatttaggcacaaggagtacagtgcttataaaggaacccgccagtcgatgccagaagagctgatagaacaggtggatattttaaaagatgtgataaatgcatttaacataaagaccatcgagatagagggatttgaagcagatgatatcattggtacagtatcaaaaattgcttccgaaagtgggatggatgtgcttatcgtcacaggcgacagagatgcgcttcagcttgtgtcggcaaatgtaaaagtaaaaatatgtaaaaaaggcataacgcagatggatgagtacgatgaaaaggcggtctttgaaaagtatgaagtgacgccgcttcaattcatagacttgaaagggcttatgggagacaaatcagacaacattccaggagtgcccaatataggggagaagacggccataaagcttgttaaagaatttggatcaattgaaaatttactgatgaatacagataagttaaaagggaaaataaaagaaaatgtagaaaacaatgcagaattagctgttttaagcaaacggcttgctacgattgagagaaatgttcctattgatattgatttgaatgaatacgcggttaaaaattacgatgtcaataagcttacagagctatttgaaaaattggaattttcaagcctcatctcagatttaaaagatgatagtcgtgatacaaaggatattaaagaatggcctgtaagagattttacatacgttaaaaatgttttaggaaagtttgatgttttgtcattgtatccattcatatatgatggaaagataaaagcagtatcatttgcttgcggtgacggatcgttttttgtagagattgatgattatgacaattttaaattgcttaataatgataagcttacgttgataggacacgatctgaaagattttttagtaaacatttcatactgcggtattgaacttaattgtaagattttagatacggccataatgacttatcttttaaatccgtctgagtcgaattacgacataagtcgcgtattgaaaaaatacttgaaagaggatttgcaaaacatagatgatatagtaggcaagggcaggaataaaaagagctacgatgacattgacaaaaagcttttagtcgattatatgtgttcagccgcatcaaacttatctaagttaaaagataagctcatgtcatttataaaagagatggagatggaagatcttttaaaaaatgtggaaattccgcttattgaagtgctaaaatctatggaggtgtacggctttacattagataaagatgtacttagaagtatttctaaagaaatagatgaaaagacagataagattgtaaaagatatttacgatgctgctggatacgaatttaatattaactctacaaagcagttatcagaatttttgtttgataaactgaatttgccagcaataaaaaagactaaaacagggtattcgactgacatggaagtccttgcagaacttataccgtacaatgacatagtaggagaaataatagaatatagacagcttatgaagcttaaatctacgtacatagatggcttcattcccatcatggatgaaaataatagggtccactctacgtttaaacaaacagttgctgctacagggagaattagctcaacagagcctaatctgcagaacatacctgtaagagaagaatttggcaggaggataagaaaggcatttgtatcaagttatgaagatgggcttataatatctgctgattattctcagattgagctaagggttcttgcacatctttcagaggatgaaaaacttattgagtcatttttgaacaacgaagatatacatttaaggacggcatcggaggtttttaaggtttcgaaagaagaagtgacaagtgaaatgagaaggcgggcgaaagctgtcaactttggtattgtatatggtataagcgattacggcttatctaaagacttaaagatttcgcgaaaagaagcgaaagaatacatagacaattattttgacaggtacaagggcgtcaaaaattacatcgactcaattgtcaaatttgcaaaggaaaatgggtatgttacgactatcttaaataggagaagacgtataccggaaatcaattcaaaaaattttaaccaaagatcttttggcgagagaatggcaatgaatacacctattcaaggtagcgctgcggatataataaagatgtcgatggttaaagtatacaatgaattaaaggaaagaggattgaaatcaagacttattcttcaggtgcacgatgagcttataattgacacacatcctgatgaagttgaaatagtcaaggagcttctaaaatcaataatggaaaatatcataaagttgaaagttcctttagttgtagatatagggcaagggaaaaactggtatgatgcaaaataaaaggatcc

SEQ ID NO: 590 - DNA, 2678 bp, Artificial Sequence
  Description of Artificial Sequence: Synthetic Clostridium thermosulfurogenes DNA Polymerase Y785N
atgaaatacctgctgccgaccgctgctgctggtctgctgctcctcgctgcccagccggcgatggccatggcgaaatttttgatcatagatggtaatagcttgatgtacagggcgtattttgccctgcctgatttgatgaacagcgaaggaatgcatacaaatgccatatacggtttttcaatgatgcttcttaaattgctggaggaggagaaaccagactacatagcaatagctttcgataaaaaggcttctacatttaggcacaaggagtacagtgcttataaaggaacccgccagtcgatgccagaagagctgatagaacaggtggatattttaaaagatgtgataaatgcatttaacataaagaccatcgagatagagggatttgaagcagatgatatcattggtacagtatcaaaaattgcttccgaaagtgggatggatgtgcttatcgtcacaggcgacagagatgcgcttcagcttgtgtcggcaaatgtaaaagtaaaaatatgtaaaaaaggcataacgcagatggatgagtacgatgaaaaggcggtctttgaaaagtatgaagtgacgccgcttcaattcatagacttgaaagggcttatgggagacaaatcagacaacattccaggagtgcccaatataggggagaagacggccataaagcttgttaaagaatttggatcaattgaaaatttactgatgaatacagataagttaaaagggaaaataaaagaaaatgtagaaaacaatgcagaattagctgttttaagcaaacggcttgctacgattgagagaaatgttcctattgatattgatttgaatgaatacgcggttaaaaattacgatgtcaataagcttacagagctatttgaaaaattggaattttcaagcctcatctcagatttaaaagatgatagtcgtgatacaaaggatattaaagaatggcctgtaagagattttacatacgttaaaaatgttttaggaaagtttgatgttttgtcattgtatccattcatatatgatggaaagataaaagcagtatcatttgcttgcggtgacggatcgttttttgtagagattgatgattatgacaattttaaattgcttaataatgataagcttacgttgataggacacgatctgaaagattttttagtaaacatttcatactgcggtattgaacttaattgtaagattttagatacggccataatgacttatcttttaaatccgtctgagtcgaattacgacataagtcgcgtattgaaaaaatacttgaaagaggatttgcaaaacatagatgatatagtaggcaagggcaggaataaaaagagctacgatgacattgacaaaaagcttttagtcgattatatgtgttcagccgcatcaaacttatctaagttaaaagataagctcatgtcatttataaaagagatggagatggaagatcttttaaaaaatgtggaaattccgcttattgaagtgctaaaatctatggaggtgtacggctttacattagataaagatgtacttagaagtatttctaaagaaatagatgaaaagacagataagattgtaaaagatatttacgatgctgctggatacgaatttaatattaactctacaaagcagttatcagaatttttgtttgataaactgaatttgccagcaataaaaaagactaaaacagggtattcgactgacatggaagtccttgcagaacttataccgtacaatgacatagtaggagaaataatagaatatagacagcttatgaagcttaaatctacgtacatagatggcttcattcccatcatggatgaaaataatagggtccactctacgtttaaacaaacagttgctgctacagggagaattagctcaacagagcctaatctgcagaacatacctgtaagagaagaatttggcaggaggataagaaaggcatttgtatcaagttatgaagatgggcttataatatctgctgattattctcagattgagctaagggttcttgcacatctttcagaggatgaaaaacttattgagtcatttttgaacaacgaagatatacatttaaggacggcatcggaggtttttaaggtttcgaaagaagaagtgacaagtgaaatgagaaggcgggcgaaagctgtcaactttggtattgtatatggtataagcgattacggcttatctaaagacttaaagatttcgcgaaaagaagcgaaagaatacatagacaattattttgacaggtacaagggcgtcaaaaattacatcgactcaattgtcaaatttgcaaaggaaaatgggtatgttacgactatcttaaataggagaagaaatataccggaaatcaattcaaaaaattttaaccaaagatcttttggcgagagaatggcaatgaatacacctattcaaggtagcgctgcggatataataaagatgtcgatggttaaagtatacaatgaattaaaggaaagaggattgaaatcaagacttattcttcaggtgcacgatgagcttataattgacacacatcctgatgaagttgaaatagtcaaggagcttctaaaatcaataatggaaaatatcataaagttgaaagttcctttagttgtagatatagggcaagggaaaaactggtatgatgcaaaataaaaggatcc

SEQ ID NO: 591 - DNA, 2678 bp, Artificial Sequence
  Description of Artificial Sequence: Synthetic Clostridium thermosulfurogenes DNA Polymerase Y785D
atgaaatacctgctgccgaccgctgctgctggtctgctgctcctcgctgcccagccggcgatggccatggcgaaatttttgatcatagatggtaatagcttgatgtacagggcgtattttgccctgcctgatttgatgaacagcgaaggaatgcatacaaatgccatatacggtttttcaatgatgcttcttaaattgctggaggaggagaaaccagactacatagcaatagctttcgataaaaaggcttctacatttaggcacaaggagtacagtgcttataaaggaacccgccagtcgatgccagaagagctgatagaacaggtggatattttaaaagatgtgataaatgcatttaacataaagaccatcgagatagagggatttgaagcagatgatatcattggtacagtatcaaaaattgcttccgaaagtgggatggatgtgcttatcgtcacaggcgacagagatgcgcttcagcttgtgtcggcaaatgtaaaagtaaaaatatgtaaaaaaggcataacgcagatggatgagtacgatgaaaaggcggtctttgaaaagtatgaagtgacgccgcttcaattcatagacttgaaagggcttatgggagacaaatcagacaacattccaggagtgcccaatataggggagaagacggccataaagcttgttaaagaatttggatcaattgaaaatttactgatgaatacagataagttaaaagggaaaataaaagaaaatgtagaaaacaatgcagaattagctgttttaagcaaacggcttgctacgattgagagaaatgttcctattgatattgatttgaatgaatacgcggttaaaaattacgatgtcaataagcttacagagctatttgaaaaattggaattttcaagcctcatctcagatttaaaagatgatagtcgtgatacaaaggatattaaagaatggcctgtaagagattttacatacgttaaaaatgttttaggaaagtttgatgttttgtcattgtatccattcatatatgatggaaagataaaagcagtatcatttgcttgcggtgacggatcgttttttgtagagattgatgattatgacaattttaaattgcttaataatgataagcttacgttgataggacacgatctgaaagattttttagtaaacatttcatactgcggtattgaacttaattgtaagattttagatacggccataatgacttatcttttaaatccgtctgagtcgaattacgacataagtcgcgtattgaaaaaatacttgaaagaggatttgcaaaacatagatgatatagtaggcaagggcaggaataaaaagagctacgatgacattgacaaaaagcttttagtcgattatatgtgttcagccgcatcaaacttatctaagttaaaagataagctcatgtcatttataaaagagatggagatggaagatcttttaaaaaatgtggaaattccgcttattgaagtgctaaaatctatggaggtgtacggctttacattagataaagatgtacttagaagtatttctaaagaaatagatgaaaagacagataagattgtaaaagatatttacgatgctgctggatacgaatttaatattaactctacaaagcagttatcagaatttttgtttgataaactgaatttgccagcaataaaaaagactaaaacagggtattcgactgacatggaagtccttgcagaacttataccgtacaatgacatagtaggagaaataatagaatatagacagcttatgaagcttaaatctacgtacatagatggcttcattcccatcatggatgaaaataatagggtccactctacgtttaaacaaacagttgctgctacagggagaattagctcaacagagcctaatctgcagaacatacctgtaagagaagaatttggcaggaggataagaaaggcatttgtatcaagttatgaagatgggcttataatatctgctgattattctcagattgagctaagggttcttgcacatctttcagaggatgaaaaacttattgagtcatttttgaacaacgaagatatacatttaaggacggcatcggaggtttttaaggtttcgaaagaagaagtgacaagtgaaatgagaaggcgggcgaaagctgtcaactttggtattgtatatggtataagcgattacggcttatctaaagacttaaagatttcgcgaaaagaagcgaaagaatacatagacaattattttgacaggtacaagggcgtcaaaaattacatcgactcaattgtcaaatttgcaaaggaaaatgggtatgttacgactatcttaaataggagaagagatataccggaaatcaattcaaaaaattttaaccaaagatcttttggcgagagaatggcaatgaatacacctattcaaggtagcgctgcggatataataaagatgtcgatggttaaagtatacaatgaattaaaggaaagaggattgaaatcaagacttattcttcaggtgcacgatgagcttataattgacacacatcctgatgaagttgaaatagtcaaggagcttctaaaatcaataatggaaaatatcataaagttgaaagttcctttagttgtagatatagggcaagggaaaaactggtatgatgcaaaataaaaggatcc

SEQ ID NO: 592 - DNA, 2678 bp, Artificial Sequence
  Description of Artificial Sequence: Synthetic Clostridium thermosulfurogenes DNA Polymerase Y785C
atgaaatacctgctgccgaccgctgctgctggtctgctgctcctcgctgcccagccggcgatggccatggcgaaatttttgatcatagatggtaatagcttgatgtacagggcgtattttgccctgcctgatttgatgaacagcgaaggaatgcatacaaatgccatatacggtttttcaatgatgcttcttaaattgctggaggaggagaaaccagactacatagcaatagctttcgataaaaaggcttctacatttaggcacaaggagtacagtgcttataaaggaacccgccagtcgatgccagaagagctgatagaacaggtggatattttaaaagatgtgataaatgcatttaacataaagaccatcgagatagagggatttgaagcagatgatatcattggtacagtatcaaaaattgcttccgaaagtgggatggatgtgcttatcgtcacaggcgacagagatgcgcttcagcttgtgtcggcaaatgtaaaagtaaaaatatgtaaaaaaggcataacgcagatggatgagtacgatgaaaaggcggtctttgaaaagtatgaagtgacgccgcttcaattcatagacttgaaagggcttatgggagacaaatcagacaacattccaggagtgcccaatataggggagaagacggccataaagcttgttaaagaatttggatcaattgaaaatttactgatgaatacagataagttaaaagggaaaataaaagaaaatgtagaaaacaatgcagaattagctgttttaagcaaacggcttgctacgattgagagaaatgttcctattgatattgatttgaatgaatacgcggttaaaaattacgatgtcaataagcttacagagctatttgaaaaattggaattttcaagcctcatctcagatttaaaagatgatagtcgtgatacaaaggatattaaagaatggcctgtaagagattttacatacgttaaaaatgttttaggaaagtttgatgttttgtcattgtatccattcatatatgatggaaagataaaagcagtatcatttgcttgcggtgacggatcgttttttgtagagattgatgattatgacaattttaaattgcttaataatgataagcttacgttgataggacacgatctgaaagattttttagtaaacatttcatactgcggtattgaacttaattgtaagattttagatacggccataatgacttatcttttaaatccgtctgagtcgaattacgacataagtcgcgtattgaaaaaatacttgaaagaggatttgcaaaacatagatgatatagtaggcaagggcaggaataaaaagagctacgatgacattgacaaaaagcttttagtcgattatatgtgttcagccgcatcaaacttatctaagttaaaagataagctcatgtcatttataaaagagatggagatggaagatcttttaaaaaatgtggaaattccgcttattgaagtgctaaaatctatggaggtgtacggctttacattagataaagatgtacttagaagtatttctaaagaaatagatgaaaagacagataagattgtaaaagatatttacgatgctgctggatacgaatttaatattaactctacaaagcagttatcagaatttttgtttgataaactgaatttgccagcaataaaaaagactaaaacagggtattcgactgacatggaagtccttgcagaacttataccgtacaatgacatagtaggagaaataatagaatatagacagcttatgaagcttaaatctacgtacatagatggcttcattcccatcatggatgaaaataatagggtccactctacgtttaaacaaacagttgctgctacagggagaattagctcaacagagcctaatctgcagaacatacctgtaagagaagaatttggcaggaggataagaaaggcatttgtatcaagttatgaagatgggcttataatatctgctgattattctcagattgagctaagggttcttgcacatctttcagaggatgaaaaacttattgagtcatttttgaacaacgaagatatacatttaaggacggcatcggaggtttttaaggtttcgaaagaagaagtgacaagtgaaatgagaaggcgggcgaaagctgtcaactttggtattgtatatggtataagcgattacggcttatctaaagacttaaagatttcgcgaaaagaagcgaaagaatacatagacaattattttgacaggtacaagggcgtcaaaaattacatcgactcaattgtcaaatttgcaaaggaaaatgggtatgttacgactatcttaaataggagaagatgtataccggaaatcaattcaaaaaattttaaccaaagatcttttggcgagagaatggcaatgaatacacctattcaaggtagcgctgcggatataataaagatgtcgatggttaaagtatacaatgaattaaaggaaagaggattgaaatcaagacttattcttcaggtgcacgatgagcttataattgacacacatcctgatgaagttgaaatagtcaaggagcttctaaaatcaataatggaaaatatcataaagttgaaagttcctttagttgtagatatagggcaagggaaaaactggtatgatgcaaaataaaaggatcc

SEQ ID NO: 593 - DNA, 2678 bp, Artificial Sequence
  Description of Artificial Sequence: Synthetic Clostridium thermosulfurogenes DNA Polymerase Y785E
atgaaatacctgctgccgaccgctgctgctggtctgctgctcctcgctgcccagccggcgatggccatggcgaaatttttgatcatagatggtaatagcttgatgtacagggcgtattttgccctgcctgatttgatgaacagcgaaggaatgcatacaaatgccatatacggtttttcaatgatgcttcttaaattgctggaggaggagaaaccagactacatagcaatagctttcgataaaaaggcttctacatttaggcacaaggagtacagtgcttataaaggaacccgccagtcgatgccagaagagctgatagaacaggtggatattttaaaagatgtgataaatgcatttaacataaagaccatcgagatagagggatttgaagcagatgatatcattggtacagtatcaaaaattgcttccgaaagtgggatggatgtgcttatcgtcacaggcgacagagatgcgcttcagcttgtgtcggcaaatgtaaaagtaaaaatatgtaaaaaaggcataacgcagatggatgagtacgatgaaaaggcggtctttgaaaagtatgaagtgacgccgcttcaattcatagacttgaaagggcttatgggagacaaatcagacaacattccaggagtgcccaatataggggagaagacggccataaagcttgttaaagaatttggatcaattgaaaatttactgatgaatacagataagttaaaagggaaaataaaagaaaatgtagaaaacaatgcagaattagctgttttaagcaaacggcttgctacgattgagagaaatgttcctattgatattgatttgaatgaatacgcggttaaaaattacgatgtcaataagcttacagagctatttgaaaaattggaattttcaagcctcatctcagatttaaaagatgatagtcgtgatacaaaggatattaaagaatggcctgtaagagattttacatacgttaaaaatgttttaggaaagtttgatgttttgtcattgtatccattcatatatgatggaaagataaaagcagtatcatttgcttgcggtgacggatcgttttttgtagagattgatgattatgacaattttaaattgcttaataatgataagcttacgttgataggacacgatctgaaagattttttagtaaacatttcatactgcggtattgaacttaattgtaagattttagatacggccataatgacttatcttttaaatccgtctgagtcgaattacgacataagtcgcgtattgaaaaaatacttgaaagaggatttgcaaaacatagatgatatagtaggcaagggcaggaataaaaagagctacgatgacattgacaaaaagcttttagtcgattatatgtgttcagccgcatcaaacttatctaagttaaaagataagctcatgtcatttataaaagagatggagatggaagatcttttaaaaaatgtggaaattccgcttattgaagtgctaaaatctatggaggtgtacggctttacattagataaagatgtacttagaagtatttctaaagaaatagatgaaaagacagataagattgtaaaagatatttacgatgctgctggatacgaatttaatattaactctacaaagcagttatcagaatttttgtttgataaactgaatttgccagcaataaaaaagactaaaacagggtattcgactgacatggaagtccttgcagaacttataccgtacaatgacatagtaggagaaataatagaatatagacagcttatgaagcttaaatctacgtacatagatggcttcattcccatcatggatgaaaataatagggtccactctacgtttaaacaaacagttgctgctacagggagaattagctcaacagagcctaatctgcagaacatacctgtaagagaagaatttggcaggaggataagaaaggcatttgtatcaagttatgaagatgggcttataatatctgctgattattctcagattgagctaagggttcttgcacatctttcagaggatgaaaaacttattgagtcatttttgaacaacgaagatatacatttaaggacggcatcggaggtttttaaggtttcgaaagaagaagtgacaagtgaaatgagaaggcgggcgaaagctgtcaactttggtattgtatatggtataagcgattacggcttatctaaagacttaaagatttcgcgaaaagaagcgaaagaatacatagacaattattttgacaggtacaagggcgtcaaaaattacatcgactcaattgtcaaatttgcaaaggaaaatgggtatgttacgactatcttaaataggagaagagaaataccggaaatcaattcaaaaaattttaaccaaagatcttttggcgagagaatggcaatgaatacacctattcaaggtagcgctgcggatataataaagatgtcgatggttaaagtatacaatgaattaaaggaaagaggattgaaatcaagacttattcttcaggtgcacgatgagcttataattgacacacatcctgatgaagttgaaatagtcaaggagcttctaaaatcaataatggaaaatatcataaagttgaaagttcctttagttgtagatatagggcaagggaaaaactggtatgatgcaaaataaaaggatcc

SEQ ID NO: 594 - DNA, 2678 bp, Artificial Sequence
  Description of Artificial Sequence: Synthetic Clostridium thermosulfurogenes DNA Polymerase Y785Q
atgaaatacctgctgccgaccgctgctgctggtctgctgctcctcgctgcccagccggcgatggccatggcgaaatttttgatcatagatggtaatagcttgatgtacagggcgtattttgccctgcctgatttgatgaacagcgaaggaatgcatacaaatgccatatacggtttttcaatgatgcttcttaaattgctggaggaggagaaaccagactacatagcaatagctttcgataaaaaggcttctacatttaggcacaaggagtacagtgcttataaaggaacccgccagtcgatgccagaagagctgatagaacaggtggatattttaaaagatgtgataaatgcatttaacataaagaccatcgagatagagggatttgaagcagatgatatcattggtacagtatcaaaaattgcttccgaaagtgggatggatgtgcttatcgtcacaggcgacagagatgcgcttcagcttgtgtcggcaaatgtaaaagtaaaaatatgtaaaaaaggcataacgcagatggatgagtacgatgaaaaggcggtctttgaaaagtatgaagtgacgccgcttcaattcatagacttgaaagggcttatgggagacaaatcagacaacattccaggagtgcccaatataggggagaagacggccataaagcttgttaaagaatttggatcaattgaaaatttactgatgaatacagataagttaaaagggaaaataaaagaaaatgtagaaaacaatgcagaattagctgttttaagcaaacggcttgctacgattgagagaaatgttcctattgatattgatttgaatgaatacgcggttaaaaattacgatgtcaataagcttacagagctatttgaaaaattggaattttcaagcctcatctcagatttaaaagatgatagtcgtgatacaaaggatattaaagaatggcctgtaagagattttacatacgttaaaaatgttttaggaaagtttgatgttttgtcattgtatccattcatatatgatggaaagataaaagcagtatcatttgcttgcggtgacggatcgttttttgtagagattgatgattatgacaattttaaattgcttaataatgataagcttacgttgataggacacgatctgaaagattttttagtaaacatttcatactgcggtattgaacttaattgtaagattttagatacggccataatgacttatcttttaaatccgtctgagtcgaattacgacataagtcgcgtattgaaaaaatacttgaaagaggatttgcaaaacatagatgatatagtaggcaagggcaggaataaaaagagctacgatgacattgacaaaaagcttttagtcgattatatgtgttcagccgcatcaaacttatctaagttaaaagataagctcatgtcatttataaaagagatggagatggaagatcttttaaaaaatgtggaaattccgcttattgaagtgctaaaatctatggaggtgtacggctttacattagataaagatgtacttagaagtatttctaaagaaatagatgaaaagacagataagattgtaaaagatatttacgatgctgctggatacgaatttaatattaactctacaaagcagttatcagaatttttgtttgataaactgaatttgccagcaataaaaaagactaaaacagggtattcgactgacatggaagtccttgcagaacttataccgtacaatgacatagtaggagaaataatagaatatagacagcttatgaagcttaaatctacgtacatagatggcttcattcccatcatggatgaaaataatagggtccactctacgtttaaacaaacagttgctgctacagggagaattagctcaacagagcctaatctgcagaacatacctgtaagagaagaatttggcaggaggataagaaaggcatttgtatcaagttatgaagatgggcttataatatctgctgattattctcagattgagctaagggttcttgcacatctttcagaggatgaaaaacttattgagtcatttttgaacaacgaagatatacatttaaggacggcatcggaggtttttaaggtttcgaaagaagaagtgacaagtgaaatgagaaggcgggcgaaagctgtcaactttggtattgtatatggtataagcgattacggcttatctaaagacttaaagatttcgcgaaaagaagcgaaagaatacatagacaattattttgacaggtacaagggcgtcaaaaattacatcgactcaattgtcaaatttgcaaaggaaaatgggtatgttacgactatcttaaataggagaagacaaataccggaaatcaattcaaaaaattttaaccaaagatcttttggcgagagaatggcaatgaatacacctattcaaggtagcgctgcggatataataaagatgtcgatggttaaagtatacaatgaattaaaggaaagaggattgaaatcaagacttattcttcaggtgcacgatgagcttataattgacacacatcctgatgaagttgaaatagtcaaggagcttctaaaatcaataatggaaaatatcataaagttgaaagttcctttagttgtagatatagggcaagggaaaaactggtatgatgcaaaataaaaggatcc

SEQ ID NO: 595 - DNA, 2678 bp, Artificial Sequence
  Description of Artificial Sequence: Synthetic Clostridium thermosulfurogenes DNA Polymerase Y785G
atgaaatacctgctgccgaccgctgctgctggtctgctgctcctcgctgcccagccggcgatggccatggcgaaatttttgatcatagatggtaatagcttgatgtacagggcgtattttgccctgcctgatttgatgaacagcgaaggaatgcatacaaatgccatatacggtttttcaatgatgcttcttaaattgctggaggaggagaaaccagactacatagcaatagctttcgataaaaaggcttctacatttaggcacaaggagtacagtgcttataaaggaacccgccagtcgatgccagaagagctgatagaacaggtggatattttaaaagatgtgataaatgcatttaacataaagaccatcgagatagagggatttgaagcagatgatatcattggtacagtatcaaaaattgcttccgaaagtgggatggatgtgcttatcgtcacaggcgacagagatgcgcttcagcttgtgtcggcaaatgtaaaagtaaaaatatgtaaaaaaggcataacgcagatggatgagtacgatgaaaaggcggtctttgaaaagtatgaagtgacgccgcttcaattcatagacttgaaagggcttatgggagacaaatcagacaacattccaggagtgcccaatataggggagaagacggccataaagcttgttaaagaatttggatcaattgaaaatttactgatgaatacagataagttaaaagggaaaataaaagaaaatgtagaaaacaatgcagaattagctgttttaagcaaacggcttgctacgattgagagaaatgttcctattgatattgatttgaatgaatacgcggttaaaaattacgatgtcaataagcttacagagctatttgaaaaattggaattttcaagcctcatctcagatttaaaagatgatagtcgtgatacaaaggatattaaagaatggcctgtaagagattttacatacgttaaaaatgttttaggaaagtttgatgttttgtcattgtatccattcatatatgatggaaagataaaagcagtatcatttgcttgcggtgacggatcgttttttgtagagattgatgattatgacaattttaaattgcttaataatgataagcttacgttgataggacacgatctgaaagattttttagtaaacatttcatactgcggtattgaacttaattgtaagattttagatacggccataatgacttatcttttaaatccgtctgagtcgaattacgacataagtcgcgtattgaaaaaatacttgaaagaggatttgcaaaacatagatgatatagtaggcaagggcaggaataaaaagagctacgatgacattgacaaaaagcttttagtcgattatatgtgttcagccgcatcaaacttatctaagttaaaagataagctcatgtcatttataaaagagatggagatggaagatcttttaaaaaatgtggaaattccgcttattgaagtgctaaaatctatggaggtgtacggctttacattagataaagatgtacttagaagtatttctaaagaaatagatgaaaagacagataagattgtaaaagatatttacgatgctgctggatacgaatttaatattaactctacaaagcagttatcagaatttttgtttgataaactgaatttgccagcaataaaaaagactaaaacagggtattcgactgacatggaagtccttgcagaacttataccgtacaatgacatagtaggagaaataatagaatatagacagcttatgaagcttaaatctacgtacatagatggcttcattcccatcatggatgaaaataatagggtccactctacgtttaaacaaacagttgctgctacagggagaattagctcaacagagcctaatctgcagaacatacctgtaagagaagaatttggcaggaggataagaaaggcatttgtatcaagttatgaagatgggcttataatatctgctgattattctcagattgagctaagggttcttgcacatctttcagaggatgaaaaacttattgagtcatttttgaacaacgaagatatacatttaaggacggcatcggaggtttttaaggtttcgaaagaagaagtgacaagtgaaatgagaaggcgggcgaaagctgtcaactttggtattgtatatggtataagcgattacggcttatctaaagacttaaagatttcgcgaaaagaagcgaaagaatacatagacaattattttgacaggtacaagggcgtcaaaaattacatcgactcaattgtcaaatttgcaaaggaaaatgggtatgttacgactatcttaaataggagaagaggtataccggaaatcaattcaaaaaattttaaccaaagatcttttggcgagagaatggcaatgaatacacctattcaaggtagcgctgcggatataataaagatgtcgatggttaaagtatacaatgaattaaaggaaagaggattgaaatcaagacttattcttcaggtgcacgatgagcttataattgacacacatcctgatgaagttgaaatagtcaaggagcttctaaaatcaataatggaaaatatcataaagttgaaagttcctttagttgtagatatagggcaagggaaaaactggtatgatgcaaaataaaaggatcc

SEQ ID NO: 596 - DNA, 2678 bp, Artificial Sequence
  Description of Artificial Sequence: Synthetic Clostridium thermosulfurogenes DNA Polymerase Y785H
atgaaatacctgctgccgaccgctgctgctggtctgctgctcctcgctgcccagccggcgatggccatggcgaaatttttgatcatagatggtaatagcttgatgtacagggcgtattttgccctgcctgatttgatgaacagcgaaggaatgcatacaaatgccatatacggtttttcaatgatgcttcttaaattgctggaggaggagaaaccagactacatagcaatagctttcgataaaaaggcttctacatttaggcacaaggagtacagtgcttataaaggaacccgccagtcgatgccagaagagctgatagaacaggtggatattttaaaagatgtgataaatgcatttaacataaagaccatcgagatagagggatttgaagcagatgatatcattggtacagtatcaaaaattgcttccgaaagtgggatggatgtgcttatcgtcacaggcgacagagatgcgcttcagcttgtgtcggcaaatgtaaaagtaaaaatatgtaaaaaaggcataacgcagatggatgagtacgatgaaaaggcggtctttgaaaagtatgaagtgacgccgcttcaattcatagacttgaaagggcttatgggagacaaatcagacaacattccaggagtgcccaatataggggagaagacggccataaagcttgttaaagaatttggatcaattgaaaatttactgatgaatacagataagttaaaagggaaaataaaagaaaatgtagaaaacaatgcagaattagctgttttaagcaaacggcttgctacgattgagagaaatgttcctattgatattgatttgaatgaatacgcggttaaaaattacgatgtcaataagcttacagagctatttgaaaaattggaattttcaagcctcatctcagatttaaaagatgatagtcgtgatacaaaggatattaaagaatggcctgtaagagattttacatacgttaaaaatgttttaggaaagtttgatgttttgtcattgtatccattcatatatgatggaaagataaaagcagtatcatttgcttgcggtgacggatcgttttttgtagagattgatgattatgacaattttaaattgcttaataatgataagcttacgttgataggacacgatctgaaagattttttagtaaacatttcatactgcggtattgaacttaattgtaagattttagatacggccataatgacttatcttttaaatccgtctgagtcgaattacgacataagtcgcgtattgaaaaaatacttgaaagaggatttgcaaaacatagatgatatagtaggcaagggcaggaataaaaagagctacgatgacattgacaaaaagcttttagtcgattatatgtgttcagccgcatcaaacttatctaagttaaaagataagctcatgtcatttataaaagagatggagatggaagatcttttaaaaaatgtggaaattccgcttattgaagtgctaaaatctatggaggtgtacggctttacattagataaagatgtacttagaagtatttctaaagaaatagatgaaaagacagataagattgtaaaagatatttacgatgctgctggatacgaatttaatattaactctacaaagcagttatcagaatttttgtttgataaactgaatttgccagcaataaaaaagactaaaacagggtattcgactgacatggaagtccttgcagaacttataccgtacaatgacatagtaggagaaataatagaatatagacagcttatgaagcttaaatctacgtacatagatggcttcattcccatcatggatgaaaataatagggtccactctacgtttaaacaaacagttgctgctacagggagaattagctcaacagagcctaatctgcagaacatacctgtaagagaagaatttggcaggaggataagaaaggcatttgtatcaagttatgaagatgggcttataatatctgctgattattctcagattgagctaagggttcttgcacatctttcagaggatgaaaaacttattgagtcatttttgaacaacgaagatatacatttaaggacggcatcggaggtttttaaggtttcgaaagaagaagtgacaagtgaaatgagaaggcgggcgaaagctgtcaactttggtattgtatatggtataagcgattacggcttatctaaagacttaaagatttcgcgaaaagaagcgaaagaatacatagacaattattttgacaggtacaagggcgtcaaaaattacatcgactcaattgtcaaatttgcaaaggaaaatgggtatgttacgactatcttaaataggagaagacatataccggaaatcaattcaaaaaattttaaccaaagatcttttggcgagagaatggcaatgaatacacctattcaaggtagcgctgcggatataataaagatgtcgatggttaaagtatacaatgaattaaaggaaagaggattgaaatcaagacttattcttcaggtgcacgatgagcttataattgacacacatcctgatgaagttgaaatagtcaaggagcttctaaaatcaataatggaaaatatcataaagttgaaagttcctttagttgtagatatagggcaagggaaaaactggtatgatgcaaaataaaaggatcc

SEQ ID NO: 597 - DNA, 2678 bp, Artificial Sequence
  Description of Artificial Sequence: Synthetic Clostridium thermosulfurogenes DNA Polymerase Y785I
atgaaatacctgctgccgaccgctgctgctggtctgctgctcctcgctgcccagccggcgatggccatggcgaaatttttgatcatagatggtaatagcttgatgtacagggcgtattttgccctgcctgatttgatgaacagcgaaggaatgcatacaaatgccatatacggtttttcaatgatgcttcttaaattgctggaggaggagaaaccagactacatagcaatagctttcgataaaaaggcttctacatttaggcacaaggagtacagtgcttataaaggaacccgccagtcgatgccagaagagctgatagaacaggtggatattttaaaagatgtgataaatgcatttaacataaagaccatcgagatagagggatttgaagcagatgatatcattggtacagtatcaaaaattgcttccgaaagtgggatggatgtgcttatcgtcacaggcgacagagatgcgcttcagcttgtgtcggcaaatgtaaaagtaaaaatatgtaaaaaaggcataacgcagatggatgagtacgatgaaaaggcggtctttgaaaagtatgaagtgacgccgcttcaattcatagacttgaaagggcttatgggagacaaatcagacaacattccaggagtgcccaatataggggagaagacggccataaagcttgttaaagaatttggatcaattgaaaatttactgatgaatacagataagttaaaagggaaaataaaagaaaatgtagaaaacaatgcagaattagctgttttaagcaaacggcttgctacgattgagagaaatgttcctattgatattgatttgaatgaatacgcggttaaaaattacgatgtcaataagcttacagagctatttgaaaaattggaattttcaagcctcatctcagatttaaaagatgatagtcgtgatacaaaggatattaaagaatggcctgtaagagattttacatacgttaaaaatgttttaggaaagtttgatgttttgtcattgtatccattcatatatgatggaaagataaaagcagtatcatttgcttgcggtgacggatcgttttttgtagagattgatgattatgacaattttaaattgcttaataatgataagcttacgttgataggacacgatctgaaagattttttagtaaacatttcatactgcggtattgaacttaattgtaagattttagatacggccataatgacttatcttttaaatccgtctgagtcgaattacgacataagtcgcgtattgaaaaaatacttgaaagaggatttgcaaaacatagatgatatagtaggcaagggcaggaataaaaagagctacgatgacattgacaaaaagcttttagtcgattatatgtgttcagccgcatcaaacttatctaagttaaaagataagctcatgtcatttataaaagagatggagatggaagatcttttaaaaaatgtggaaattccgcttattgaagtgctaaaatctatggaggtgtacggctttacattagataaagatgtacttagaagtatttctaaagaaatagatgaaaagacagataagattgtaaaagatatttacgatgctgctggatacgaatttaatattaactctacaaagcagttatcagaatttttgtttgataaactgaatttgccagcaataaaaaagactaaaacagggtattcgactgacatggaagtccttgcagaacttataccgtacaatgacatagtaggagaaataatagaatatagacagcttatgaagcttaaatctacgtacatagatggcttcattcccatcatggatgaaaataatagggtccactctacgtttaaacaaacagttgctgctacagggagaattagctcaacagagcctaatctgcagaacatacctgtaagagaagaatttggcaggaggataagaaaggcatttgtatcaagttatgaagatgggcttataatatctgctgattattctcagattgagctaagggttcttgcacatctttcagaggatgaaaaacttattgagtcatttttgaacaacgaagatatacatttaaggacggcatcggaggtttttaaggtttcgaaagaagaagtgacaagtgaaatgagaaggcgggcgaaagctgtcaactttggtattgtatatggtataagcgattacggcttatctaaagacttaaagatttcgcgaaaagaagcgaaagaatacatagacaattattttgacaggtacaagggcgtcaaaaattacatcgactcaattgtcaaatttgcaaaggaaaatgggtatgttacgactatcttaaataggagaagaattataccggaaatcaattcaaaaaattttaaccaaagatcttttggcgagagaatggcaatgaatacacctattcaaggtagcgctgcggatataataaagatgtcgatggttaaagtatacaatgaattaaaggaaagaggattgaaatcaagacttattcttcaggtgcacgatgagcttataattgacacacatcctgatgaagttgaaatagtcaaggagcttctaaaatcaataatggaaaatatcataaagttgaaagttcctttagttgtagatatagggcaagggaaaaactggtatgatgcaaaataaaaggatcc

SEQ ID NO: 598 - DNA, 2678 bp, Artificial Sequence
  Description of Artificial Sequence: Synthetic Clostridium thermosulfurogenes DNA Polymerase Y785L
atgaaatacctgctgccgaccgctgctgctggtctgctgctcctcgctgcccagccggcgatggccatggcgaaatttttgatcatagatggtaatagcttgatgtacagggcgtattttgccctgcctgatttgatgaacagcgaaggaatgcatacaaatgccatatacggtttttcaatgatgcttcttaaattgctggaggaggagaaaccagactacatagcaatagctttcgataaaaaggcttctacatttaggcacaaggagtacagtgcttataaaggaacccgccagtcgatgccagaagagctgatagaacaggtggatattttaaaagatgtgataaatgcatttaacataaagaccatcgagatagagggatttgaagcagatgatatcattggtacagtatcaaaaattgcttccgaaagtgggatggatgtgcttatcgtcacaggcgacagagatgcgcttcagcttgtgtcggcaaatgtaaaagtaaaaatatgtaaaaaaggcataacgcagatggatgagtacgatgaaaaggcggtctttgaaaagtatgaagtgacgccgcttcaattcatagacttgaaagggcttatgggagacaaatcagacaacattccaggagtgcccaatataggggagaagacggccataaagcttgttaaagaatttggatcaattgaaaatttactgatgaatacagataagttaaaagggaaaataaaagaaaatgtagaaaacaatgcagaattagctgttttaagcaaacggcttgctacgattgagagaaatgttcctattgatattgatttgaatgaatacgcggttaaaaattacgatgtcaataagcttacagagctatttgaaaaattggaattttcaagcctcatctcagatttaaaagatgatagtcgtgatacaaaggatattaaagaatggcctgtaagagattttacatacgttaaaaatgttttaggaaagtttgatgttttgtcattgtatccattcatatatgatggaaagataaaagcagtatcatttgcttgcggtgacggatcgttttttgtagagattgatgattatgacaattttaaattgcttaataatgataagcttacgttgataggacacgatctgaaagattttttagtaaacatttcatactgcggtattgaacttaattgtaagattttagatacggccataatgacttatcttttaaatccgtctgagtcgaattacgacataagtcgcgtattgaaaaaatacttgaaagaggatttgcaaaacatagatgatatagtaggcaagggcaggaataaaaagagctacgatgacattgacaaaaagcttttagtcgattatatgtgttcagccgcatcaaacttatctaagttaaaagataagctcatgtcatttataaaagagatggagatggaagatcttttaaaaaatgtggaaattccgcttattgaagtgctaaaatctatggaggtgtacggctttacattagataaagatgtacttagaagtatttctaaagaaatagatgaaaagacagataagattgtaaaagatatttacgatgctgctggatacgaatttaatattaactctacaaagcagttatcagaatttttgtttgataaactgaatttgccagcaataaaaaagactaaaacagggtattcgactgacatggaagtccttgcagaacttataccgtacaatgacatagtaggagaaataatagaatatagacagcttatgaagcttaaatctacgtacatagatggcttcattcccatcatggatgaaaataatagggtccactctacgtttaaacaaacagttgctgctacagggagaattagctcaacagagcctaatctgcagaacatacctgtaagagaagaatttggcaggaggataagaaaggcatttgtatcaagttatgaagatgggcttataatatctgctgattattctcagattgagctaagggttcttgcacatctttcagaggatgaaaaacttattgagtcatttttgaacaacgaagatatacatttaaggacggcatcggaggtttttaaggtttcgaaagaagaagtgacaagtgaaatgagaaggcgggcgaaagctgtcaactttggtattgtatatggtataagcgattacggcttatctaaagacttaaagatttcgcgaaaagaagcgaaagaatacatagacaattattttgacaggtacaagggcgtcaaaaattacatcgactcaattgtcaaatttgcaaaggaaaatgggtatgttacgactatcttaaataggagaagacttataccggaaatcaattcaaaaaattttaaccaaagatcttttggcgagagaatggcaatgaatacacctattcaaggtagcgctgcggatataataaagatgtcgatggttaaagtatacaatgaattaaaggaaagaggattgaaatcaagacttattcttcaggtgcacgatgagcttataattgacacacatcctgatgaagttgaaatagtcaaggagcttctaaaatcaataatggaaaatatcataaagttgaaagttcctttagttgtagatatagggcaagggaaaaactggtatgatgcaaaataaaaggatcc

SEQ ID NO: 599 - DNA, 2678 bp, Artificial Sequence
  Description of Artificial Sequence: Synthetic Clostridium thermosulfurogenes DNA Polymerase Y785K
atgaaatacctgctgccgaccgctgctgctggtctgctgctcctcgctgcccagccggcgatggccatggcgaaatttttgatcatagatggtaatagcttgatgtacagggcgtattttgccctgcctgatttgatgaacagcgaaggaatgcatacaaatgccatatacggtttttcaatgatgcttcttaaattgctggaggaggagaaaccagactacatagcaatagctttcgataaaaaggcttctacatttaggcacaaggagtacagtgcttataaaggaacccgccagtcgatgccagaagagctgatagaacaggtggatattttaaaagatgtgataaatgcatttaacataaagaccatcgagatagagggatttgaagcagatgatatcattggtacagtatcaaaaattgcttccgaaagtgggatggatgtgcttatcgtcacaggcgacagagatgcgcttcagcttgtgtcggcaaatgtaaaagtaaaaatatgtaaaaaaggcataacgcagatggatgagtacgatgaaaaggcggtctttgaaaagtatgaagtgacgccgcttcaattcatagacttgaaagggcttatgggagacaaatcagacaacattccaggagtgcccaatataggggagaagacggccataaagcttgttaaagaatttggatcaattgaaaatttactgatgaatacagataagttaaaagggaaaataaaagaaaatgtagaaaacaatgcagaattagctgttttaagcaaacggcttgctacgattgagagaaatgttcctattgatattgatttgaatgaatacgcggttaaaaattacgatgtcaataagcttacagagctatttgaaaaattggaattttcaagcctcatctcagatttaaaagatgatagtcgtgatacaaaggatattaaagaatggcctgtaagagattttacatacgttaaaaatgttttaggaaagtttgatgttttgtcattgtatccattcatatatgatggaaagataaaagcagtatcatttgcttgcggtgacggatcgttttttgtagagattgatgattatgacaattttaaattgcttaataatgataagcttacgttgataggacacgatctgaaagattttttagtaaacatttcatactgcggtattgaacttaattgtaagattttagatacggccataatgacttatcttttaaatccgtctgagtcgaattacgacataagtcgcgtattgaaaaaatacttgaaagaggatttgcaaaacatagatgatatagtaggcaagggcaggaataaaaagagctacgatgacattgacaaaaagcttttagtcgattatatgtgttcagccgcatcaaacttatctaagttaaaagataagctcatgtcatttataaaagagatggagatggaagatcttttaaaaaatgtggaaattccgcttattgaagtgctaaaatctatggaggtgtacggctttacattagataaagatgtacttagaagtatttctaaagaaatagatgaaaagacagataagattgtaaaagatatttacgatgctgctggatacgaatttaatattaactctacaaagcagttatcagaatttttgtttgataaactgaatttgccagcaataaaaaagactaaaacagggtattcgactgacatggaagtccttgcagaacttataccgtacaatgacatagtaggagaaataatagaatatagacagcttatgaagcttaaatctacgtacatagatggcttcattcccatcatggatgaaaataatagggtccactctacgtttaaacaaacagttgctgctacagggagaattagctcaacagagcctaatctgcagaacatacctgtaagagaagaatttggcaggaggataagaaaggcatttgtatcaagttatgaagatgggcttataatatctgctgattattctcagattgagctaagggttcttgcacatctttcagaggatgaaaaacttattgagtcatttttgaacaacgaagatatacatttaaggacggcatcggaggtttttaaggtttcgaaagaagaagtgacaagtgaaatgagaaggcgggcgaaagctgtcaactttggtattgtatatggtataagcgattacggcttatctaaagacttaaagatttcgcgaaaagaagcgaaagaatacatagacaattattttgacaggtacaagggcgtcaaaaattacatcgactcaattgtcaaatttgcaaaggaaaatgggtatgttacgactatcttaaataggagaagaaaaataccggaaatcaattcaaaaaattttaaccaaagatcttttggcgagagaatggcaatgaatacacctattcaaggtagcgctgcggatataataaagatgtcgatggttaaagtatacaatgaattaaaggaaagaggattgaaatcaagacttattcttcaggtgcacgatgagcttataattgacacacatcctgatgaagttgaaatagtcaaggagcttctaaaatcaataatggaaaatatcataaagttgaaagttcctttagttgtagatatagggcaagggaaaaactggtatgatgcaaaataaaaggatcc

SEQ ID NO: 600 - DNA, 2678 bp, Artificial Sequence
  Description of Artificial Sequence: Synthetic Clostridium thermosulfurogenes DNA Polymerase Y785M
atgaaatacctgctgccgaccgctgctgctggtctgctgctcctcgctgcccagccggcgatggccatggcgaaatttttgatcatagatggtaatagcttgatgtacagggcgtattttgccctgcctgatttgatgaacagcgaaggaatgcatacaaatgccatatacggtttttcaatgatgcttcttaaattgctggaggaggagaaaccagactacatagcaatagctttcgataaaaaggcttctacatttaggcacaaggagtacagtgcttataaaggaacccgccagtcgatgccagaagagctgatagaacaggtggatattttaaaagatgtgataaatgcatttaacataaagaccatcgagatagagggatttgaagcagatgatatcattggtacagtatcaaaaattgcttccgaaagtgggatggatgtgcttatcgtcacaggcgacagagatgcgcttcagcttgtgtcggcaaatgtaaaagtaaaaatatgtaaaaaaggcataacgcagatggatgagtacgatgaaaaggcggtctttgaaaagtatgaagtgacgccgcttcaattcatagacttgaaagggcttatgggagacaaatcagacaacattccaggagtgcccaatataggggagaagacggccataaagcttgttaaagaatttggatcaattgaaaatttactgatgaatacagataagttaaaagggaaaataaaagaaaatgtagaaaacaatgcagaattagctgttttaagcaaacggcttgctacgattgagagaaatgttcctattgatattgatttgaatgaatacgcggttaaaaattacgatgtcaataagcttacagagctatttgaaaaattggaattttcaagcctcatctcagatttaaaagatgatagtcgtgatacaaaggatattaaagaatggcctgtaagagattttacatacgttaaaaatgttttaggaaagtttgatgttttgtcattgtatccattcatatatgatggaaagataaaagcagtatcatttgcttgcggtgacggatcgttttttgtagagattgatgattatgacaattttaaattgcttaataatgataagcttacgttgataggacacgatctgaaagattttttagtaaacatttcatactgcggtattgaacttaattgtaagattttagatacggccataatgacttatcttttaaatccgtctgagtcgaattacgacataagtcgcgtattgaaaaaatacttgaaagaggatttgcaaaacatagatgatatagtaggcaagggcaggaataaaaagagctacgatgacattgacaaaaagcttttagtcgattatatgtgttcagccgcatcaaacttatctaagttaaaagataagctcatgtcatttataaaagagatggagatggaagatcttttaaaaaatgtggaaattccgcttattgaagtgctaaaatctatggaggtgtacggctttacattagataaagatgtacttagaagtatttctaaagaaatagatgaaaagacagataagattgtaaaagatatttacgatgctgctggatacgaatttaatattaactctacaaagcagttatcagaatttttgtttgataaactgaatttgccagcaataaaaaagactaaaacagggtattcgactgacatggaagtccttgcagaacttataccgtacaatgacatagtaggagaaataatagaatatagacagcttatgaagcttaaatctacgtacatagatggcttcattcccatcatggatgaaaataatagggtccactctacgtttaaacaaacagttgctgctacagggagaattagctcaacagagcctaatctgcagaacatacctgtaagagaagaatttggcaggaggataagaaaggcatttgtatcaagttatgaagatgggcttataatatctgctgattattctcagattgagctaagggttcttgcacatctttcagaggatgaaaaacttattgagtcatttttgaacaacgaagatatacatttaaggacggcatcggaggtttttaaggtttcgaaagaagaagtgacaagtgaaatgagaaggcgggcgaaagctgtcaactttggtattgtatatggtataagcgattacggcttatctaaagacttaaagatttcgcgaaaagaagcgaaagaatacatagacaattattttgacaggtacaagggcgtcaaaaattacatcgactcaattgtcaaatttgcaaaggaaaatgggtatgttacgactatcttaaataggagaagaatgataccggaaatcaattcaaaaaattttaaccaaagatcttttggcgagagaatggcaatgaatacacctattcaaggtagcgctgcggatataataaagatgtcgatggttaaagtatacaatgaattaaaggaaagaggattgaaatcaagacttattcttcaggtgcacgatgagcttataattgacacacatcctgatgaagttgaaatagtcaaggagcttctaaaatcaataatggaaaatatcataaagttgaaagttcctttagttgtagatatagggcaagggaaaaactggtatgatgcaaaataaaaggatcc

SEQ ID NO: 601 - DNA, 2678 bp, Artificial Sequence
  Description of Artificial Sequence: Synthetic Clostridium thermosulfurogenes DNA Polymerase Y785F
atgaaatacctgctgccgaccgctgctgctggtctgctgctcctcgctgcccagccggcgatggccatggcgaaatttttgatcatagatggtaatagcttgatgtacagggcgtattttgccctgcctgatttgatgaacagcgaaggaatgcatacaaatgccatatacggtttttcaatgatgcttcttaaattgctggaggaggagaaaccagactacatagcaatagctttcgataaaaaggcttctacatttaggcacaaggagtacagtgcttataaaggaacccgccagtcgatgccagaagagctgatagaacaggtggatattttaaaagatgtgataaatgcatttaacataaagaccatcgagatagagggatttgaagcagatgatatcattggtacagtatcaaaaattgcttccgaaagtgggatggatgtgcttatcgtcacaggcgacagagatgcgcttcagcttgtgtcggcaaatgtaaaagtaaaaatatgtaaaaaaggcataacgcagatggatgagtacgatgaaaaggcggtctttgaaaagtatgaagtgacgccgcttcaattcatagacttgaaagggcttatgggagacaaatcagacaacattccaggagtgcccaatataggggagaagacggccataaagcttgttaaagaatttggatcaattgaaaatttactgatgaatacagataagttaaaagggaaaataaaagaaaatgtagaaaacaatgcagaattagctgttttaagcaaacggcttgctacgattgagagaaatgttcctattgatattgatttgaatgaatacgcggttaaaaattacgatgtcaataagcttacagagctatttgaaaaattggaattttcaagcctcatctcagatttaaaagatgatagtcgtgatacaaaggatattaaagaatggcctgtaagagattttacatacgttaaaaatgttttaggaaagtttgatgttttgtcattgtatccattcatatatgatggaaagataaaagcagtatcatttgcttgcggtgacggatcgttttttgtagagattgatgattatgacaattttaaattgcttaataatgataagcttacgttgataggacacgatctgaaagattttttagtaaacatttcatactgcggtattgaacttaattgtaagattttagatacggccataatgacttatcttttaaatccgtctgagtcgaattacgacataagtcgcgtattgaaaaaatacttgaaagaggatttgcaaaacatagatgatatagtaggcaagggcaggaataaaaagagctacgatgacattgacaaaaagcttttagtcgattatatgtgttcagccgcatcaaacttatctaagttaaaagataagctcatgtcatttataaaagagatggagatggaagatcttttaaaaaatgtggaaattccgcttattgaagtgctaaaatctatggaggtgtacggctttacattagataaagatgtacttagaagtatttctaaagaaatagatgaaaagacagataagattgtaaaagatatttacgatgctgctggatacgaatttaatattaactctacaaagcagttatcagaatttttgtttgataaactgaatttgccagcaataaaaaagactaaaacagggtattcgactgacatggaagtccttgcagaacttataccgtacaatgacatagtaggagaaataatagaatatagacagcttatgaagcttaaatctacgtacatagatggcttcattcccatcatggatgaaaataatagggtccactctacgtttaaacaaacagttgctgctacagggagaattagctcaacagagcctaatctgcagaacatacctgtaagagaagaatttggcaggaggataagaaaggcatttgtatcaagttatgaagatgggcttataatatctgctgattattctcagattgagctaagggttcttgcacatctttcagaggatgaaaaacttattgagtcatttttgaacaacgaagatatacatttaaggacggcatcggaggtttttaaggtttcgaaagaagaagtgacaagtgaaatgagaaggcgggcgaaagctgtcaactttggtattgtatatggtataagcgattacggcttatctaaagacttaaagatttcgcgaaaagaagcgaaagaatacatagacaattattttgacaggtacaagggcgtcaaaaattacatcgactcaattgtcaaatttgcaaaggaaaatgggtatgttacgactatcttaaataggagaagatttataccggaaatcaattcaaaaaattttaaccaaagatcttttggcgagagaatggcaatgaatacacctattcaaggtagcgctgcggatataataaagatgtcgatggttaaagtatacaatgaattaaaggaaagaggattgaaatcaagacttattcttcaggtgcacgatgagcttataattgacacacatcctgatgaagttgaaatagtcaaggagcttctaaaatcaataatggaaaatatcataaagttgaaagttcctttagttgtagatatagggcaagggaaaaactggtatgatgcaaaataaaaggatcc

SEQ ID NO: 602 - DNA, 2678 bp, Artificial Sequence
  Description of Artificial Sequence: Synthetic Clostridium thermosulfurogenes DNA Polymerase Y785P
atgaaatacctgctgccgaccgctgctgctggtctgctgctcctcgctgcccagccggcgatggccatggcgaaatttttgatcatagatggtaatagcttgatgtacagggcgtattttgccctgcctgatttgatgaacagcgaaggaatgcatacaaatgccatatacggtttttcaatgatgcttcttaaattgctggaggaggagaaaccagactacatagcaatagctttcgataaaaaggcttctacatttaggcacaaggagtacagtgcttataaaggaacccgccagtcgatgccagaagagctgatagaacaggtggatattttaaaagatgtgataaatgcatttaacataaagaccatcgagatagagggatttgaagcagatgatatcattggtacagtatcaaaaattgcttccgaaagtgggatggatgtgcttatcgtcacaggcgacagagatgcgcttcagcttgtgtcggcaaatgtaaaagtaaaaatatgtaaaaaaggcataacgcagatggatgagtacgatgaaaaggcggtctttgaaaagtatgaagtgacgccgcttcaattcatagacttgaaagggcttatgggagacaaatcagacaacattccaggagtgcccaatataggggagaagacggccataaagcttgttaaagaatttggatcaattgaaaatttactgatgaatacagataagttaaaagggaaaataaaagaaaatgtagaaaacaatgcagaattagctgttttaagcaaacggcttgctacgattgagagaaatgttcctattgatattgatttgaatgaatacgcggttaaaaattacgatgtcaataagcttacagagctatttgaaaaattggaattttcaagcctcatctcagatttaaaagatgatagtcgtgatacaaaggatattaaagaatggcctgtaagagattttacatacgttaaaaatgttttaggaaagtttgatgttttgtcattgtatccattcatatatgatggaaagataaaagcagtatcatttgcttgcggtgacggatcgttttttgtagagattgatgattatgacaattttaaattgcttaataatgataagcttacgttgataggacacgatctgaaagattttttagtaaacatttcatactgcggtattgaacttaattgtaagattttagatacggccataatgacttatcttttaaatccgtctgagtcgaattacgacataagtcgcgtattgaaaaaatacttgaaagaggatttgcaaaacatagatgatatagtaggcaagggcaggaataaaaagagctacgatgacattgacaaaaagcttttagtcgattatatgtgttcagccgcatcaaacttatctaagttaaaagataagctcatgtcatttataaaagagatggagatggaagatcttttaaaaaatgtggaaattccgcttattgaagtgctaaaatctatggaggtgtacggctttacattagataaagatgtacttagaagtatttctaaagaaatagatgaaaagacagataagattgtaaaagatatttacgatgctgctggatacgaatttaatattaactctacaaagcagttatcagaatttttgtttgataaactgaatttgccagcaataaaaaagactaaaacagggtattcgactgacatggaagtccttgcagaacttataccgtacaatgacatagtaggagaaataatagaatatagacagcttatgaagcttaaatctacgtacatagatggcttcattcccatcatggatgaaaataatagggtccactctacgtttaaacaaacagttgctgctacagggagaattagctcaacagagcctaatctgcagaacatacctgtaagagaagaatttggcaggaggataagaaaggcatttgtatcaagttatgaagatgggcttataatatctgctgattattctcagattgagctaagggttcttgcacatctttcagaggatgaaaaacttattgagtcatttttgaacaacgaagatatacatttaaggacggcatcggaggtttttaaggtttcgaaagaagaagtgacaagtgaaatgagaaggcgggcgaaagctgtcaactttggtattgtatatggtataagcgattacggcttatctaaagacttaaagatttcgcgaaaagaagcgaaagaatacatagacaattattttgacaggtacaagggcgtcaaaaattacatcgactcaattgtcaaatttgcaaaggaaaatgggtatgttacgactatcttaaataggagaagacctataccggaaatcaattcaaaaaattttaaccaaagatcttttggcgagagaatggcaatgaatacacctattcaaggtagcgctgcggatataataaagatgtcgatggttaaagtatacaatgaattaaaggaaagaggattgaaatcaagacttattcttcaggtgcacgatgagcttataattgacacacatcctgatgaagttgaaatagtcaaggagcttctaaaatcaataatggaaaatatcataaagttgaaagttcctttagttgtagatatagggcaagggaaaaactggtatgatgcaaaataaaaggatcc

SEQ ID NO: 603 - DNA, 2678 bp, Artificial Sequence
  Description of Artificial Sequence: Synthetic Clostridium thermosulfurogenes DNA Polymerase Y785S
atgaaatacctgctgccgaccgctgctgctggtctgctgctcctcgctgcccagccggcgatggccatggcgaaatttttgatcatagatggtaatagcttgatgtacagggcgtattttgccctgcctgatttgatgaacagcgaaggaatgcatacaaatgccatatacggtttttcaatgatgcttcttaaattgctggaggaggagaaaccagactacatagcaatagctttcgataaaaaggcttctacatttaggcacaaggagtacagtgcttataaaggaacccgccagtcgatgccagaagagctgatagaacaggtggatattttaaaagatgtgataaatgcatttaacataaagaccatcgagatagagggatttgaagcagatgatatcattggtacagtatcaaaaattgcttccgaaagtgggatggatgtgcttatcgtcacaggcgacagagatgcgcttcagcttgtgtcggcaaatgtaaaagtaaaaatatgtaaaaaaggcataacgcagatggatgagtacgatgaaaaggcggtctttgaaaagtatgaagtgacgccgcttcaattcatagacttgaaagggcttatgggagacaaatcagacaacattccaggagtgcccaatataggggagaagacggccataaagcttgttaaagaatttggatcaattgaaaatttactgatgaatacagataagttaaaagggaaaataaaagaaaatgtagaaaacaatgcagaattagctgttttaagcaaacggcttgctacgattgagagaaatgttcctattgatattgatttgaatgaatacgcggttaaaaattacgatgtcaataagcttacagagctatttgaaaaattggaattttcaagcctcatctcagatttaaaagatgatagtcgtgatacaaaggatattaaagaatggcctgtaagagattttacatacgttaaaaatgttttaggaaagtttgatgttttgtcattgtatccattcatatatgatggaaagataaaagcagtatcatttgcttgcggtgacggatcgttttttgtagagattgatgattatgacaattttaaattgcttaataatgataagcttacgttgataggacacgatctgaaagattttttagtaaacatttcatactgcggtattgaacttaattgtaagattttagatacggccataatgacttatcttttaaatccgtctgagtcgaattacgacataagtcgcgtattgaaaaaatacttgaaagaggatttgcaaaacatagatgatatagtaggcaagggcaggaataaaaagagctacgatgacattgacaaaaagcttttagtcgattatatgtgttcagccgcatcaaacttatctaagttaaaagataagctcatgtcatttataaaagagatggagatggaagatcttttaaaaaatgtggaaattccgcttattgaagtgctaaaatctatggaggtgtacggctttacattagataaagatgtacttagaagtatttctaaagaaatagatgaaaagacagataagattgtaaaagatatttacgatgctgctggatacgaatttaatattaactctacaaagcagttatcagaatttttgtttgataaactgaatttgccagcaataaaaaagactaaaacagggtattcgactgacatggaagtccttgcagaacttataccgtacaatgacatagtaggagaaataatagaatatagacagcttatgaagcttaaatctacgtacatagatggcttcattcccatcatggatgaaaataatagggtccactctacgtttaaacaaacagttgctgctacagggagaattagctcaacagagcctaatctgcagaacatacctgtaagagaagaatttggcaggaggataagaaaggcatttgtatcaagttatgaagatgggcttataatatctgctgattattctcagattgagctaagggttcttgcacatctttcagaggatgaaaaacttattgagtcatttttgaacaacgaagatatacatttaaggacggcatcggaggtttttaaggtttcgaaagaagaagtgacaagtgaaatgagaaggcgggcgaaagctgtcaactttggtattgtatatggtataagcgattacggcttatctaaagacttaaagatttcgcgaaaagaagcgaaagaatacatagacaattattttgacaggtacaagggcgtcaaaaattacatcgactcaattgtcaaatttgcaaaggaaaatgggtatgttacgactatcttaaataggagaagatctataccggaaatcaattcaaaaaattttaaccaaagatcttttggcgagagaatggcaatgaatacacctattcaaggtagcgctgcggatataataaagatgtcgatggttaaagtatacaatgaattaaaggaaagaggattgaaatcaagacttattcttcaggtgcacgatgagcttataattgacacacatcctgatgaagttgaaatagtcaaggagcttctaaaatcaataatggaaaatatcataaagttgaaagttcctttagttgtagatatagggcaagggaaaaactggtatgatgcaaaataaaaggatcc

SEQ ID NO: 604 - DNA, 2678 bp, Artificial Sequence
  Description of Artificial Sequence: Synthetic Clostridium thermosulfurogenes DNA Polymerase Y785T
atgaaatacctgctgccgaccgctgctgctggtctgctgctcctcgctgcccagccggcgatggccatggcgaaatttttgatcatagatggtaatagcttgatgtacagggcgtattttgccctgcctgatttgatgaacagcgaaggaatgcatacaaatgccatatacggtttttcaatgatgcttcttaaattgctggaggaggagaaaccagactacatagcaatagctttcgataaaaaggcttctacatttaggcacaaggagtacagtgcttataaaggaacccgccagtcgatgccagaagagctgatagaacaggtggatattttaaaagatgtgataaatgcatttaacataaagaccatcgagatagagggatttgaagcagatgatatcattggtacagtatcaaaaattgcttccgaaagtgggatggatgtgcttatcgtcacaggcgacagagatgcgcttcagcttgtgtcggcaaatgtaaaagtaaaaatatgtaaaaaaggcataacgcagatggatgagtacgatgaaaaggcggtctttgaaaagtatgaagtgacgccgcttcaattcatagacttgaaagggcttatgggagacaaatcagacaacattccaggagtgcccaatataggggagaagacggccataaagcttgttaaagaatttggatcaattgaaaatttactgatgaatacagataagttaaaagggaaaataaaagaaaatgtagaaaacaatgcagaattagctgttttaagcaaacggcttgctacgattgagagaaatgttcctattgatattgatttgaatgaatacgcggttaaaaattacgatgtcaataagcttacagagctatttgaaaaattggaattttcaagcctcatctcagatttaaaagatgatagtcgtgatacaaaggatattaaagaatggcctgtaagagattttacatacgttaaaaatgttttaggaaagtttgatgttttgtcattgtatccattcatatatgatggaaagataaaagcagtatcatttgcttgcggtgacggatcgttttttgtagagattgatgattatgacaattttaaattgcttaataatgataagcttacgttgataggacacgatctgaaagattttttagtaaacatttcatactgcggtattgaacttaattgtaagattttagatacggccataatgacttatcttttaaatccgtctgagtcgaattacgacataagtcgcgtattgaaaaaatacttgaaagaggatttgcaaaacatagatgatatagtaggcaagggcaggaataaaaagagctacgatgacattgacaaaaagcttttagtcgattatatgtgttcagccgcatcaaacttatctaagttaaaagataagctcatgtcatttataaaagagatggagatggaagatcttttaaaaaatgtggaaattccgcttattgaagtgctaaaatctatggaggtgtacggctttacattagataaagatgtacttagaagtatttctaaagaaatagatgaaaagacagataagattgtaaaagatatttacgatgctgctggatacgaatttaatattaactctacaaagcagttatcagaatttttgtttgataaactgaatttgccagcaataaaaaagactaaaacagggtattcgactgacatggaagtccttgcagaacttataccgtacaatgacatagtaggagaaataatagaatatagacagcttatgaagcttaaatctacgtacatagatggcttcattcccatcatggatgaaaataatagggtccactctacgtttaaacaaacagttgctgctacagggagaattagctcaacagagcctaatctgcagaacatacctgtaagagaagaatttggcaggaggataagaaaggcatttgtatcaagttatgaagatgggcttataatatctgctgattattctcagattgagctaagggttcttgcacatctttcagaggatgaaaaacttattgagtcatttttgaacaacgaagatatacatttaaggacggcatcggaggtttttaaggtttcgaaagaagaagtgacaagtgaaatgagaaggcgggcgaaagctgtcaactttggtattgtatatggtataagcgattacggcttatctaaagacttaaagatttcgcgaaaagaagcgaaagaatacatagacaattattttgacaggtacaagggcgtcaaaaattacatcgactcaattgtcaaatttgcaaaggaaaatgggtatgttacgactatcttaaataggagaagaactataccggaaatcaattcaaaaaattttaaccaaagatcttttggcgagagaatggcaatgaatacacctattcaaggtagcgctgcggatataataaagatgtcgatggttaaagtatacaatgaattaaaggaaagaggattgaaatcaagacttattcttcaggtgcacgatgagcttataattgacacacatcctgatgaagttgaaatagtcaaggagcttctaaaatcaataatggaaaatatcataaagttgaaagttcctttagttgtagatatagggcaagggaaaaactggtatgatgcaaaataaaaggatcc

SEQ ID NO: 605 - DNA, 2678 bp, Artificial Sequence
  Description of Artificial Sequence: Synthetic Clostridium thermosulfurogenes DNA Polymerase Y785W
atgaaatacctgctgccgaccgctgctgctggtctgctgctcctcgctgcccagccggcgatggccatggcgaaatttttgatcatagatggtaatagcttgatgtacagggcgtattttgccctgcctgatttgatgaacagcgaaggaatgcatacaaatgccatatacggtttttcaatgatgcttcttaaattgctggaggaggagaaaccagactacatagcaatagctttcgataaaaaggcttctacatttaggcacaaggagtacagtgcttataaaggaacccgccagtcgatgccagaagagctgatagaacaggtggatattttaaaagatgtgataaatgcatttaacataaagaccatcgagatagagggatttgaagcagatgatatcattggtacagtatcaaaaattgcttccgaaagtgggatggatgtgcttatcgtcacaggcgacagagatgcgcttcagcttgtgtcggcaaatgtaaaagtaaaaatatgtaaaaaaggcataacgcagatggatgagtacgatgaaaaggcggtctttgaaaagtatgaagtgacgccgcttcaattcatagacttgaaagggcttatgggagacaaatcagacaacattccaggagtgcccaatataggggagaagacggccataaagcttgttaaagaatttggatcaattgaaaatttactgatgaatacagataagttaaaagggaaaataaaagaaaatgtagaaaacaatgcagaattagctgttttaagcaaacggcttgctacgattgagagaaatgttcctattgatattgatttgaatgaatacgcggttaaaaattacgatgtcaataagcttacagagctatttgaaaaattggaattttcaagcctcatctcagatttaaaagatgatagtcgtgatacaaaggatattaaagaatggcctgtaagagattttacatacgttaaaaatgttttaggaaagtttgatgttttgtcattgtatccattcatatatgatggaaagataaaagcagtatcatttgcttgcggtgacggatcgttttttgtagagattgatgattatgacaattttaaattgcttaataatgataagcttacgttgataggacacgatctgaaagattttttagtaaacatttcatactgcggtattgaacttaattgtaagattttagatacggccataatgacttatcttttaaatccgtctgagtcgaattacgacataagtcgcgtattgaaaaaatacttgaaagaggatttgcaaaacatagatgatatagtaggcaagggcaggaataaaaagagctacgatgacattgacaaaaagcttttagtcgattatatgtgttcagccgcatcaaacttatctaagttaaaagataagctcatgtcatttataaaagagatggagatggaagatcttttaaaaaatgtggaaattccgcttattgaagtgctaaaatctatggaggtgtacggctttacattagataaagatgtacttagaagtatttctaaagaaatagatgaaaagacagataagattgtaaaagatatttacgatgctgctggatacgaatttaatattaactctacaaagcagttatcagaatttttgtttgataaactgaatttgccagcaataaaaaagactaaaacagggtattcgactgacatggaagtccttgcagaacttataccgtacaatgacatagtaggagaaataatagaatatagacagcttatgaagcttaaatctacgtacatagatggcttcattcccatcatggatgaaaataatagggtccactctacgtttaaacaaacagttgctgctacagggagaattagctcaacagagcctaatctgcagaacatacctgtaagagaagaatttggcaggaggataagaaaggcatttgtatcaagttatgaagatgggcttataatatctgctgattattctcagattgagctaagggttcttgcacatctttcagaggatgaaaaacttattgagtcatttttgaacaacgaagatatacatttaaggacggcatcggaggtttttaaggtttcgaaagaagaagtgacaagtgaaatgagaaggcgggcgaaagctgtcaactttggtattgtatatggtataagcgattacggcttatctaaagacttaaagatttcgcgaaaagaagcgaaagaatacatagacaattattttgacaggtacaagggcgtcaaaaattacatcgactcaattgtcaaatttgcaaaggaaaatgggtatgttacgactatcttaaataggagaagatggataccggaaatcaattcaaaaaattttaaccaaagatcttttggcgagagaatggcaatgaatacacctattcaaggtagcgctgcggatataataaagatgtcgatggttaaagtatacaatgaattaaaggaaagaggattgaaatcaagacttattcttcaggtgcacgatgagcttataattgacacacatcctgatgaagttgaaatagtcaaggagcttctaaaatcaataatggaaaatatcataaagttgaaagttcctttagttgtagatatagggcaagggaaaaactggtatgatgcaaaataaaaggatcc

SEQ ID NO: 606 - DNA, 2678 bp, Artificial Sequence
  Description of Artificial Sequence: Synthetic Clostridium thermosulfurogenes DNA Polymerase Y785V
atgaaatacctgctgccgaccgctgctgctggtctgctgctcctcgctgcccagccggcgatggccatggcgaaatttttgatcatagatggtaatagcttgatgtacagggcgtattttgccctgcctgatttgatgaacagcgaaggaatgcatacaaatgccatatacggtttttcaatgatgcttcttaaattgctggaggaggagaaaccagactacatagcaatagctttcgataaaaaggcttctacatttaggcacaaggagtacagtgcttataaaggaacccgccagtcgatgccagaagagctgatagaacaggtggatattttaaaagatgtgataaatgcatttaacataaagaccatcgagatagagggatttgaagcagatgatatcattggtacagtatcaaaaattgcttccgaaagtgggatggatgtgcttatcgtcacaggcgacagagatgcgcttcagcttgtgtcggcaaatgtaaaagtaaaaatatgtaaaaaaggcataacgcagatggatgagtacgatgaaaaggcggtctttgaaaagtatgaagtgacgccgcttcaattcatagacttgaaagggcttatgggagacaaatcagacaacattccaggagtgcccaatataggggagaagacggccataaagcttgttaaagaatttggatcaattgaaaatttactgatgaatacagataagttaaaagggaaaataaaagaaaatgtagaaaacaatgcagaattagctgttttaagcaaacggcttgctacgattgagagaaatgttcctattgatattgatttgaatgaatacgcggttaaaaattacgatgtcaataagcttacagagctatttgaaaaattggaattttcaagcctcatctcagatttaaaagatgatagtcgtgatacaaaggatattaaagaatggcctgtaagagattttacatacgttaaaaatgttttaggaaagtttgatgttttgtcattgtatccattcatatatgatggaaagataaaagcagtatcatttgcttgcggtgacggatcgttttttgtagagattgatgattatgacaattttaaattgcttaataatgataagcttacgttgataggacacgatctgaaagattttttagtaaacatttcatactgcggtattgaacttaattgtaagattttagatacggccataatgacttatcttttaaatccgtctgagtcgaattacgacataagtcgcgtattgaaaaaatacttgaaagaggatttgcaaaacatagatgatatagtaggcaagggcaggaataaaaagagctacgatgacattgacaaaaagcttttagtcgattatatgtgttcagccgcatcaaacttatctaagttaaaagataagctcatgtcatttataaaagagatggagatggaagatcttttaaaaaatgtggaaattccgcttattgaagtgctaaaatctatggaggtgtacggctttacattagataaagatgtacttagaagtatttctaaagaaatagatgaaaagacagataagattgtaaaagatatttacgatgctgctggatacgaatttaatattaactctacaaagcagttatcagaatttttgtttgataaactgaatttgccagcaataaaaaagactaaaacagggtattcgactgacatggaagtccttgcagaacttataccgtacaatgacatagtaggagaaataatagaatatagacagcttatgaagcttaaatctacgtacatagatggcttcattcccatcatggatgaaaataatagggtccactctacgtttaaacaaacagttgctgctacagggagaattagctcaacagagcctaatctgcagaacatacctgtaagagaagaatttggcaggaggataagaaaggcatttgtatcaagttatgaagatgggcttataatatctgctgattattctcagattgagctaagggttcttgcacatctttcagaggatgaaaaacttattgagtcatttttgaacaacgaagatatacatttaaggacggcatcggaggtttttaaggtttcgaaagaagaagtgacaagtgaaatgagaaggcgggcgaaagctgtcaactttggtattgtatatggtataagcgattacggcttatctaaagacttaaagatttcgcgaaaagaagcgaaagaatacatagacaattattttgacaggtacaagggcgtcaaaaattacatcgactcaattgtcaaatttgcaaaggaaaatgggtatgttacgactatcttaaataggagaagagttataccggaaatcaattcaaaaaattttaaccaaagatcttttggcgagagaatggcaatgaatacacctattcaaggtagcgctgcggatataataaagatgtcgatggttaaagtatacaatgaattaaaggaaagaggattgaaatcaagacttattcttcaggtgcacgatgagcttataattgacacacatcctgatgaagttgaaatagtcaaggagcttctaaaatcaataatggaaaatatcataaagttgaaagttcctttagttgtagatatagggcaagggaaaaactggtatgatgcaaaataaaaggatcc

SEQ ID NO: 607 - DNA, 2678 bp, Artificial Sequence
  Description of Artificial Sequence: Synthetic Clostridium thermosulfurogenes DNA Polymerase I786A
atgaaatacctgctgccgaccgctgctgctggtctgctgctcctcgctgcccagccggcgatggccatggcgaaatttttgatcatagatggtaatagcttgatgtacagggcgtattttgccctgcctgatttgatgaacagcgaaggaatgcatacaaatgccatatacggtttttcaatgatgcttcttaaattgctggaggaggagaaaccagactacatagcaatagctttcgataaaaaggcttctacatttaggcacaaggagtacagtgcttataaaggaacccgccagtcgatgccagaagagctgatagaacaggtggatattttaaaagatgtgataaatgcatttaacataaagaccatcgagatagagggatttgaagcagatgatatcattggtacagtatcaaaaattgcttccgaaagtgggatggatgtgcttatcgtcacaggcgacagagatgcgcttcagcttgtgtcggcaaatgtaaaagtaaaaatatgtaaaaaaggcataacgcagatggatgagtacgatgaaaaggcggtctttgaaaagtatgaagtgacgccgcttcaattcatagacttgaaagggcttatgggagacaaatcagacaacattccaggagtgcccaatataggggagaagacggccataaagcttgttaaagaatttggatcaattgaaaatttactgatgaatacagataagttaaaagggaaaataaaagaaaatgtagaaaacaatgcagaattagctgttttaagcaaacggcttgctacgattgagagaaatgttcctattgatattgatttgaatgaatacgcggttaaaaattacgatgtcaataagcttacagagctatttgaaaaattggaattttcaagcctcatctcagatttaaaagatgatagtcgtgatacaaaggatattaaagaatggcctgtaagagattttacatacgttaaaaatgttttaggaaagtttgatgttttgtcattgtatccattcatatatgatggaaagataaaagcagtatcatttgcttgcggtgacggatcgttttttgtagagattgatgattatgacaattttaaattgcttaataatgataagcttacgttgataggacacgatctgaaagattttttagtaaacatttcatactgcggtattgaacttaattgtaagattttagatacggccataatgacttatcttttaaatccgtctgagtcgaattacgacataagtcgcgtattgaaaaaatacttgaaagaggatttgcaaaacatagatgatatagtaggcaagggcaggaataaaaagagctacgatgacattgacaaaaagcttttagtcgattatatgtgttcagccgcatcaaacttatctaagttaaaagataagctcatgtcatttataaaagagatggagatggaagatcttttaaaaaatgtggaaattccgcttattgaagtgctaaaatctatggaggtgtacggctttacattagataaagatgtacttagaagtatttctaaagaaatagatgaaaagacagataagattgtaaaagatatttacgatgctgctggatacgaatttaatattaactctacaaagcagttatcagaatttttgtttgataaactgaatttgccagcaataaaaaagactaaaacagggtattcgactgacatggaagtccttgcagaacttataccgtacaatgacatagtaggagaaataatagaatatagacagcttatgaagcttaaatctacgtacatagatggcttcattcccatcatggatgaaaataatagggtccactctacgtttaaacaaacagttgctgctacagggagaattagctcaacagagcctaatctgcagaacatacctgtaagagaagaatttggcaggaggataagaaaggcatttgtatcaagttatgaagatgggcttataatatctgctgattattctcagattgagctaagggttcttgcacatctttcagaggatgaaaaacttattgagtcatttttgaacaacgaagatatacatttaaggacggcatcggaggtttttaaggtttcgaaagaagaagtgacaagtgaaatgagaaggcgggcgaaagctgtcaactttggtattgtatatggtataagcgattacggcttatctaaagacttaaagatttcgcgaaaagaagcgaaagaatacatagacaattattttgacaggtacaagggcgtcaaaaattacatcgactcaattgtcaaatttgcaaaggaaaatgggtatgttacgactatcttaaataggagaagatacgctccggaaatcaattcaaaaaattttaaccaaagatcttttggcgagagaatggcaatgaatacacctattcaaggtagcgctgcggatataataaagatgtcgatggttaaagtatacaatgaattaaaggaaagaggattgaaatcaagacttattcttcaggtgcacgatgagcttataattgacacacatcctgatgaagttgaaatagtcaaggagcttctaaaatcaataatggaaaatatcataaagttgaaagttcctttagttgtagatatagggcaagggaaaaactggtatgatgcaaaataaaaggatcc

SEQ ID NO: 608 - DNA, 2678 bp, Artificial Sequence
  Description of Artificial Sequence: Synthetic Clostridium thermosulfurogenes DNA Polymerase I786R
atgaaatacctgctgccgaccgctgctgctggtctgctgctcctcgctgcccagccggcgatggccatggcgaaatttttgatcatagatggtaatagcttgatgtacagggcgtattttgccctgcctgatttgatgaacagcgaaggaatgcatacaaatgccatatacggtttttcaatgatgcttcttaaattgctggaggaggagaaaccagactacatagcaatagctttcgataaaaaggcttctacatttaggcacaaggagtacagtgcttataaaggaacccgccagtcgatgccagaagagctgatagaacaggtggatattttaaaagatgtgataaatgcatttaacataaagaccatcgagatagagggatttgaagcagatgatatcattggtacagtatcaaaaattgcttccgaaagtgggatggatgtgcttatcgtcacaggcgacagagatgcgcttcagcttgtgtcggcaaatgtaaaagtaaaaatatgtaaaaaaggcataacgcagatggatgagtacgatgaaaaggcggtctttgaaaagtatgaagtgacgccgcttcaattcatagacttgaaagggcttatgggagacaaatcagacaacattccaggagtgcccaatataggggagaagacggccataaagcttgttaaagaatttggatcaattgaaaatttactgatgaatacagataagttaaaagggaaaataaaagaaaatgtagaaaacaatgcagaattagctgttttaagcaaacggcttgctacgattgagagaaatgttcctattgatattgatttgaatgaatacgcggttaaaaattacgatgtcaataagcttacagagctatttgaaaaattggaattttcaagcctcatctcagatttaaaagatgatagtcgtgatacaaaggatattaaagaatggcctgtaagagattttacatacgttaaaaatgttttaggaaagtttgatgttttgtcattgtatccattcatatatgatggaaagataaaagcagtatcatttgcttgcggtgacggatcgttttttgtagagattgatgattatgacaattttaaattgcttaataatgataagcttacgttgataggacacgatctgaaagattttttagtaaacatttcatactgcggtattgaacttaattgtaagattttagatacggccataatgacttatcttttaaatccgtctgagtcgaattacgacataagtcgcgtattgaaaaaatacttgaaagaggatttgcaaaacatagatgatatagtaggcaagggcaggaataaaaagagctacgatgacattgacaaaaagcttttagtcgattatatgtgttcagccgcatcaaacttatctaagttaaaagataagctcatgtcatttataaaagagatggagatggaagatcttttaaaaaatgtggaaattccgcttattgaagtgctaaaatctatggaggtgtacggctttacattagataaagatgtacttagaagtatttctaaagaaatagatgaaaagacagataagattgtaaaagatatttacgatgctgctggatacgaatttaatattaactctacaaagcagttatcagaatttttgtttgataaactgaatttgccagcaataaaaaagactaaaacagggtattcgactgacatggaagtccttgcagaacttataccgtacaatgacatagtaggagaaataatagaatatagacagcttatgaagcttaaatctacgtacatagatggcttcattcccatcatggatgaaaataatagggtccactctacgtttaaacaaacagttgctgctacagggagaattagctcaacagagcctaatctgcagaacatacctgtaagagaagaatttggcaggaggataagaaaggcatttgtatcaagttatgaagatgggcttataatatctgctgattattctcagattgagctaagggttcttgcacatctttcagaggatgaaaaacttattgagtcatttttgaacaacgaagatatacatttaaggacggcatcggaggtttttaaggtttcgaaagaagaagtgacaagtgaaatgagaaggcgggcgaaagctgtcaactttggtattgtatatggtataagcgattacggcttatctaaagacttaaagatttcgcgaaaagaagcgaaagaatacatagacaattattttgacaggtacaagggcgtcaaaaattacatcgactcaattgtcaaatttgcaaaggaaaatgggtatgttacgactatcttaaataggagaagataccgtccggaaatcaattcaaaaaattttaaccaaagatcttttggcgagagaatggcaatgaatacacctattcaaggtagcgctgcggatataataaagatgtcgatggttaaagtatacaatgaattaaaggaaagaggattgaaatcaagacttattcttcaggtgcacgatgagcttataattgacacacatcctgatgaagttgaaatagtcaaggagcttctaaaatcaataatggaaaatatcataaagttgaaagttcctttagttgtagatatagggcaagggaaaaactggtatgatgcaaaataaaaggatcc

SEQ ID NO: 609 - DNA, 2678 bp, Artificial Sequence
  Description of Artificial Sequence: Synthetic Clostridium thermosulfurogenes DNA Polymerase I786N
atgaaatacctgctgccgaccgctgctgctggtctgctgctcctcgctgcccagccggcgatggccatggcgaaatttttgatcatagatggtaatagcttgatgtacagggcgtattttgccctgcctgatttgatgaacagcgaaggaatgcatacaaatgccatatacggtttttcaatgatgcttcttaaattgctggaggaggagaaaccagactacatagcaatagctttcgataaaaaggcttctacatttaggcacaaggagtacagtgcttataaaggaacccgccagtcgatgccagaagagctgatagaacaggtggatattttaaaagatgtgataaatgcatttaacataaagaccatcgagatagagggatttgaagcagatgatatcattggtacagtatcaaaaattgcttccgaaagtgggatggatgtgcttatcgtcacaggcgacagagatgcgcttcagcttgtgtcggcaaatgtaaaagtaaaaatatgtaaaaaaggcataacgcagatggatgagtacgatgaaaaggcggtctttgaaaagtatgaagtgacgccgcttcaattcatagacttgaaagggcttatgggagacaaatcagacaacattccaggagtgcccaatataggggagaagacggccataaagcttgttaaagaatttggatcaattgaaaatttactgatgaatacagataagttaaaagggaaaataaaagaaaatgtagaaaacaatgcagaattagctgttttaagcaaacggcttgctacgattgagagaaatgttcctattgatattgatttgaatgaatacgcggttaaaaattacgatgtcaataagcttacagagctatttgaaaaattggaattttcaagcctcatctcagatttaaaagatgatagtcgtgatacaaaggatattaaagaatggcctgtaagagattttacatacgttaaaaatgttttaggaaagtttgatgttttgtcattgtatccattcatatatgatggaaagataaaagcagtatcatttgcttgcggtgacggatcgttttttgtagagattgatgattatgacaattttaaattgcttaataatgataagcttacgttgataggacacgatctgaaagattttttagtaaacatttcatactgcggtattgaacttaattgtaagattttagatacggccataatgacttatcttttaaatccgtctgagtcgaattacgacataagtcgcgtattgaaaaaatacttgaaagaggatttgcaaaacatagatgatatagtaggcaagggcaggaataaaaagagctacgatgacattgacaaaaagcttttagtcgattatatgtgttcagccgcatcaaacttatctaagttaaaagataagctcatgtcatttataaaagagatggagatggaagatcttttaaaaaatgtggaaattccgcttattgaagtgctaaaatctatggaggtgtacggctttacattagataaagatgtacttagaagtatttctaaagaaatagatgaaaagacagataagattgtaaaagatatttacgatgctgctggatacgaatttaatattaactctacaaagcagttatcagaatttttgtttgataaactgaatttgccagcaataaaaaagactaaaacagggtattcgactgacatggaagtccttgcagaacttataccgtacaatgacatagtaggagaaataatagaatatagacagcttatgaagcttaaatctacgtacatagatggcttcattcccatcatggatgaaaataatagggtccactctacgtttaaacaaacagttgctgctacagggagaattagctcaacagagcctaatctgcagaacatacctgtaagagaagaatttggcaggaggataagaaaggcatttgtatcaagttatgaagatgggcttataatatctgctgattattctcagattgagctaagggttcttgcacatctttcagaggatgaaaaacttattgagtcatttttgaacaacgaagatatacatttaaggacggcatcggaggtttttaaggtttcgaaagaagaagtgacaagtgaaatgagaaggcgggcgaaagctgtcaactttggtattgtatatggtataagcgattacggcttatctaaagacttaaagatttcgcgaaaagaagcgaaagaatacatagacaattattttgacaggtacaagggcgtcaaaaattacatcgactcaattgtcaaatttgcaaaggaaaatgggtatgttacgactatcttaaataggagaagatacaatccggaaatcaattcaaaaaattttaaccaaagatcttttggcgagagaatggcaatgaatacacctattcaaggtagcgctgcggatataataaagatgtcgatggttaaagtatacaatgaattaaaggaaagaggattgaaatcaagacttattcttcaggtgcacgatgagcttataattgacacacatcctgatgaagttgaaatagtcaaggagcttctaaaatcaataatggaaaatatcataaagttgaaagttcctttagttgtagatatagggcaagggaaaaactggtatgatgcaaaataaaaggatcc

SEQ ID NO: 610 - DNA, 2678 bp, Artificial Sequence
  Description of Artificial Sequence: Synthetic Clostridium thermosulfurogenes DNA Polymerase I786D
atgaaatacctgctgccgaccgctgctgctggtctgctgctcctcgctgcccagccggcgatggccatggcgaaatttttgatcatagatggtaatagcttgatgtacagggcgtattttgccctgcctgatttgatgaacagcgaaggaatgcatacaaatgccatatacggtttttcaatgatgcttcttaaattgctggaggaggagaaaccagactacatagcaatagctttcgataaaaaggcttctacatttaggcacaaggagtacagtgcttataaaggaacccgccagtcgatgccagaagagctgatagaacaggtggatattttaaaagatgtgataaatgcatttaacataaagaccatcgagatagagggatttgaagcagatgatatcattggtacagtatcaaaaattgcttccgaaagtgggatggatgtgcttatcgtcacaggcgacagagatgcgcttcagcttgtgtcggcaaatgtaaaagtaaaaatatgtaaaaaaggcataacgcagatggatgagtacgatgaaaaggcggtctttgaaaagtatgaagtgacgccgcttcaattcatagacttgaaagggcttatgggagacaaatcagacaacattccaggagtgcccaatataggggagaagacggccataaagcttgttaaagaatttggatcaattgaaaatttactgatgaatacagataagttaaaagggaaaataaaagaaaatgtagaaaacaatgcagaattagctgttttaagcaaacggcttgctacgattgagagaaatgttcctattgatattgatttgaatgaatacgcggttaaaaattacgatgtcaataagcttacagagctatttgaaaaattggaattttcaagcctcatctcagatttaaaagatgatagtcgtgatacaaaggatattaaagaatggcctgtaagagattttacatacgttaaaaatgttttaggaaagtttgatgttttgtcattgtatccattcatatatgatggaaagataaaagcagtatcatttgcttgcggtgacggatcgttttttgtagagattgatgattatgacaattttaaattgcttaataatgataagcttacgttgataggacacgatctgaaagattttttagtaaacatttcatactgcggtattgaacttaattgtaagattttagatacggccataatgacttatcttttaaatccgtctgagtcgaattacgacataagtcgcgtattgaaaaaatacttgaaagaggatttgcaaaacatagatgatatagtaggcaagggcaggaataaaaagagctacgatgacattgacaaaaagcttttagtcgattatatgtgttcagccgcatcaaacttatctaagttaaaagataagctcatgtcatttataaaagagatggagatggaagatcttttaaaaaatgtggaaattccgcttattgaagtgctaaaatctatggaggtgtacggctttacattagataaagatgtacttagaagtatttctaaagaaatagatgaaaagacagataagattgtaaaagatatttacgatgctgctggatacgaatttaatattaactctacaaagcagttatcagaatttttgtttgataaactgaatttgccagcaataaaaaagactaaaacagggtattcgactgacatggaagtccttgcagaacttataccgtacaatgacatagtaggagaaataatagaatatagacagcttatgaagcttaaatctacgtacatagatggcttcattcccatcatggatgaaaataatagggtccactctacgtttaaacaaacagttgctgctacagggagaattagctcaacagagcctaatctgcagaacatacctgtaagagaagaatttggcaggaggataagaaaggcatttgtatcaagttatgaagatgggcttataatatctgctgattattctcagattgagctaagggttcttgcacatctttcagaggatgaaaaacttattgagtcatttttgaacaacgaagatatacatttaaggacggcatcggaggtttttaaggtttcgaaagaagaagtgacaagtgaaatgagaaggcgggcgaaagctgtcaactttggtattgtatatggtataagcgattacggcttatctaaagacttaaagatttcgcgaaaagaagcgaaagaatacatagacaattattttgacaggtacaagggcgtcaaaaattacatcgactcaattgtcaaatttgcaaaggaaaatgggtatgttacgactatcttaaataggagaagatacgatccggaaatcaattcaaaaaattttaaccaaagatcttttggcgagagaatggcaatgaatacacctattcaaggtagcgctgcggatataataaagatgtcgatggttaaagtatacaatgaattaaaggaaagaggattgaaatcaagacttattcttcaggtgcacgatgagcttataattgacacacatcctgatgaagttgaaatagtcaaggagcttctaaaatcaataatggaaaatatcataaagttgaaagttcctttagttgtagatatagggcaagggaaaaactggtatgatgcaaaataaaaggatcc

SEQ ID NO: 611 - DNA, 2678 bp, Artificial Sequence
  Description of Artificial Sequence: Synthetic Clostridium thermosulfurogenes DNA Polymerase I786C
atgaaatacctgctgccgaccgctgctgctggtctgctgctcctcgctgcccagccggcgatggccatggcgaaatttttgatcatagatggtaatagcttgatgtacagggcgtattttgccctgcctgatttgatgaacagcgaaggaatgcatacaaatgccatatacggtttttcaatgatgcttcttaaattgctggaggaggagaaaccagactacatagcaatagctttcgataaaaaggcttctacatttaggcacaaggagtacagtgcttataaaggaacccgccagtcgatgccagaagagctgatagaacaggtggatattttaaaagatgtgataaatgcatttaacataaagaccatcgagatagagggatttgaagcagatgatatcattggtacagtatcaaaaattgcttccgaaagtgggatggatgtgcttatcgtcacaggcgacagagatgcgcttcagcttgtgtcggcaaatgtaaaagtaaaaatatgtaaaaaaggcataacgcagatggatgagtacgatgaaaaggcggtctttgaaaagtatgaagtgacgccgcttcaattcatagacttgaaagggcttatgggagacaaatcagacaacattccaggagtgcccaatataggggagaagacggccataaagcttgttaaagaatttggatcaattgaaaatttactgatgaatacagataagttaaaagggaaaataaaagaaaatgtagaaaacaatgcagaattagctgttttaagcaaacggcttgctacgattgagagaaatgttcctattgatattgatttgaatgaatacgcggttaaaaattacgatgtcaataagcttacagagctatttgaaaaattggaattttcaagcctcatctcagatttaaaagatgatagtcgtgatacaaaggatattaaagaatggcctgtaagagattttacatacgttaaaaatgttttaggaaagtttgatgttttgtcattgtatccattcatatatgatggaaagataaaagcagtatcatttgcttgcggtgacggatcgttttttgtagagattgatgattatgacaattttaaattgcttaataatgataagcttacgttgataggacacgatctgaaagattttttagtaaacatttcatactgcggtattgaacttaattgtaagattttagatacggccataatgacttatcttttaaatccgtctgagtcgaattacgacataagtcgcgtattgaaaaaatacttgaaagaggatttgcaaaacatagatgatatagtaggcaagggcaggaataaaaagagctacgatgacattgacaaaaagcttttagtcgattatatgtgttcagccgcatcaaacttatctaagttaaaagataagctcatgtcatttataaaagagatggagatggaagatcttttaaaaaatgtggaaattccgcttattgaagtgctaaaatctatggaggtgtacggctttacattagataaagatgtacttagaagtatttctaaagaaatagatgaaaagacagataagattgtaaaagatatttacgatgctgctggatacgaatttaatattaactctacaaagcagttatcagaatttttgtttgataaactgaatttgccagcaataaaaaagactaaaacagggtattcgactgacatggaagtccttgcagaacttataccgtacaatgacatagtaggagaaataatagaatatagacagcttatgaagcttaaatctacgtacatagatggcttcattcccatcatggatgaaaataatagggtccactctacgtttaaacaaacagttgctgctacagggagaattagctcaacagagcctaatctgcagaacatacctgtaagagaagaatttggcaggaggataagaaaggcatttgtatcaagttatgaagatgggcttataatatctgctgattattctcagattgagctaagggttcttgcacatctttcagaggatgaaaaacttattgagtcatttttgaacaacgaagatatacatttaaggacggcatcggaggtttttaaggtttcgaaagaagaagtgacaagtgaaatgagaaggcgggcgaaagctgtcaactttggtattgtatatggtataagcgattacggcttatctaaagacttaaagatttcgcgaaaagaagcgaaagaatacatagacaattattttgacaggtacaagggcgtcaaaaattacatcgactcaattgtcaaatttgcaaaggaaaatgggtatgttacgactatcttaaataggagaagatactgtccggaaatcaattcaaaaaattttaaccaaagatcttttggcgagagaatggcaatgaatacacctattcaaggtagcgctgcggatataataaagatgtcgatggttaaagtatacaatgaattaaaggaaagaggattgaaatcaagacttattcttcaggtgcacgatgagcttataattgacacacatcctgatgaagttgaaatagtcaaggagcttctaaaatcaataatggaaaatatcataaagttgaaagttcctttagttgtagatatagggcaagggaaaaactggtatgatgcaaaataaaaggatcc

SEQ ID NO: 612 - DNA, 2678 bp, Artificial Sequence
  Description of Artificial Sequence: Synthetic Clostridium thermosulfurogenes DNA Polymerase I786E
atgaaatacctgctgccgaccgctgctgctggtctgctgctcctcgctgcccagccggcgatggccatggcgaaatttttgatcatagatggtaatagcttgatgtacagggcgtattttgccctgcctgatttgatgaacagcgaaggaatgcatacaaatgccatatacggtttttcaatgatgcttcttaaattgctggaggaggagaaaccagactacatagcaatagctttcgataaaaaggcttctacatttaggcacaaggagtacagtgcttataaaggaacccgccagtcgatgccagaagagctgatagaacaggtggatattttaaaagatgtgataaatgcatttaacataaagaccatcgagatagagggatttgaagcagatgatatcattggtacagtatcaaaaattgcttccgaaagtgggatggatgtgcttatcgtcacaggcgacagagatgcgcttcagcttgtgtcggcaaatgtaaaagtaaaaatatgtaaaaaaggcataacgcagatggatgagtacgatgaaaaggcggtctttgaaaagtatgaagtgacgccgcttcaattcatagacttgaaagggcttatgggagacaaatcagacaacattccaggagtgcccaatataggggagaagacggccataaagcttgttaaagaatttggatcaattgaaaatttactgatgaatacagataagttaaaagggaaaataaaagaaaatgtagaaaacaatgcagaattagctgttttaagcaaacggcttgctacgattgagagaaatgttcctattgatattgatttgaatgaatacgcggttaaaaattacgatgtcaataagcttacagagctatttgaaaaattggaattttcaagcctcatctcagatttaaaagatgatagtcgtgatacaaaggatattaaagaatggcctgtaagagattttacatacgttaaaaatgttttaggaaagtttgatgttttgtcattgtatccattcatatatgatggaaagataaaagcagtatcatttgcttgcggtgacggatcgttttttgtagagattgatgattatgacaattttaaattgcttaataatgataagcttacgttgataggacacgatctgaaagattttttagtaaacatttcatactgcggtattgaacttaattgtaagattttagatacggccataatgacttatcttttaaatccgtctgagtcgaattacgacataagtcgcgtattgaaaaaatacttgaaagaggatttgcaaaacatagatgatatagtaggcaagggcaggaataaaaagagctacgatgacattgacaaaaagcttttagtcgattatatgtgttcagccgcatcaaacttatctaagttaaaagataagctcatgtcatttataaaagagatggagatggaagatcttttaaaaaatgtggaaattccgcttattgaagtgctaaaatctatggaggtgtacggctttacattagataaagatgtacttagaagtatttctaaagaaatagatgaaaagacagataagattgtaaaagatatttacgatgctgctggatacgaatttaatattaactctacaaagcagttatcagaatttttgtttgataaactgaatttgccagcaataaaaaagactaaaacagggtattcgactgacatggaagtccttgcagaacttataccgtacaatgacatagtaggagaaataatagaatatagacagcttatgaagcttaaatctacgtacatagatggcttcattcccatcatggatgaaaataatagggtccactctacgtttaaacaaacagttgctgctacagggagaattagctcaacagagcctaatctgcagaacatacctgtaagagaagaatttggcaggaggataagaaaggcatttgtatcaagttatgaagatgggcttataatatctgctgattattctcagattgagctaagggttcttgcacatctttcagaggatgaaaaacttattgagtcatttttgaacaacgaagatatacatttaaggacggcatcggaggtttttaaggtttcgaaagaagaagtgacaagtgaaatgagaaggcgggcgaaagctgtcaactttggtattgtatatggtataagcgattacggcttatctaaagacttaaagatttcgcgaaaagaagcgaaagaatacatagacaattattttgacaggtacaagggcgtcaaaaattacatcgactcaattgtcaaatttgcaaaggaaaatgggtatgttacgactatcttaaataggagaagatacgaaccggaaatcaattcaaaaaattttaaccaaagatcttttggcgagagaatggcaatgaatacacctattcaaggtagcgctgcggatataataaagatgtcgatggttaaagtatacaatgaattaaaggaaagaggattgaaatcaagacttattcttcaggtgcacgatgagcttataattgacacacatcctgatgaagttgaaatagtcaaggagcttctaaaatcaataatggaaaatatcataaagttgaaagttcctttagttgtagatatagggcaagggaaaaactggtatgatgcaaaataaaaggatcc

SEQ ID NO: 613 - DNA, 2678 bp, Artificial Sequence
  Description of Artificial Sequence: Synthetic Clostridium thermosulfurogenes DNA Polymerase I786Q
atgaaatacctgctgccgaccgctgctgctggtctgctgctcctcgctgcccagccggcgatggccatggcgaaatttttgatcatagatggtaatagcttgatgtacagggcgtattttgccctgcctgatttgatgaacagcgaaggaatgcatacaaatgccatatacggtttttcaatgatgcttcttaaattgctggaggaggagaaaccagactacatagcaatagctttcgataaaaaggcttctacatttaggcacaaggagtacagtgcttataaaggaacccgccagtcgatgccagaagagctgatagaacaggtggatattttaaaagatgtgataaatgcatttaacataaagaccatcgagatagagggatttgaagcagatgatatcattggtacagtatcaaaaattgcttccgaaagtgggatggatgtgcttatcgtcacaggcgacagagatgcgcttcagcttgtgtcggcaaatgtaaaagtaaaaatatgtaaaaaaggcataacgcagatggatgagtacgatgaaaaggcggtctttgaaaagtatgaagtgacgccgcttcaattcatagacttgaaagggcttatgggagacaaatcagacaacattccaggagtgcccaatataggggagaagacggccataaagcttgttaaagaatttggatcaattgaaaatttactgatgaatacagataagttaaaagggaaaataaaagaaaatgtagaaaacaatgcagaattagctgttttaagcaaacggcttgctacgattgagagaaatgttcctattgatattgatttgaatgaatacgcggttaaaaattacgatgtcaataagcttacagagctatttgaaaaattggaattttcaagcctcatctcagatttaaaagatgatagtcgtgatacaaaggatattaaagaatggcctgtaagagattttacatacgttaaaaatgttttaggaaagtttgatgttttgtcattgtatccattcatatatgatggaaagataaaagcagtatcatttgcttgcggtgacggatcgttttttgtagagattgatgattatgacaattttaaattgcttaataatgataagcttacgttgataggacacgatctgaaagattttttagtaaacatttcatactgcggtattgaacttaattgtaagattttagatacggccataatgacttatcttttaaatccgtctgagtcgaattacgacataagtcgcgtattgaaaaaatacttgaaagaggatttgcaaaacatagatgatatagtaggcaagggcaggaataaaaagagctacgatgacattgacaaaaagcttttagtcgattatatgtgttcagccgcatcaaacttatctaagttaaaagataagctcatgtcatttataaaagagatggagatggaagatcttttaaaaaatgtggaaattccgcttattgaagtgctaaaatctatggaggtgtacggctttacattagataaagatgtacttagaagtatttctaaagaaatagatgaaaagacagataagattgtaaaagatatttacgatgctgctggatacgaatttaatattaactctacaaagcagttatcagaatttttgtttgataaactgaatttgccagcaataaaaaagactaaaacagggtattcgactgacatggaagtccttgcagaacttataccgtacaatgacatagtaggagaaataatagaatatagacagcttatgaagcttaaatctacgtacatagatggcttcattcccatcatggatgaaaataatagggtccactctacgtttaaacaaacagttgctgctacagggagaattagctcaacagagcctaatctgcagaacatacctgtaagagaagaatttggcaggaggataagaaaggcatttgtatcaagttatgaagatgggcttataatatctgctgattattctcagattgagctaagggttcttgcacatctttcagaggatgaaaaacttattgagtcatttttgaacaacgaagatatacatttaaggacggcatcggaggtttttaaggtttcgaaagaagaagtgacaagtgaaatgagaaggcgggcgaaagctgtcaactttggtattgtatatggtataagcgattacggcttatctaaagacttaaagatttcgcgaaaagaagcgaaagaatacatagacaattattttgacaggtacaagggcgtcaaaaattacatcgactcaattgtcaaatttgcaaaggaaaatgggtatgttacgactatcttaaataggagaagataccaaccggaaatcaattcaaaaaattttaaccaaagatcttttggcgagagaatggcaatgaatacacctattcaaggtagcgctgcggatataataaagatgtcgatggttaaagtatacaatgaattaaaggaaagaggattgaaatcaagacttattcttcaggtgcacgatgagcttataattgacacacatcctgatgaagttgaaatagtcaaggagcttctaaaatcaataatggaaaatatcataaagttgaaagttcctttagttgtagatatagggcaagggaaaaactggtatgatgcaaaataaaaggatcc

SEQ ID NO: 614 - DNA, 2678 bp, Artificial Sequence
  Description of Artificial Sequence: Synthetic Clostridium thermosulfurogenes DNA Polymerase I786G
atgaaatacctgctgccgaccgctgctgctggtctgctgctcctcgctgcccagccggcgatggccatggcgaaatttttgatcatagatggtaatagcttgatgtacagggcgtattttgccctgcctgatttgatgaacagcgaaggaatgcatacaaatgccatatacggtttttcaatgatgcttcttaaattgctggaggaggagaaaccagactacatagcaatagctttcgataaaaaggcttctacatttaggcacaaggagtacagtgcttataaaggaacccgccagtcgatgccagaagagctgatagaacaggtggatattttaaaagatgtgataaatgcatttaacataaagaccatcgagatagagggatttgaagcagatgatatcattggtacagtatcaaaaattgcttccgaaagtgggatggatgtgcttatcgtcacaggcgacagagatgcgcttcagcttgtgtcggcaaatgtaaaagtaaaaatatgtaaaaaaggcataacgcagatggatgagtacgatgaaaaggcggtctttgaaaagtatgaagtgacgccgcttcaattcatagacttgaaagggcttatgggagacaaatcagacaacattccaggagtgcccaatataggggagaagacggccataaagcttgttaaagaatttggatcaattgaaaatttactgatgaatacagataagttaaaagggaaaataaaagaaaatgtagaaaacaatgcagaattagctgttttaagcaaacggcttgctacgattgagagaaatgttcctattgatattgatttgaatgaatacgcggttaaaaattacgatgtcaataagcttacagagctatttgaaaaattggaattttcaagcctcatctcagatttaaaagatgatagtcgtgatacaaaggatattaaagaatggcctgtaagagattttacatacgttaaaaatgttttaggaaagtttgatgttttgtcattgtatccattcatatatgatggaaagataaaagcagtatcatttgcttgcggtgacggatcgttttttgtagagattgatgattatgacaattttaaattgcttaataatgataagcttacgttgataggacacgatctgaaagattttttagtaaacatttcatactgcggtattgaacttaattgtaagattttagatacggccataatgacttatcttttaaatccgtctgagtcgaattacgacataagtcgcgtattgaaaaaatacttgaaagaggatttgcaaaacatagatgatatagtaggcaagggcaggaataaaaagagctacgatgacattgacaaaaagcttttagtcgattatatgtgttcagccgcatcaaacttatctaagttaaaagataagctcatgtcatttataaaagagatggagatggaagatcttttaaaaaatgtggaaattccgcttattgaagtgctaaaatctatggaggtgtacggctttacattagataaagatgtacttagaagtatttctaaagaaatagatgaaaagacagataagattgtaaaagatatttacgatgctgctggatacgaatttaatattaactctacaaagcagttatcagaatttttgtttgataaactgaatttgccagcaataaaaaagactaaaacagggtattcgactgacatggaagtccttgcagaacttataccgtacaatgacatagtaggagaaataatagaatatagacagcttatgaagcttaaatctacgtacatagatggcttcattcccatcatggatgaaaataatagggtccactctacgtttaaacaaacagttgctgctacagggagaattagctcaacagagcctaatctgcagaacatacctgtaagagaagaatttggcaggaggataagaaaggcatttgtatcaagttatgaagatgggcttataatatctgctgattattctcagattgagctaagggttcttgcacatctttcagaggatgaaaaacttattgagtcatttttgaacaacgaagatatacatttaaggacggcatcggaggtttttaaggtttcgaaagaagaagtgacaagtgaaatgagaaggcgggcgaaagctgtcaactttggtattgtatatggtataagcgattacggcttatctaaagacttaaagatttcgcgaaaagaagcgaaagaatacatagacaattattttgacaggtacaagggcgtcaaaaattacatcgactcaattgtcaaatttgcaaaggaaaatgggtatgttacgactatcttaaataggagaagatacggtccggaaatcaattcaaaaaattttaaccaaagatcttttggcgagagaatggcaatgaatacacctattcaaggtagcgctgcggatataataaagatgtcgatggttaaagtatacaatgaattaaaggaaagaggattgaaatcaagacttattcttcaggtgcacgatgagcttataattgacacacatcctgatgaagttgaaatagtcaaggagcttctaaaatcaataatggaaaatatcataaagttgaaagttcctttagttgtagatatagggcaagggaaaaactggtatgatgcaaaataaaaggatcc

SEQ ID NO: 615 - DNA, 2678 bp, Artificial Sequence
  Description of Artificial Sequence: Synthetic Clostridium thermosulfurogenes DNA Polymerase I786H
atgaaatacctgctgccgaccgctgctgctggtctgctgctcctcgctgcccagccggcgatggccatggcgaaatttttgatcatagatggtaatagcttgatgtacagggcgtattttgccctgcctgatttgatgaacagcgaaggaatgcatacaaatgccatatacggtttttcaatgatgcttcttaaattgctggaggaggagaaaccagactacatagcaatagctttcgataaaaaggcttctacatttaggcacaaggagtacagtgcttataaaggaacccgccagtcgatgccagaagagctgatagaacaggtggatattttaaaagatgtgataaatgcatttaacataaagaccatcgagatagagggatttgaagcagatgatatcattggtacagtatcaaaaattgcttccgaaagtgggatggatgtgcttatcgtcacaggcgacagagatgcgcttcagcttgtgtcggcaaatgtaaaagtaaaaatatgtaaaaaaggcataacgcagatggatgagtacgatgaaaaggcggtctttgaaaagtatgaagtgacgccgcttcaattcatagacttgaaagggcttatgggagacaaatcagacaacattccaggagtgcccaatataggggagaagacggccataaagcttgttaaagaatttggatcaattgaaaatttactgatgaatacagataagttaaaagggaaaataaaagaaaatgtagaaaacaatgcagaattagctgttttaagcaaacggcttgctacgattgagagaaatgttcctattgatattgatttgaatgaatacgcggttaaaaattacgatgtcaataagcttacagagctatttgaaaaattggaattttcaagcctcatctcagatttaaaagatgatagtcgtgatacaaaggatattaaagaatggcctgtaagagattttacatacgttaaaaatgttttaggaaagtttgatgttttgtcattgtatccattcatatatgatggaaagataaaagcagtatcatttgcttgcggtgacggatcgttttttgtagagattgatgattatgacaattttaaattgcttaataatgataagcttacgttgataggacacgatctgaaagattttttagtaaacatttcatactgcggtattgaacttaattgtaagattttagatacggccataatgacttatcttttaaatccgtctgagtcgaattacgacataagtcgcgtattgaaaaaatacttgaaagaggatttgcaaaacatagatgatatagtaggcaagggcaggaataaaaagagctacgatgacattgacaaaaagcttttagtcgattatatgtgttcagccgcatcaaacttatctaagttaaaagataagctcatgtcatttataaaagagatggagatggaagatcttttaaaaaatgtggaaattccgcttattgaagtgctaaaatctatggaggtgtacggctttacattagataaagatgtacttagaagtatttctaaagaaatagatgaaaagacagataagattgtaaaagatatttacgatgctgctggatacgaatttaatattaactctacaaagcagttatcagaatttttgtttgataaactgaatttgccagcaataaaaaagactaaaacagggtattcgactgacatggaagtccttgcagaacttataccgtacaatgacatagtaggagaaataatagaatatagacagcttatgaagcttaaatctacgtacatagatggcttcattcccatcatggatgaaaataatagggtccactctacgtttaaacaaacagttgctgctacagggagaattagctcaacagagcctaatctgcagaacatacctgtaagagaagaatttggcaggaggataagaaaggcatttgtatcaagttatgaagatgggcttataatatctgctgattattctcagattgagctaagggttcttgcacatctttcagaggatgaaaaacttattgagtcatttttgaacaacgaagatatacatttaaggacggcatcggaggtttttaaggtttcgaaagaagaagtgacaagtgaaatgagaaggcgggcgaaagctgtcaactttggtattgtatatggtataagcgattacggcttatctaaagacttaaagatttcgcgaaaagaagcgaaagaatacatagacaattattttgacaggtacaagggcgtcaaaaattacatcgactcaattgtcaaatttgcaaaggaaaatgggtatgttacgactatcttaaataggagaagataccatccggaaatcaattcaaaaaattttaaccaaagatcttttggcgagagaatggcaatgaatacacctattcaaggtagcgctgcggatataataaagatgtcgatggttaaagtatacaatgaattaaaggaaagaggattgaaatcaagacttattcttcaggtgcacgatgagcttataattgacacacatcctgatgaagttgaaatagtcaaggagcttctaaaatcaataatggaaaatatcataaagttgaaagttcctttagttgtagatatagggcaagggaaaaactggtatgatgcaaaataaaaggatcc

SEQ ID NO: 616 - DNA, 2678 bp, Artificial Sequence
  Description of Artificial Sequence: Synthetic Clostridium thermosulfurogenes DNA Polymerase I786L
atgaaatacctgctgccgaccgctgctgctggtctgctgctcctcgctgcccagccggcgatggccatggcgaaatttttgatcatagatggtaatagcttgatgtacagggcgtattttgccctgcctgatttgatgaacagcgaaggaatgcatacaaatgccatatacggtttttcaatgatgcttcttaaattgctggaggaggagaaaccagactacatagcaatagctttcgataaaaaggcttctacatttaggcacaaggagtacagtgcttataaaggaacccgccagtcgatgccagaagagctgatagaacaggtggatattttaaaagatgtgataaatgcatttaacataaagaccatcgagatagagggatttgaagcagatgatatcattggtacagtatcaaaaattgcttccgaaagtgggatggatgtgcttatcgtcacaggcgacagagatgcgcttcagcttgtgtcggcaaatgtaaaagtaaaaatatgtaaaaaaggcataacgcagatggatgagtacgatgaaaaggcggtctttgaaaagtatgaagtgacgccgcttcaattcatagacttgaaagggcttatgggagacaaatcagacaacattccaggagtgcccaatataggggagaagacggccataaagcttgttaaagaatttggatcaattgaaaatttactgatgaatacagataagttaaaagggaaaataaaagaaaatgtagaaaacaatgcagaattagctgttttaagcaaacggcttgctacgattgagagaaatgttcctattgatattgatttgaatgaatacgcggttaaaaattacgatgtcaataagcttacagagctatttgaaaaattggaattttcaagcctcatctcagatttaaaagatgatagtcgtgatacaaaggatattaaagaatggcctgtaagagattttacatacgttaaaaatgttttaggaaagtttgatgttttgtcattgtatccattcatatatgatggaaagataaaagcagtatcatttgcttgcggtgacggatcgttttttgtagagattgatgattatgacaattttaaattgcttaataatgataagcttacgttgataggacacgatctgaaagattttttagtaaacatttcatactgcggtattgaacttaattgtaagattttagatacggccataatgacttatcttttaaatccgtctgagtcgaattacgacataagtcgcgtattgaaaaaatacttgaaagaggatttgcaaaacatagatgatatagtaggcaagggcaggaataaaaagagctacgatgacattgacaaaaagcttttagtcgattatatgtgttcagccgcatcaaacttatctaagttaaaagataagctcatgtcatttataaaagagatggagatggaagatcttttaaaaaatgtggaaattccgcttattgaagtgctaaaatctatggaggtgtacggctttacattagataaagatgtacttagaagtatttctaaagaaatagatgaaaagacagataagattgtaaaagatatttacgatgctgctggatacgaatttaatattaactctacaaagcagttatcagaatttttgtttgataaactgaatttgccagcaataaaaaagactaaaacagggtattcgactgacatggaagtccttgcagaacttataccgtacaatgacatagtaggagaaataatagaatatagacagcttatgaagcttaaatctacgtacatagatggcttcattcccatcatggatgaaaataatagggtccactctacgtttaaacaaacagttgctgctacagggagaattagctcaacagagcctaatctgcagaacatacctgtaagagaagaatttggcaggaggataagaaaggcatttgtatcaagttatgaagatgggcttataatatctgctgattattctcagattgagctaagggttcttgcacatctttcagaggatgaaaaacttattgagtcatttttgaacaacgaagatatacatttaaggacggcatcggaggtttttaaggtttcgaaagaagaagtgacaagtgaaatgagaaggcgggcgaaagctgtcaactttggtattgtatatggtataagcgattacggcttatctaaagacttaaagatttcgcgaaaagaagcgaaagaatacatagacaattattttgacaggtacaagggcgtcaaaaattacatcgactcaattgtcaaatttgcaaaggaaaatgggtatgttacgactatcttaaataggagaagataccttccggaaatcaattcaaaaaattttaaccaaagatcttttggcgagagaatggcaatgaatacacctattcaaggtagcgctgcggatataataaagatgtcgatggttaaagtatacaatgaattaaaggaaagaggattgaaatcaagacttattcttcaggtgcacgatgagcttataattgacacacatcctgatgaagttgaaatagtcaaggagcttctaaaatcaataatggaaaatatcataaagttgaaagttcctttagttgtagatatagggcaagggaaaaactggtatgatgcaaaataaaaggatcc

SEQ ID NO: 617 - DNA, 2678 bp, Artificial Sequence
  Description of Artificial Sequence: Synthetic Clostridium thermosulfurogenes DNA Polymerase I786K
atgaaatacctgctgccgaccgctgctgctggtctgctgctcctcgctgcccagccggcgatggccatggcgaaatttttgatcatagatggtaatagcttgatgtacagggcgtattttgccctgcctgatttgatgaacagcgaaggaatgcatacaaatgccatatacggtttttcaatgatgcttcttaaattgctggaggaggagaaaccagactacatagcaatagctttcgataaaaaggcttctacatttaggcacaaggagtacagtgcttataaaggaacccgccagtcgatgccagaagagctgatagaacaggtggatattttaaaagatgtgataaatgcatttaacataaagaccatcgagatagagggatttgaagcagatgatatcattggtacagtatcaaaaattgcttccgaaagtgggatggatgtgcttatcgtcacaggcgacagagatgcgcttcagcttgtgtcggcaaatgtaaaagtaaaaatatgtaaaaaaggcataacgcagatggatgagtacgatgaaaaggcggtctttgaaaagtatgaagtgacgccgcttcaattcatagacttgaaagggcttatgggagacaaatcagacaacattccaggagtgcccaatataggggagaagacggccataaagcttgttaaagaatttggatcaattgaaaatttactgatgaatacagataagttaaaagggaaaataaaagaaaatgtagaaaacaatgcagaattagctgttttaagcaaacggcttgctacgattgagagaaatgttcctattgatattgatttgaatgaatacgcggttaaaaattacgatgtcaataagcttacagagctatttgaaaaattggaattttcaagcctcatctcagatttaaaagatgatagtcgtgatacaaaggatattaaagaatggcctgtaagagattttacatacgttaaaaatgttttaggaaagtttgatgttttgtcattgtatccattcatatatgatggaaagataaaagcagtatcatttgcttgcggtgacggatcgttttttgtagagattgatgattatgacaattttaaattgcttaataatgataagcttacgttgataggacacgatctgaaagattttttagtaaacatttcatactgcggtattgaacttaattgtaagattttagatacggccataatgacttatcttttaaatccgtctgagtcgaattacgacataagtcgcgtattgaaaaaatacttgaaagaggatttgcaaaacatagatgatatagtaggcaagggcaggaataaaaagagctacgatgacattgacaaaaagcttttagtcgattatatgtgttcagccgcatcaaacttatctaagttaaaagataagctcatgtcatttataaaagagatggagatggaagatcttttaaaaaatgtggaaattccgcttattgaagtgctaaaatctatggaggtgtacggctttacattagataaagatgtacttagaagtatttctaaagaaatagatgaaaagacagataagattgtaaaagatatttacgatgctgctggatacgaatttaatattaactctacaaagcagttatcagaatttttgtttgataaactgaatttgccagcaataaaaaagactaaaacagggtattcgactgacatggaagtccttgcagaacttataccgtacaatgacatagtaggagaaataatagaatatagacagcttatgaagcttaaatctacgtacatagatggcttcattcccatcatggatgaaaataatagggtccactctacgtttaaacaaacagttgctgctacagggagaattagctcaacagagcctaatctgcagaacatacctgtaagagaagaatttggcaggaggataagaaaggcatttgtatcaagttatgaagatgggcttataatatctgctgattattctcagattgagctaagggttcttgcacatctttcagaggatgaaaaacttattgagtcatttttgaacaacgaagatatacatttaaggacggcatcggaggtttttaaggtttcgaaagaagaagtgacaagtgaaatgagaaggcgggcgaaagctgtcaactttggtattgtatatggtataagcgattacggcttatctaaagacttaaagatttcgcgaaaagaagcgaaagaatacatagacaattattttgacaggtacaagggcgtcaaaaattacatcgactcaattgtcaaatttgcaaaggaaaatgggtatgttacgactatcttaaataggagaagatacaaaccggaaatcaattcaaaaaattttaaccaaagatcttttggcgagagaatggcaatgaatacacctattcaaggtagcgctgcggatataataaagatgtcgatggttaaagtatacaatgaattaaaggaaagaggattgaaatcaagacttattcttcaggtgcacgatgagcttataattgacacacatcctgatgaagttgaaatagtcaaggagcttctaaaatcaataatggaaaatatcataaagttgaaagttcctttagttgtagatatagggcaagggaaaaactggtatgatgcaaaataaaaggatcc

SEQ ID NO: 618 - DNA, 2678 bp, Artificial Sequence
  Description of Artificial Sequence: Synthetic Clostridium thermosulfurogenes DNA Polymerase I786M
atgaaatacctgctgccgaccgctgctgctggtctgctgctcctcgctgcccagccggcgatggccatggcgaaatttttgatcatagatggtaatagcttgatgtacagggcgtattttgccctgcctgatttgatgaacagcgaaggaatgcatacaaatgccatatacggtttttcaatgatgcttcttaaattgctggaggaggagaaaccagactacatagcaatagctttcgataaaaaggcttctacatttaggcacaaggagtacagtgcttataaaggaacccgccagtcgatgccagaagagctgatagaacaggtggatattttaaaagatgtgataaatgcatttaacataaagaccatcgagatagagggatttgaagcagatgatatcattggtacagtatcaaaaattgcttccgaaagtgggatggatgtgcttatcgtcacaggcgacagagatgcgcttcagcttgtgtcggcaaatgtaaaagtaaaaatatgtaaaaaaggcataacgcagatggatgagtacgatgaaaaggcggtctttgaaaagtatgaagtgacgccgcttcaattcatagacttgaaagggcttatgggagacaaatcagacaacattccaggagtgcccaatataggggagaagacggccataaagcttgttaaagaatttggatcaattgaaaatttactgatgaatacagataagttaaaagggaaaataaaagaaaatgtagaaaacaatgcagaattagctgttttaagcaaacggcttgctacgattgagagaaatgttcctattgatattgatttgaatgaatacgcggttaaaaattacgatgtcaataagcttacagagctatttgaaaaattggaattttcaagcctcatctcagatttaaaagatgatagtcgtgatacaaaggatattaaagaatggcctgtaagagattttacatacgttaaaaatgttttaggaaagtttgatgttttgtcattgtatccattcatatatgatggaaagataaaagcagtatcatttgcttgcggtgacggatcgttttttgtagagattgatgattatgacaattttaaattgcttaataatgataagcttacgttgataggacacgatctgaaagattttttagtaaacatttcatactgcggtattgaacttaattgtaagattttagatacggccataatgacttatcttttaaatccgtctgagtcgaattacgacataagtcgcgtattgaaaaaatacttgaaagaggatttgcaaaacatagatgatatagtaggcaagggcaggaataaaaagagctacgatgacattgacaaaaagcttttagtcgattatatgtgttcagccgcatcaaacttatctaagttaaaagataagctcatgtcatttataaaagagatggagatggaagatcttttaaaaaatgtggaaattccgcttattgaagtgctaaaatctatggaggtgtacggctttacattagataaagatgtacttagaagtatttctaaagaaatagatgaaaagacagataagattgtaaaagatatttacgatgctgctggatacgaatttaatattaactctacaaagcagttatcagaatttttgtttgataaactgaatttgccagcaataaaaaagactaaaacagggtattcgactgacatggaagtccttgcagaacttataccgtacaatgacatagtaggagaaataatagaatatagacagcttatgaagcttaaatctacgtacatagatggcttcattcccatcatggatgaaaataatagggtccactctacgtttaaacaaacagttgctgctacagggagaattagctcaacagagcctaatctgcagaacatacctgtaagagaagaatttggcaggaggataagaaaggcatttgtatcaagttatgaagatgggcttataatatctgctgattattctcagattgagctaagggttcttgcacatctttcagaggatgaaaaacttattgagtcatttttgaacaacgaagatatacatttaaggacggcatcggaggtttttaaggtttcgaaagaagaagtgacaagtgaaatgagaaggcgggcgaaagctgtcaactttggtattgtatatggtataagcgattacggcttatctaaagacttaaagatttcgcgaaaagaagcgaaagaatacatagacaattattttgacaggtacaagggcgtcaaaaattacatcgactcaattgtcaaatttgcaaaggaaaatgggtatgttacgactatcttaaataggagaagatacatgccggaaatcaattcaaaaaattttaaccaaagatcttttggcgagagaatggcaatgaatacacctattcaaggtagcgctgcggatataataaagatgtcgatggttaaagtatacaatgaattaaaggaaagaggattgaaatcaagacttattcttcaggtgcacgatgagcttataattgacacacatcctgatgaagttgaaatagtcaaggagcttctaaaatcaataatggaaaatatcataaagttgaaagttcctttagttgtagatatagggcaagggaaaaactggtatgatgcaaaataaaaggatcc

SEQ ID NO: 619 - DNA, 2678 bp, Artificial Sequence
  Description of Artificial Sequence: Synthetic Clostridium thermosulfurogenes DNA Polymerase I786F
atgaaatacctgctgccgaccgctgctgctggtctgctgctcctcgctgcccagccggcgatggccatggcgaaatttttgatcatagatggtaatagcttgatgtacagggcgtattttgccctgcctgatttgatgaacagcgaaggaatgcatacaaatgccatatacggtttttcaatgatgcttcttaaattgctggaggaggagaaaccagactacatagcaatagctttcgataaaaaggcttctacatttaggcacaaggagtacagtgcttataaaggaacccgccagtcgatgccagaagagctgatagaacaggtggatattttaaaagatgtgataaatgcatttaacataaagaccatcgagatagagggatttgaagcagatgatatcattggtacagtatcaaaaattgcttccgaaagtgggatggatgtgcttatcgtcacaggcgacagagatgcgcttcagcttgtgtcggcaaatgtaaaagtaaaaatatgtaaaaaaggcataacgcagatggatgagtacgatgaaaaggcggtctttgaaaagtatgaagtgacgccgcttcaattcatagacttgaaagggcttatgggagacaaatcagacaacattccaggagtgcccaatataggggagaagacggccataaagcttgttaaagaatttggatcaattgaaaatttactgatgaatacagataagttaaaagggaaaataaaagaaaatgtagaaaacaatgcagaattagctgttttaagcaaacggcttgctacgattgagagaaatgttcctattgatattgatttgaatgaatacgcggttaaaaattacgatgtcaataagcttacagagctatttgaaaaattggaattttcaagcctcatctcagatttaaaagatgatagtcgtgatacaaaggatattaaagaatggcctgtaagagattttacatacgttaaaaatgttttaggaaagtttgatgttttgtcattgtatccattcatatatgatggaaagataaaagcagtatcatttgcttgcggtgacggatcgttttttgtagagattgatgattatgacaattttaaattgcttaataatgataagcttacgttgataggacacgatctgaaagattttttagtaaacatttcatactgcggtattgaacttaattgtaagattttagatacggccataatgacttatcttttaaatccgtctgagtcgaattacgacataagtcgcgtattgaaaaaatacttgaaagaggatttgcaaaacatagatgatatagtaggcaagggcaggaataaaaagagctacgatgacattgacaaaaagcttttagtcgattatatgtgttcagccgcatcaaacttatctaagttaaaagataagctcatgtcatttataaaagagatggagatggaagatcttttaaaaaatgtggaaattccgcttattgaagtgctaaaatctatggaggtgtacggctttacattagataaagatgtacttagaagtatttctaaagaaatagatgaaaagacagataagattgtaaaagatatttacgatgctgctggatacgaatttaatattaactctacaaagcagttatcagaatttttgtttgataaactgaatttgccagcaataaaaaagactaaaacagggtattcgactgacatggaagtccttgcagaacttataccgtacaatgacatagtaggagaaataatagaatatagacagcttatgaagcttaaatctacgtacatagatggcttcattcccatcatggatgaaaataatagggtccactctacgtttaaacaaacagttgctgctacagggagaattagctcaacagagcctaatctgcagaacatacctgtaagagaagaatttggcaggaggataagaaaggcatttgtatcaagttatgaagatgggcttataatatctgctgattattctcagattgagctaagggttcttgcacatctttcagaggatgaaaaacttattgagtcatttttgaacaacgaagatatacatttaaggacggcatcggaggtttttaaggtttcgaaagaagaagtgacaagtgaaatgagaaggcgggcgaaagctgtcaactttggtattgtatatggtataagcgattacggcttatctaaagacttaaagatttcgcgaaaagaagcgaaagaatacatagacaattattttgacaggtacaagggcgtcaaaaattacatcgactcaattgtcaaatttgcaaaggaaaatgggtatgttacgactatcttaaataggagaagatactttccggaaatcaattcaaaaaattttaaccaaagatcttttggcgagagaatggcaatgaatacacctattcaaggtagcgctgcggatataataaagatgtcgatggttaaagtatacaatgaattaaaggaaagaggattgaaatcaagacttattcttcaggtgcacgatgagcttataattgacacacatcctgatgaagttgaaatagtcaaggagcttctaaaatcaataatggaaaatatcataaagttgaaagttcctttagttgtagatatagggcaagggaaaaactggtatgatgcaaaataaaaggatcc

SEQ ID NO: 620 - DNA, 2678 bp, Artificial Sequence
  Description of Artificial Sequence: Synthetic Clostridium thermosulfurogenes DNA Polymerase I786P
atgaaatacctgctgccgaccgctgctgctggtctgctgctcctcgctgcccagccggcgatggccatggcgaaatttttgatcatagatggtaatagcttgatgtacagggcgtattttgccctgcctgatttgatgaacagcgaaggaatgcatacaaatgccatatacggtttttcaatgatgcttcttaaattgctggaggaggagaaaccagactacatagcaatagctttcgataaaaaggcttctacatttaggcacaaggagtacagtgcttataaaggaacccgccagtcgatgccagaagagctgatagaacaggtggatattttaaaagatgtgataaatgcatttaacataaagaccatcgagatagagggatttgaagcagatgatatcattggtacagtatcaaaaattgcttccgaaagtgggatggatgtgcttatcgtcacaggcgacagagatgcgcttcagcttgtgtcggcaaatgtaaaagtaaaaatatgtaaaaaaggcataacgcagatggatgagtacgatgaaaaggcggtctttgaaaagtatgaagtgacgccgcttcaattcatagacttgaaagggcttatgggagacaaatcagacaacattccaggagtgcccaatataggggagaagacggccataaagcttgttaaagaatttggatcaattgaaaatttactgatgaatacagataagttaaaagggaaaataaaagaaaatgtagaaaacaatgcagaattagctgttttaagcaaacggcttgctacgattgagagaaatgttcctattgatattgatttgaatgaatacgcggttaaaaattacgatgtcaataagcttacagagctatttgaaaaattggaattttcaagcctcatctcagatttaaaagatgatagtcgtgatacaaaggatattaaagaatggcctgtaagagattttacatacgttaaaaatgttttaggaaagtttgatgttttgtcattgtatccattcatatatgatggaaagataaaagcagtatcatttgcttgcggtgacggatcgttttttgtagagattgatgattatgacaattttaaattgcttaataatgataagcttacgttgataggacacgatctgaaagattttttagtaaacatttcatactgcggtattgaacttaattgtaagattttagatacggccataatgacttatcttttaaatccgtctgagtcgaattacgacataagtcgcgtattgaaaaaatacttgaaagaggatttgcaaaacatagatgatatagtaggcaagggcaggaataaaaagagctacgatgacattgacaaaaagcttttagtcgattatatgtgttcagccgcatcaaacttatctaagttaaaagataagctcatgtcatttataaaagagatggagatggaagatcttttaaaaaatgtggaaattccgcttattgaagtgctaaaatctatggaggtgtacggctttacattagataaagatgtacttagaagtatttctaaagaaatagatgaaaagacagataagattgtaaaagatatttacgatgctgctggatacgaatttaatattaactctacaaagcagttatcagaatttttgtttgataaactgaatttgccagcaataaaaaagactaaaacagggtattcgactgacatggaagtccttgcagaacttataccgtacaatgacatagtaggagaaataatagaatatagacagcttatgaagcttaaatctacgtacatagatggcttcattcccatcatggatgaaaataatagggtccactctacgtttaaacaaacagttgctgctacagggagaattagctcaacagagcctaatctgcagaacatacctgtaagagaagaatttggcaggaggataagaaaggcatttgtatcaagttatgaagatgggcttataatatctgctgattattctcagattgagctaagggttcttgcacatctttcagaggatgaaaaacttattgagtcatttttgaacaacgaagatatacatttaaggacggcatcggaggtttttaaggtttcgaaagaagaagtgacaagtgaaatgagaaggcgggcgaaagctgtcaactttggtattgtatatggtataagcgattacggcttatctaaagacttaaagatttcgcgaaaagaagcgaaagaatacatagacaattattttgacaggtacaagggcgtcaaaaattacatcgactcaattgtcaaatttgcaaaggaaaatgggtatgttacgactatcttaaataggagaagataccctccggaaatcaattcaaaaaattttaaccaaagatcttttggcgagagaatggcaatgaatacacctattcaaggtagcgctgcggatataataaagatgtcgatggttaaagtatacaatgaattaaaggaaagaggattgaaatcaagacttattcttcaggtgcacgatgagcttataattgacacacatcctgatgaagttgaaatagtcaaggagcttctaaaatcaataatggaaaatatcataaagttgaaagttcctttagttgtagatatagggcaagggaaaaactggtatgatgcaaaataaaaggatcc

SEQ ID NO: 621 - DNA, 2678 bp, Artificial Sequence
  Description of Artificial Sequence: Synthetic Clostridium thermosulfurogenes DNA Polymerase I786S
atgaaatacctgctgccgaccgctgctgctggtctgctgctcctcgctgcccagccggcgatggccatggcgaaatttttgatcatagatggtaatagcttgatgtacagggcgtattttgccctgcctgatttgatgaacagcgaaggaatgcatacaaatgccatatacggtttttcaatgatgcttcttaaattgctggaggaggagaaaccagactacatagcaatagctttcgataaaaaggcttctacatttaggcacaaggagtacagtgcttataaaggaacccgccagtcgatgccagaagagctgatagaacaggtggatattttaaaagatgtgataaatgcatttaacataaagaccatcgagatagagggatttgaagcagatgatatcattggtacagtatcaaaaattgcttccgaaagtgggatggatgtgcttatcgtcacaggcgacagagatgcgcttcagcttgtgtcggcaaatgtaaaagtaaaaatatgtaaaaaaggcataacgcagatggatgagtacgatgaaaaggcggtctttgaaaagtatgaagtgacgccgcttcaattcatagacttgaaagggcttatgggagacaaatcagacaacattccaggagtgcccaatataggggagaagacggccataaagcttgttaaagaatttggatcaattgaaaatttactgatgaatacagataagttaaaagggaaaataaaagaaaatgtagaaaacaatgcagaattagctgttttaagcaaacggcttgctacgattgagagaaatgttcctattgatattgatttgaatgaatacgcggttaaaaattacgatgtcaataagcttacagagctatttgaaaaattggaattttcaagcctcatctcagatttaaaagatgatagtcgtgatacaaaggatattaaagaatggcctgtaagagattttacatacgttaaaaatgttttaggaaagtttgatgttttgtcattgtatccattcatatatgatggaaagataaaagcagtatcatttgcttgcggtgacggatcgttttttgtagagattgatgattatgacaattttaaattgcttaataatgataagcttacgttgataggacacgatctgaaagattttttagtaaacatttcatactgcggtattgaacttaattgtaagattttagatacggccataatgacttatcttttaaatccgtctgagtcgaattacgacataagtcgcgtattgaaaaaatacttgaaagaggatttgcaaaacatagatgatatagtaggcaagggcaggaataaaaagagctacgatgacattgacaaaaagcttttagtcgattatatgtgttcagccgcatcaaacttatctaagttaaaagataagctcatgtcatttataaaagagatggagatggaagatcttttaaaaaatgtggaaattccgcttattgaagtgctaaaatctatggaggtgtacggctttacattagataaagatgtacttagaagtatttctaaagaaatagatgaaaagacagataagattgtaaaagatatttacgatgctgctggatacgaatttaatattaactctacaaagcagttatcagaatttttgtttgataaactgaatttgccagcaataaaaaagactaaaacagggtattcgactgacatggaagtccttgcagaacttataccgtacaatgacatagtaggagaaataatagaatatagacagcttatgaagcttaaatctacgtacatagatggcttcattcccatcatggatgaaaataatagggtccactctacgtttaaacaaacagttgctgctacagggagaattagctcaacagagcctaatctgcagaacatacctgtaagagaagaatttggcaggaggataagaaaggcatttgtatcaagttatgaagatgggcttataatatctgctgattattctcagattgagctaagggttcttgcacatctttcagaggatgaaaaacttattgagtcatttttgaacaacgaagatatacatttaaggacggcatcggaggtttttaaggtttcgaaagaagaagtgacaagtgaaatgagaaggcgggcgaaagctgtcaactttggtattgtatatggtataagcgattacggcttatctaaagacttaaagatttcgcgaaaagaagcgaaagaatacatagacaattattttgacaggtacaagggcgtcaaaaattacatcgactcaattgtcaaatttgcaaaggaaaatgggtatgttacgactatcttaaataggagaagatactctccggaaatcaattcaaaaaattttaaccaaagatcttttggcgagagaatggcaatgaatacacctattcaaggtagcgctgcggatataataaagatgtcgatggttaaagtatacaatgaattaaaggaaagaggattgaaatcaagacttattcttcaggtgcacgatgagcttataattgacacacatcctgatgaagttgaaatagtcaaggagcttctaaaatcaataatggaaaatatcataaagttgaaagttcctttagttgtagatatagggcaagggaaaaactggtatgatgcaaaataaaaggatcc

SEQ ID NO: 622 - DNA, 2678 bp, Artificial Sequence
  Description of Artificial Sequence: Synthetic Clostridium thermosulfurogenes DNA Polymerase I786T
atgaaatacctgctgccgaccgctgctgctggtctgctgctcctcgctgcccagccggcgatggccatggcgaaatttttgatcatagatggtaatagcttgatgtacagggcgtattttgccctgcctgatttgatgaacagcgaaggaatgcatacaaatgccatatacggtttttcaatgatgcttcttaaattgctggaggaggagaaaccagactacatagcaatagctttcgataaaaaggcttctacatttaggcacaaggagtacagtgcttataaaggaacccgccagtcgatgccagaagagctgatagaacaggtggatattttaaaagatgtgataaatgcatttaacataaagaccatcgagatagagggatttgaagcagatgatatcattggtacagtatcaaaaattgcttccgaaagtgggatggatgtgcttatcgtcacaggcgacagagatgcgcttcagcttgtgtcggcaaatgtaaaagtaaaaatatgtaaaaaaggcataacgcagatggatgagtacgatgaaaaggcggtctttgaaaagtatgaagtgacgccgcttcaattcatagacttgaaagggcttatgggagacaaatcagacaacattccaggagtgcccaatataggggagaagacggccataaagcttgttaaagaatttggatcaattgaaaatttactgatgaatacagataagttaaaagggaaaataaaagaaaatgtagaaaacaatgcagaattagctgttttaagcaaacggcttgctacgattgagagaaatgttcctattgatattgatttgaatgaatacgcggttaaaaattacgatgtcaataagcttacagagctatttgaaaaattggaattttcaagcctcatctcagatttaaaagatgatagtcgtgatacaaaggatattaaagaatggcctgtaagagattttacatacgttaaaaatgttttaggaaagtttgatgttttgtcattgtatccattcatatatgatggaaagataaaagcagtatcatttgcttgcggtgacggatcgttttttgtagagattgatgattatgacaattttaaattgcttaataatgataagcttacgttgataggacacgatctgaaagattttttagtaaacatttcatactgcggtattgaacttaattgtaagattttagatacggccataatgacttatcttttaaatccgtctgagtcgaattacgacataagtcgcgtattgaaaaaatacttgaaagaggatttgcaaaacatagatgatatagtaggcaagggcaggaataaaaagagctacgatgacattgacaaaaagcttttagtcgattatatgtgttcagccgcatcaaacttatctaagttaaaagataagctcatgtcatttataaaagagatggagatggaagatcttttaaaaaatgtggaaattccgcttattgaagtgctaaaatctatggaggtgtacggctttacattagataaagatgtacttagaagtatttctaaagaaatagatgaaaagacagataagattgtaaaagatatttacgatgctgctggatacgaatttaatattaactctacaaagcagttatcagaatttttgtttgataaactgaatttgccagcaataaaaaagactaaaacagggtattcgactgacatggaagtccttgcagaacttataccgtacaatgacatagtaggagaaataatagaatatagacagcttatgaagcttaaatctacgtacatagatggcttcattcccatcatggatgaaaataatagggtccactctacgtttaaacaaacagttgctgctacagggagaattagctcaacagagcctaatctgcagaacatacctgtaagagaagaatttggcaggaggataagaaaggcatttgtatcaagttatgaagatgggcttataatatctgctgattattctcagattgagctaagggttcttgcacatctttcagaggatgaaaaacttattgagtcatttttgaacaacgaagatatacatttaaggacggcatcggaggtttttaaggtttcgaaagaagaagtgacaagtgaaatgagaaggcgggcgaaagctgtcaactttggtattgtatatggtataagcgattacggcttatctaaagacttaaagatttcgcgaaaagaagcgaaagaatacatagacaattattttgacaggtacaagggcgtcaaaaattacatcgactcaattgtcaaatttgcaaaggaaaatgggtatgttacgactatcttaaataggagaagatacactccggaaatcaattcaaaaaattttaaccaaagatcttttggcgagagaatggcaatgaatacacctattcaaggtagcgctgcggatataataaagatgtcgatggttaaagtatacaatgaattaaaggaaagaggattgaaatcaagacttattcttcaggtgcacgatgagcttataattgacacacatcctgatgaagttgaaatagtcaaggagcttctaaaatcaataatggaaaatatcataaagttgaaagttcctttagttgtagatatagggcaagggaaaaactggtatgatgcaaaataaaaggatcc

SEQ ID NO: 623 - DNA, 2678 bp, Artificial Sequence
  Description of Artificial Sequence: Synthetic Clostridium thermosulfurogenes DNA Polymerase I786W
atgaaatacctgctgccgaccgctgctgctggtctgctgctcctcgctgcccagccggcgatggccatggcgaaatttttgatcatagatggtaatagcttgatgtacagggcgtattttgccctgcctgatttgatgaacagcgaaggaatgcatacaaatgccatatacggtttttcaatgatgcttcttaaattgctggaggaggagaaaccagactacatagcaatagctttcgataaaaaggcttctacatttaggcacaaggagtacagtgcttataaaggaacccgccagtcgatgccagaagagctgatagaacaggtggatattttaaaagatgtgataaatgcatttaacataaagaccatcgagatagagggatttgaagcagatgatatcattggtacagtatcaaaaattgcttccgaaagtgggatggatgtgcttatcgtcacaggcgacagagatgcgcttcagcttgtgtcggcaaatgtaaaagtaaaaatatgtaaaaaaggcataacgcagatggatgagtacgatgaaaaggcggtctttgaaaagtatgaagtgacgccgcttcaattcatagacttgaaagggcttatgggagacaaatcagacaacattccaggagtgcccaatataggggagaagacggccataaagcttgttaaagaatttggatcaattgaaaatttactgatgaatacagataagttaaaagggaaaataaaagaaaatgtagaaaacaatgcagaattagctgttttaagcaaacggcttgctacgattgagagaaatgttcctattgatattgatttgaatgaatacgcggttaaaaattacgatgtcaataagcttacagagctatttgaaaaattggaattttcaagcctcatctcagatttaaaagatgatagtcgtgatacaaaggatattaaagaatggcctgtaagagattttacatacgttaaaaatgttttaggaaagtttgatgttttgtcattgtatccattcatatatgatggaaagataaaagcagtatcatttgcttgcggtgacggatcgttttttgtagagattgatgattatgacaattttaaattgcttaataatgataagcttacgttgataggacacgatctgaaagattttttagtaaacatttcatactgcggtattgaacttaattgtaagattttagatacggccataatgacttatcttttaaatccgtctgagtcgaattacgacataagtcgcgtattgaaaaaatacttgaaagaggatttgcaaaacatagatgatatagtaggcaagggcaggaataaaaagagctacgatgacattgacaaaaagcttttagtcgattatatgtgttcagccgcatcaaacttatctaagttaaaagataagctcatgtcatttataaaagagatggagatggaagatcttttaaaaaatgtggaaattccgcttattgaagtgctaaaatctatggaggtgtacggctttacattagataaagatgtacttagaagtatttctaaagaaatagatgaaaagacagataagattgtaaaagatatttacgatgctgctggatacgaatttaatattaactctacaaagcagttatcagaatttttgtttgataaactgaatttgccagcaataaaaaagactaaaacagggtattcgactgacatggaagtccttgcagaacttataccgtacaatgacatagtaggagaaataatagaatatagacagcttatgaagcttaaatctacgtacatagatggcttcattcccatcatggatgaaaataatagggtccactctacgtttaaacaaacagttgctgctacagggagaattagctcaacagagcctaatctgcagaacatacctgtaagagaagaatttggcaggaggataagaaaggcatttgtatcaagttatgaagatgggcttataatatctgctgattattctcagattgagctaagggttcttgcacatctttcagaggatgaaaaacttattgagtcatttttgaacaacgaagatatacatttaaggacggcatcggaggtttttaaggtttcgaaagaagaagtgacaagtgaaatgagaaggcgggcgaaagctgtcaactttggtattgtatatggtataagcgattacggcttatctaaagacttaaagatttcgcgaaaagaagcgaaagaatacatagacaattattttgacaggtacaagggcgtcaaaaattacatcgactcaattgtcaaatttgcaaaggaaaatgggtatgttacgactatcttaaataggagaagatactggccggaaatcaattcaaaaaattttaaccaaagatcttttggcgagagaatggcaatgaatacacctattcaaggtagcgctgcggatataataaagatgtcgatggttaaagtatacaatgaattaaaggaaagaggattgaaatcaagacttattcttcaggtgcacgatgagcttataattgacacacatcctgatgaagttgaaatagtcaaggagcttctaaaatcaataatggaaaatatcataaagttgaaagttcctttagttgtagatatagggcaagggaaaaactggtatgatgcaaaataaaaggatcc

SEQ ID NO: 624 - DNA, 2678 bp, Artificial Sequence
  Description of Artificial Sequence: Synthetic Clostridium thermosulfurogenes DNA Polymerase I786Y
atgaaatacctgctgccgaccgctgctgctggtctgctgctcctcgctgcccagccggcgatggccatggcgaaatttttgatcatagatggtaatagcttgatgtacagggcgtattttgccctgcctgatttgatgaacagcgaaggaatgcatacaaatgccatatacggtttttcaatgatgcttcttaaattgctggaggaggagaaaccagactacatagcaatagctttcgataaaaaggcttctacatttaggcacaaggagtacagtgcttataaaggaacccgccagtcgatgccagaagagctgatagaacaggtggatattttaaaagatgtgataaatgcatttaacataaagaccatcgagatagagggatttgaagcagatgatatcattggtacagtatcaaaaattgcttccgaaagtgggatggatgtgcttatcgtcacaggcgacagagatgcgcttcagcttgtgtcggcaaatgtaaaagtaaaaatatgtaaaaaaggcataacgcagatggatgagtacgatgaaaaggcggtctttgaaaagtatgaagtgacgccgcttcaattcatagacttgaaagggcttatgggagacaaatcagacaacattccaggagtgcccaatataggggagaagacggccataaagcttgttaaagaatttggatcaattgaaaatttactgatgaatacagataagttaaaagggaaaataaaagaaaatgtagaaaacaatgcagaattagctgttttaagcaaacggcttgctacgattgagagaaatgttcctattgatattgatttgaatgaatacgcggttaaaaattacgatgtcaataagcttacagagctatttgaaaaattggaattttcaagcctcatctcagatttaaaagatgatagtcgtgatacaaaggatattaaagaatggcctgtaagagattttacatacgttaaaaatgttttaggaaagtttgatgttttgtcattgtatccattcatatatgatggaaagataaaagcagtatcatttgcttgcggtgacggatcgttttttgtagagattgatgattatgacaattttaaattgcttaataatgataagcttacgttgataggacacgatctgaaagattttttagtaaacatttcatactgcggtattgaacttaattgtaagattttagatacggccataatgacttatcttttaaatccgtctgagtcgaattacgacataagtcgcgtattgaaaaaatacttgaaagaggatttgcaaaacatagatgatatagtaggcaagggcaggaataaaaagagctacgatgacattgacaaaaagcttttagtcgattatatgtgttcagccgcatcaaacttatctaagttaaaagataagctcatgtcatttataaaagagatggagatggaagatcttttaaaaaatgtggaaattccgcttattgaagtgctaaaatctatggaggtgtacggctttacattagataaagatgtacttagaagtatttctaaagaaatagatgaaaagacagataagattgtaaaagatatttacgatgctgctggatacgaatttaatattaactctacaaagcagttatcagaatttttgtttgataaactgaatttgccagcaataaaaaagactaaaacagggtattcgactgacatggaagtccttgcagaacttataccgtacaatgacatagtaggagaaataatagaatatagacagcttatgaagcttaaatctacgtacatagatggcttcattcccatcatggatgaaaataatagggtccactctacgtttaaacaaacagttgctgctacagggagaattagctcaacagagcctaatctgcagaacatacctgtaagagaagaatttggcaggaggataagaaaggcatttgtatcaagttatgaagatgggcttataatatctgctgattattctcagattgagctaagggttcttgcacatctttcagaggatgaaaaacttattgagtcatttttgaacaacgaagatatacatttaaggacggcatcggaggtttttaaggtttcgaaagaagaagtgacaagtgaaatgagaaggcgggcgaaagctgtcaactttggtattgtatatggtataagcgattacggcttatctaaagacttaaagatttcgcgaaaagaagcgaaagaatacatagacaattattttgacaggtacaagggcgtcaaaaattacatcgactcaattgtcaaatttgcaaaggaaaatgggtatgttacgactatcttaaataggagaagatactatccggaaatcaattcaaaaaattttaaccaaagatcttttggcgagagaatggcaatgaatacacctattcaaggtagcgctgcggatataataaagatgtcgatggttaaagtatacaatgaattaaaggaaagaggattgaaatcaagacttattcttcaggtgcacgatgagcttataattgacacacatcctgatgaagttgaaatagtcaaggagcttctaaaatcaataatggaaaatatcataaagttgaaagttcctttagttgtagatatagggcaagggaaaaactggtatgatgcaaaataaaaggatcc

SEQ ID NO: 625 - DNA, 2678 bp, Artificial Sequence
  Description of Artificial Sequence: Synthetic Clostridium thermosulfurogenes DNA Polymerase I786V
atgaaatacctgctgccgaccgctgctgctggtctgctgctcctcgctgcccagccggcgatggccatggcgaaatttttgatcatagatggtaatagcttgatgtacagggcgtattttgccctgcctgatttgatgaacagcgaaggaatgcatacaaatgccatatacggtttttcaatgatgcttcttaaattgctggaggaggagaaaccagactacatagcaatagctttcgataaaaaggcttctacatttaggcacaaggagtacagtgcttataaaggaacccgccagtcgatgccagaagagctgatagaacaggtggatattttaaaagatgtgataaatgcatttaacataaagaccatcgagatagagggatttgaagcagatgatatcattggtacagtatcaaaaattgcttccgaaagtgggatggatgtgcttatcgtcacaggcgacagagatgcgcttcagcttgtgtcggcaaatgtaaaagtaaaaatatgtaaaaaaggcataacgcagatggatgagtacgatgaaaaggcggtctttgaaaagtatgaagtgacgccgcttcaattcatagacttgaaagggcttatgggagacaaatcagacaacattccaggagtgcccaatataggggagaagacggccataaagcttgttaaagaatttggatcaattgaaaatttactgatgaatacagataagttaaaagggaaaataaaagaaaatgtagaaaacaatgcagaattagctgttttaagcaaacggcttgctacgattgagagaaatgttcctattgatattgatttgaatgaatacgcggttaaaaattacgatgtcaataagcttacagagctatttgaaaaattggaattttcaagcctcatctcagatttaaaagatgatagtcgtgatacaaaggatattaaagaatggcctgtaagagattttacatacgttaaaaatgttttaggaaagtttgatgttttgtcattgtatccattcatatatgatggaaagataaaagcagtatcatttgcttgcggtgacggatcgttttttgtagagattgatgattatgacaattttaaattgcttaataatgataagcttacgttgataggacacgatctgaaagattttttagtaaacatttcatactgcggtattgaacttaattgtaagattttagatacggccataatgacttatcttttaaatccgtctgagtcgaattacgacataagtcgcgtattgaaaaaatacttgaaagaggatttgcaaaacatagatgatatagtaggcaagggcaggaataaaaagagctacgatgacattgacaaaaagcttttagtcgattatatgtgttcagccgcatcaaacttatctaagttaaaagataagctcatgtcatttataaaagagatggagatggaagatcttttaaaaaatgtggaaattccgcttattgaagtgctaaaatctatggaggtgtacggctttacattagataaagatgtacttagaagtatttctaaagaaatagatgaaaagacagataagattgtaaaagatatttacgatgctgctggatacgaatttaatattaactctacaaagcagttatcagaatttttgtttgataaactgaatttgccagcaataaaaaagactaaaacagggtattcgactgacatggaagtccttgcagaacttataccgtacaatgacatagtaggagaaataatagaatatagacagcttatgaagcttaaatctacgtacatagatggcttcattcccatcatggatgaaaataatagggtccactctacgtttaaacaaacagttgctgctacagggagaattagctcaacagagcctaatctgcagaacatacctgtaagagaagaatttggcaggaggataagaaaggcatttgtatcaagttatgaagatgggcttataatatctgctgattattctcagattgagctaagggttcttgcacatctttcagaggatgaaaaacttattgagtcatttttgaacaacgaagatatacatttaaggacggcatcggaggtttttaaggtttcgaaagaagaagtgacaagtgaaatgagaaggcgggcgaaagctgtcaactttggtattgtatatggtataagcgattacggcttatctaaagacttaaagatttcgcgaaaagaagcgaaagaatacatagacaattattttgacaggtacaagggcgtcaaaaattacatcgactcaattgtcaaatttgcaaaggaaaatgggtatgttacgactatcttaaataggagaagatacgttccggaaatcaattcaaaaaattttaaccaaagatcttttggcgagagaatggcaatgaatacacctattcaaggtagcgctgcggatataataaagatgtcgatggttaaagtatacaatgaattaaaggaaagaggattgaaatcaagacttattcttcaggtgcacgatgagcttataattgacacacatcctgatgaagttgaaatagtcaaggagcttctaaaatcaataatggaaaatatcataaagttgaaagttcctttagttgtagatatagggcaagggaaaaactggtatgatgcaaaataaaaggatcc

SEQ ID NO: 626 - DNA, 2678 bp, Artificial Sequence
  Description of Artificial Sequence: Synthetic Clostridium thermosulfurogenes DNA Polymerase P787A
atgaaatacctgctgccgaccgctgctgctggtctgctgctcctcgctgcccagccggcgatggccatggcgaaatttttgatcatagatggtaatagcttgatgtacagggcgtattttgccctgcctgatttgatgaacagcgaaggaatgcatacaaatgccatatacggtttttcaatgatgcttcttaaattgctggaggaggagaaaccagactacatagcaatagctttcgataaaaaggcttctacatttaggcacaaggagtacagtgcttataaaggaacccgccagtcgatgccagaagagctgatagaacaggtggatattttaaaagatgtgataaatgcatttaacataaagaccatcgagatagagggatttgaagcagatgatatcattggtacagtatcaaaaattgcttccgaaagtgggatggatgtgcttatcgtcacaggcgacagagatgcgcttcagcttgtgtcggcaaatgtaaaagtaaaaatatgtaaaaaaggcataacgcagatggatgagtacgatgaaaaggcggtctttgaaaagtatgaagtgacgccgcttcaattcatagacttgaaagggcttatgggagacaaatcagacaacattccaggagtgcccaatataggggagaagacggccataaagcttgttaaagaatttggatcaattgaaaatttactgatgaatacagataagttaaaagggaaaataaaagaaaatgtagaaaacaatgcagaattagctgttttaagcaaacggcttgctacgattgagagaaatgttcctattgatattgatttgaatgaatacgcggttaaaaattacgatgtcaataagcttacagagctatttgaaaaattggaattttcaagcctcatctcagatttaaaagatgatagtcgtgatacaaaggatattaaagaatggcctgtaagagattttacatacgttaaaaatgttttaggaaagtttgatgttttgtcattgtatccattcatatatgatggaaagataaaagcagtatcatttgcttgcggtgacggatcgttttttgtagagattgatgattatgacaattttaaattgcttaataatgataagcttacgttgataggacacgatctgaaagattttttagtaaacatttcatactgcggtattgaacttaattgtaagattttagatacggccataatgacttatcttttaaatccgtctgagtcgaattacgacataagtcgcgtattgaaaaaatacttgaaagaggatttgcaaaacatagatgatatagtaggcaagggcaggaataaaaagagctacgatgacattgacaaaaagcttttagtcgattatatgtgttcagccgcatcaaacttatctaagttaaaagataagctcatgtcatttataaaagagatggagatggaagatcttttaaaaaatgtggaaattccgcttattgaagtgctaaaatctatggaggtgtacggctttacattagataaagatgtacttagaagtatttctaaagaaatagatgaaaagacagataagattgtaaaagatatttacgatgctgctggatacgaatttaatattaactctacaaagcagttatcagaatttttgtttgataaactgaatttgccagcaataaaaaagactaaaacagggtattcgactgacatggaagtccttgcagaacttataccgtacaatgacatagtaggagaaataatagaatatagacagcttatgaagcttaaatctacgtacatagatggcttcattcccatcatggatgaaaataatagggtccactctacgtttaaacaaacagttgctgctacagggagaattagctcaacagagcctaatctgcagaacatacctgtaagagaagaatttggcaggaggataagaaaggcatttgtatcaagttatgaagatgggcttataatatctgctgattattctcagattgagctaagggttcttgcacatctttcagaggatgaaaaacttattgagtcatttttgaacaacgaagatatacatttaaggacggcatcggaggtttttaaggtttcgaaagaagaagtgacaagtgaaatgagaaggcgggcgaaagctgtcaactttggtattgtatatggtataagcgattacggcttatctaaagacttaaagatttcgcgaaaagaagcgaaagaatacatagacaattattttgacaggtacaagggcgtcaaaaattacatcgactcaattgtcaaatttgcaaaggaaaatgggtatgttacgactatcttaaataggagaagatacatagctgaaatcaattcaaaaaattttaaccaaagatcttttggcgagagaatggcaatgaatacacctattcaaggtagcgctgcggatataataaagatgtcgatggttaaagtatacaatgaattaaaggaaagaggattgaaatcaagacttattcttcaggtgcacgatgagcttataattgacacacatcctgatgaagttgaaatagtcaaggagcttctaaaatcaataatggaaaatatcataaagttgaaagttcctttagttgtagatatagggcaagggaaaaactggtatgatgcaaaataaaaggatcc

SEQ ID NO: 627 - DNA, 2678 bp, Artificial Sequence
  Description of Artificial Sequence: Synthetic Clostridium thermosulfurogenes DNA Polymerase P787R
atgaaatacctgctgccgaccgctgctgctggtctgctgctcctcgctgcccagccggcgatggccatggcgaaatttttgatcatagatggtaatagcttgatgtacagggcgtattttgccctgcctgatttgatgaacagcgaaggaatgcatacaaatgccatatacggtttttcaatgatgcttcttaaattgctggaggaggagaaaccagactacatagcaatagctttcgataaaaaggcttctacatttaggcacaaggagtacagtgcttataaaggaacccgccagtcgatgccagaagagctgatagaacaggtggatattttaaaagatgtgataaatgcatttaacataaagaccatcgagatagagggatttgaagcagatgatatcattggtacagtatcaaaaattgcttccgaaagtgggatggatgtgcttatcgtcacaggcgacagagatgcgcttcagcttgtgtcggcaaatgtaaaagtaaaaatatgtaaaaaaggcataacgcagatggatgagtacgatgaaaaggcggtctttgaaaagtatgaagtgacgccgcttcaattcatagacttgaaagggcttatgggagacaaatcagacaacattccaggagtgcccaatataggggagaagacggccataaagcttgttaaagaatttggatcaattgaaaatttactgatgaatacagataagttaaaagggaaaataaaagaaaatgtagaaaacaatgcagaattagctgttttaagcaaacggcttgctacgattgagagaaatgttcctattgatattgatttgaatgaatacgcggttaaaaattacgatgtcaataagcttacagagctatttgaaaaattggaattttcaagcctcatctcagatttaaaagatgatagtcgtgatacaaaggatattaaagaatggcctgtaagagattttacatacgttaaaaatgttttaggaaagtttgatgttttgtcattgtatccattcatatatgatggaaagataaaagcagtatcatttgcttgcggtgacggatcgttttttgtagagattgatgattatgacaattttaaattgcttaataatgataagcttacgttgataggacacgatctgaaagattttttagtaaacatttcatactgcggtattgaacttaattgtaagattttagatacggccataatgacttatcttttaaatccgtctgagtcgaattacgacataagtcgcgtattgaaaaaatacttgaaagaggatttgcaaaacatagatgatatagtaggcaagggcaggaataaaaagagctacgatgacattgacaaaaagcttttagtcgattatatgtgttcagccgcatcaaacttatctaagttaaaagataagctcatgtcatttataaaagagatggagatggaagatcttttaaaaaatgtggaaattccgcttattgaagtgctaaaatctatggaggtgtacggctttacattagataaagatgtacttagaagtatttctaaagaaatagatgaaaagacagataagattgtaaaagatatttacgatgctgctggatacgaatttaatattaactctacaaagcagttatcagaatttttgtttgataaactgaatttgccagcaataaaaaagactaaaacagggtattcgactgacatggaagtccttgcagaacttataccgtacaatgacatagtaggagaaataatagaatatagacagcttatgaagcttaaatctacgtacatagatggcttcattcccatcatggatgaaaataatagggtccactctacgtttaaacaaacagttgctgctacagggagaattagctcaacagagcctaatctgcagaacatacctgtaagagaagaatttggcaggaggataagaaaggcatttgtatcaagttatgaagatgggcttataatatctgctgattattctcagattgagctaagggttcttgcacatctttcagaggatgaaaaacttattgagtcatttttgaacaacgaagatatacatttaaggacggcatcggaggtttttaaggtttcgaaagaagaagtgacaagtgaaatgagaaggcgggcgaaagctgtcaactttggtattgtatatggtataagcgattacggcttatctaaagacttaaagatttcgcgaaaagaagcgaaagaatacatagacaattattttgacaggtacaagggcgtcaaaaattacatcgactcaattgtcaaatttgcaaaggaaaatgggtatgttacgactatcttaaataggagaagatacatacgtgaaatcaattcaaaaaattttaaccaaagatcttttggcgagagaatggcaatgaatacacctattcaaggtagcgctgcggatataataaagatgtcgatggttaaagtatacaatgaattaaaggaaagaggattgaaatcaagacttattcttcaggtgcacgatgagcttataattgacacacatcctgatgaagttgaaatagtcaaggagcttctaaaatcaataatggaaaatatcataaagttgaaagttcctttagttgtagatatagggcaagggaaaaactggtatgatgcaaaataaaaggatcc

SEQ ID NO: 628 - DNA, 2678 bp, Artificial Sequence
  Description of Artificial Sequence: Synthetic Clostridium thermosulfurogenes DNA Polymerase P787N
atgaaatacctgctgccgaccgctgctgctggtctgctgctcctcgctgcccagccggcgatggccatggcgaaatttttgatcatagatggtaatagcttgatgtacagggcgtattttgccctgcctgatttgatgaacagcgaaggaatgcatacaaatgccatatacggtttttcaatgatgcttcttaaattgctggaggaggagaaaccagactacatagcaatagctttcgataaaaaggcttctacatttaggcacaaggagtacagtgcttataaaggaacccgccagtcgatgccagaagagctgatagaacaggtggatattttaaaagatgtgataaatgcatttaacataaagaccatcgagatagagggatttgaagcagatgatatcattggtacagtatcaaaaattgcttccgaaagtgggatggatgtgcttatcgtcacaggcgacagagatgcgcttcagcttgtgtcggcaaatgtaaaagtaaaaatatgtaaaaaaggcataacgcagatggatgagtacgatgaaaaggcggtctttgaaaagtatgaagtgacgccgcttcaattcatagacttgaaagggcttatgggagacaaatcagacaacattccaggagtgcccaatataggggagaagacggccataaagcttgttaaagaatttggatcaattgaaaatttactgatgaatacagataagttaaaagggaaaataaaagaaaatgtagaaaacaatgcagaattagctgttttaagcaaacggcttgctacgattgagagaaatgttcctattgatattgatttgaatgaatacgcggttaaaaattacgatgtcaataagcttacagagctatttgaaaaattggaattttcaagcctcatctcagatttaaaagatgatagtcgtgatacaaaggatattaaagaatggcctgtaagagattttacatacgttaaaaatgttttaggaaagtttgatgttttgtcattgtatccattcatatatgatggaaagataaaagcagtatcatttgcttgcggtgacggatcgttttttgtagagattgatgattatgacaattttaaattgcttaataatgataagcttacgttgataggacacgatctgaaagattttttagtaaacatttcatactgcggtattgaacttaattgtaagattttagatacggccataatgacttatcttttaaatccgtctgagtcgaattacgacataagtcgcgtattgaaaaaatacttgaaagaggatttgcaaaacatagatgatatagtaggcaagggcaggaataaaaagagctacgatgacattgacaaaaagcttttagtcgattatatgtgttcagccgcatcaaacttatctaagttaaaagataagctcatgtcatttataaaagagatggagatggaagatcttttaaaaaatgtggaaattccgcttattgaagtgctaaaatctatggaggtgtacggctttacattagataaagatgtacttagaagtatttctaaagaaatagatgaaaagacagataagattgtaaaagatatttacgatgctgctggatacgaatttaatattaactctacaaagcagttatcagaatttttgtttgataaactgaatttgccagcaataaaaaagactaaaacagggtattcgactgacatggaagtccttgcagaacttataccgtacaatgacatagtaggagaaataatagaatatagacagcttatgaagcttaaatctacgtacatagatggcttcattcccatcatggatgaaaataatagggtccactctacgtttaaacaaacagttgctgctacagggagaattagctcaacagagcctaatctgcagaacatacctgtaagagaagaatttggcaggaggataagaaaggcatttgtatcaagttatgaagatgggcttataatatctgctgattattctcagattgagctaagggttcttgcacatctttcagaggatgaaaaacttattgagtcatttttgaacaacgaagatatacatttaaggacggcatcggaggtttttaaggtttcgaaagaagaagtgacaagtgaaatgagaaggcgggcgaaagctgtcaactttggtattgtatatggtataagcgattacggcttatctaaagacttaaagatttcgcgaaaagaagcgaaagaatacatagacaattattttgacaggtacaagggcgtcaaaaattacatcgactcaattgtcaaatttgcaaaggaaaatgggtatgttacgactatcttaaataggagaagatacataaatgaaatcaattcaaaaaattttaaccaaagatcttttggcgagagaatggcaatgaatacacctattcaaggtagcgctgcggatataataaagatgtcgatggttaaagtatacaatgaattaaaggaaagaggattgaaatcaagacttattcttcaggtgcacgatgagcttataattgacacacatcctgatgaagttgaaatagtcaaggagcttctaaaatcaataatggaaaatatcataaagttgaaagttcctttagttgtagatatagggcaagggaaaaactggtatgatgcaaaataaaaggatcc

SEQ ID NO: 629 - DNA, 2678 bp, Artificial Sequence
  Description of Artificial Sequence: Synthetic Clostridium thermosulfurogenes DNA Polymerase P787D
atgaaatacctgctgccgaccgctgctgctggtctgctgctcctcgctgcccagccggcgatggccatggcgaaatttttgatcatagatggtaatagcttgatgtacagggcgtattttgccctgcctgatttgatgaacagcgaaggaatgcatacaaatgccatatacggtttttcaatgatgcttcttaaattgctggaggaggagaaaccagactacatagcaatagctttcgataaaaaggcttctacatttaggcacaaggagtacagtgcttataaaggaacccgccagtcgatgccagaagagctgatagaacaggtggatattttaaaagatgtgataaatgcatttaacataaagaccatcgagatagagggatttgaagcagatgatatcattggtacagtatcaaaaattgcttccgaaagtgggatggatgtgcttatcgtcacaggcgacagagatgcgcttcagcttgtgtcggcaaatgtaaaagtaaaaatatgtaaaaaaggcataacgcagatggatgagtacgatgaaaaggcggtctttgaaaagtatgaagtgacgccgcttcaattcatagacttgaaagggcttatgggagacaaatcagacaacattccaggagtgcccaatataggggagaagacggccataaagcttgttaaagaatttggatcaattgaaaatttactgatgaatacagataagttaaaagggaaaataaaagaaaatgtagaaaacaatgcagaattagctgttttaagcaaacggcttgctacgattgagagaaatgttcctattgatattgatttgaatgaatacgcggttaaaaattacgatgtcaataagcttacagagctatttgaaaaattggaattttcaagcctcatctcagatttaaaagatgatagtcgtgatacaaaggatattaaagaatggcctgtaagagattttacatacgttaaaaatgttttaggaaagtttgatgttttgtcattgtatccattcatatatgatggaaagataaaagcagtatcatttgcttgcggtgacggatcgttttttgtagagattgatgattatgacaattttaaattgcttaataatgataagcttacgttgataggacacgatctgaaagattttttagtaaacatttcatactgcggtattgaacttaattgtaagattttagatacggccataatgacttatcttttaaatccgtctgagtcgaattacgacataagtcgcgtattgaaaaaatacttgaaagaggatttgcaaaacatagatgatatagtaggcaagggcaggaataaaaagagctacgatgacattgacaaaaagcttttagtcgattatatgtgttcagccgcatcaaacttatctaagttaaaagataagctcatgtcatttataaaagagatggagatggaagatcttttaaaaaatgtggaaattccgcttattgaagtgctaaaatctatggaggtgtacggctttacattagataaagatgtacttagaagtatttctaaagaaatagatgaaaagacagataagattgtaaaagatatttacgatgctgctggatacgaatttaatattaactctacaaagcagttatcagaatttttgtttgataaactgaatttgccagcaataaaaaagactaaaacagggtattcgactgacatggaagtccttgcagaacttataccgtacaatgacatagtaggagaaataatagaatatagacagcttatgaagcttaaatctacgtacatagatggcttcattcccatcatggatgaaaataatagggtccactctacgtttaaacaaacagttgctgctacagggagaattagctcaacagagcctaatctgcagaacatacctgtaagagaagaatttggcaggaggataagaaaggcatttgtatcaagttatgaagatgggcttataatatctgctgattattctcagattgagctaagggttcttgcacatctttcagaggatgaaaaacttattgagtcatttttgaacaacgaagatatacatttaaggacggcatcggaggtttttaaggtttcgaaagaagaagtgacaagtgaaatgagaaggcgggcgaaagctgtcaactttggtattgtatatggtataagcgattacggcttatctaaagacttaaagatttcgcgaaaagaagcgaaagaatacatagacaattattttgacaggtacaagggcgtcaaaaattacatcgactcaattgtcaaatttgcaaaggaaaatgggtatgttacgactatcttaaataggagaagatacatagatgaaatcaattcaaaaaattttaaccaaagatcttttggcgagagaatggcaatgaatacacctattcaaggtagcgctgcggatataataaagatgtcgatggttaaagtatacaatgaattaaaggaaagaggattgaaatcaagacttattcttcaggtgcacgatgagcttataattgacacacatcctgatgaagttgaaatagtcaaggagcttctaaaatcaataatggaaaatatcataaagttgaaagttcctttagttgtagatatagggcaagggaaaaactggtatgatgcaaaataaaaggatcc

SEQ ID NO: 630 - DNA, 2678 bp, Artificial Sequence
  Description of Artificial Sequence: Synthetic Clostridium thermosulfurogenes DNA Polymerase P787C
atgaaatacctgctgccgaccgctgctgctggtctgctgctcctcgctgcccagccggcgatggccatggcgaaatttttgatcatagatggtaatagcttgatgtacagggcgtattttgccctgcctgatttgatgaacagcgaaggaatgcatacaaatgccatatacggtttttcaatgatgcttcttaaattgctggaggaggagaaaccagactacatagcaatagctttcgataaaaaggcttctacatttaggcacaaggagtacagtgcttataaaggaacccgccagtcgatgccagaagagctgatagaacaggtggatattttaaaagatgtgataaatgcatttaacataaagaccatcgagatagagggatttgaagcagatgatatcattggtacagtatcaaaaattgcttccgaaagtgggatggatgtgcttatcgtcacaggcgacagagatgcgcttcagcttgtgtcggcaaatgtaaaagtaaaaatatgtaaaaaaggcataacgcagatggatgagtacgatgaaaaggcggtctttgaaaagtatgaagtgacgccgcttcaattcatagacttgaaagggcttatgggagacaaatcagacaacattccaggagtgcccaatataggggagaagacggccataaagcttgttaaagaatttggatcaattgaaaatttactgatgaatacagataagttaaaagggaaaataaaagaaaatgtagaaaacaatgcagaattagctgttttaagcaaacggcttgctacgattgagagaaatgttcctattgatattgatttgaatgaatacgcggttaaaaattacgatgtcaataagcttacagagctatttgaaaaattggaattttcaagcctcatctcagatttaaaagatgatagtcgtgatacaaaggatattaaagaatggcctgtaagagattttacatacgttaaaaatgttttaggaaagtttgatgttttgtcattgtatccattcatatatgatggaaagataaaagcagtatcatttgcttgcggtgacggatcgttttttgtagagattgatgattatgacaattttaaattgcttaataatgataagcttacgttgataggacacgatctgaaagattttttagtaaacatttcatactgcggtattgaacttaattgtaagattttagatacggccataatgacttatcttttaaatccgtctgagtcgaattacgacataagtcgcgtattgaaaaaatacttgaaagaggatttgcaaaacatagatgatatagtaggcaagggcaggaataaaaagagctacgatgacattgacaaaaagcttttagtcgattatatgtgttcagccgcatcaaacttatctaagttaaaagataagctcatgtcatttataaaagagatggagatggaagatcttttaaaaaatgtggaaattccgcttattgaagtgctaaaatctatggaggtgtacggctttacattagataaagatgtacttagaagtatttctaaagaaatagatgaaaagacagataagattgtaaaagatatttacgatgctgctggatacgaatttaatattaactctacaaagcagttatcagaatttttgtttgataaactgaatttgccagcaataaaaaagactaaaacagggtattcgactgacatggaagtccttgcagaacttataccgtacaatgacatagtaggagaaataatagaatatagacagcttatgaagcttaaatctacgtacatagatggcttcattcccatcatggatgaaaataatagggtccactctacgtttaaacaaacagttgctgctacagggagaattagctcaacagagcctaatctgcagaacatacctgtaagagaagaatttggcaggaggataagaaaggcatttgtatcaagttatgaagatgggcttataatatctgctgattattctcagattgagctaagggttcttgcacatctttcagaggatgaaaaacttattgagtcatttttgaacaacgaagatatacatttaaggacggcatcggaggtttttaaggtttcgaaagaagaagtgacaagtgaaatgagaaggcgggcgaaagctgtcaactttggtattgtatatggtataagcgattacggcttatctaaagacttaaagatttcgcgaaaagaagcgaaagaatacatagacaattattttgacaggtacaagggcgtcaaaaattacatcgactcaattgtcaaatttgcaaaggaaaatgggtatgttacgactatcttaaataggagaagatacatatgtgaaatcaattcaaaaaattttaaccaaagatcttttggcgagagaatggcaatgaatacacctattcaaggtagcgctgcggatataataaagatgtcgatggttaaagtatacaatgaattaaaggaaagaggattgaaatcaagacttattcttcaggtgcacgatgagcttataattgacacacatcctgatgaagttgaaatagtcaaggagcttctaaaatcaataatggaaaatatcataaagttgaaagttcctttagttgtagatatagggcaagggaaaaactggtatgatgcaaaataaaaggatcc

SEQ ID NO: 631 - DNA, 2678 bp, Artificial Sequence
  Description of Artificial Sequence: Synthetic Clostridium thermosulfurogenes DNA Polymerase P787E
atgaaatacctgctgccgaccgctgctgctggtctgctgctcctcgctgcccagccggcgatggccatggcgaaatttttgatcatagatggtaatagcttgatgtacagggcgtattttgccctgcctgatttgatgaacagcgaaggaatgcatacaaatgccatatacggtttttcaatgatgcttcttaaattgctggaggaggagaaaccagactacatagcaatagctttcgataaaaaggcttctacatttaggcacaaggagtacagtgcttataaaggaacccgccagtcgatgccagaagagctgatagaacaggtggatattttaaaagatgtgataaatgcatttaacataaagaccatcgagatagagggatttgaagcagatgatatcattggtacagtatcaaaaattgcttccgaaagtgggatggatgtgcttatcgtcacaggcgacagagatgcgcttcagcttgtgtcggcaaatgtaaaagtaaaaatatgtaaaaaaggcataacgcagatggatgagtacgatgaaaaggcggtctttgaaaagtatgaagtgacgccgcttcaattcatagacttgaaagggcttatgggagacaaatcagacaacattccaggagtgcccaatataggggagaagacggccataaagcttgttaaagaatttggatcaattgaaaatttactgatgaatacagataagttaaaagggaaaataaaagaaaatgtagaaaacaatgcagaattagctgttttaagcaaacggcttgctacgattgagagaaatgttcctattgatattgatttgaatgaatacgcggttaaaaattacgatgtcaataagcttacagagctatttgaaaaattggaattttcaagcctcatctcagatttaaaagatgatagtcgtgatacaaaggatattaaagaatggcctgtaagagattttacatacgttaaaaatgttttaggaaagtttgatgttttgtcattgtatccattcatatatgatggaaagataaaagcagtatcatttgcttgcggtgacggatcgttttttgtagagattgatgattatgacaattttaaattgcttaataatgataagcttacgttgataggacacgatctgaaagattttttagtaaacatttcatactgcggtattgaacttaattgtaagattttagatacggccataatgacttatcttttaaatccgtctgagtcgaattacgacataagtcgcgtattgaaaaaatacttgaaagaggatttgcaaaacatagatgatatagtaggcaagggcaggaataaaaagagctacgatgacattgacaaaaagcttttagtcgattatatgtgttcagccgcatcaaacttatctaagttaaaagataagctcatgtcatttataaaagagatggagatggaagatcttttaaaaaatgtggaaattccgcttattgaagtgctaaaatctatggaggtgtacggctttacattagataaagatgtacttagaagtatttctaaagaaatagatgaaaagacagataagattgtaaaagatatttacgatgctgctggatacgaatttaatattaactctacaaagcagttatcagaatttttgtttgataaactgaatttgccagcaataaaaaagactaaaacagggtattcgactgacatggaagtccttgcagaacttataccgtacaatgacatagtaggagaaataatagaatatagacagcttatgaagcttaaatctacgtacatagatggcttcattcccatcatggatgaaaataatagggtccactctacgtttaaacaaacagttgctgctacagggagaattagctcaacagagcctaatctgcagaacatacctgtaagagaagaatttggcaggaggataagaaaggcatttgtatcaagttatgaagatgggcttataatatctgctgattattctcagattgagctaagggttcttgcacatctttcagaggatgaaaaacttattgagtcatttttgaacaacgaagatatacatttaaggacggcatcggaggtttttaaggtttcgaaagaagaagtgacaagtgaaatgagaaggcgggcgaaagctgtcaactttggtattgtatatggtataagcgattacggcttatctaaagacttaaagatttcgcgaaaagaagcgaaagaatacatagacaattattttgacaggtacaagggcgtcaaaaattacatcgactcaattgtcaaatttgcaaaggaaaatgggtatgttacgactatcttaaataggagaagatacatagaagaaatcaattcaaaaaattttaaccaaagatcttttggcgagagaatggcaatgaatacacctattcaaggtagcgctgcggatataataaagatgtcgatggttaaagtatacaatgaattaaaggaaagaggattgaaatcaagacttattcttcaggtgcacgatgagcttataattgacacacatcctgatgaagttgaaatagtcaaggagcttctaaaatcaataatggaaaatatcataaagttgaaagttcctttagttgtagatatagggcaagggaaaaactggtatgatgcaaaataaaaggatcc

SEQ ID NO: 632 - DNA, 2678 bp, Artificial Sequence
  Description of Artificial Sequence: Synthetic Clostridium thermosulfurogenes DNA Polymerase P787Q
atgaaatacctgctgccgaccgctgctgctggtctgctgctcctcgctgcccagccggcgatggccatggcgaaatttttgatcatagatggtaatagcttgatgtacagggcgtattttgccctgcctgatttgatgaacagcgaaggaatgcatacaaatgccatatacggtttttcaatgatgcttcttaaattgctggaggaggagaaaccagactacatagcaatagctttcgataaaaaggcttctacatttaggcacaaggagtacagtgcttataaaggaacccgccagtcgatgccagaagagctgatagaacaggtggatattttaaaagatgtgataaatgcatttaacataaagaccatcgagatagagggatttgaagcagatgatatcattggtacagtatcaaaaattgcttccgaaagtgggatggatgtgcttatcgtcacaggcgacagagatgcgcttcagcttgtgtcggcaaatgtaaaagtaaaaatatgtaaaaaaggcataacgcagatggatgagtacgatgaaaaggcggtctttgaaaagtatgaagtgacgccgcttcaattcatagacttgaaagggcttatgggagacaaatcagacaacattccaggagtgcccaatataggggagaagacggccataaagcttgttaaagaatttggatcaattgaaaatttactgatgaatacagataagttaaaagggaaaataaaagaaaatgtagaaaacaatgcagaattagctgttttaagcaaacggcttgctacgattgagagaaatgttcctattgatattgatttgaatgaatacgcggttaaaaattacgatgtcaataagcttacagagctatttgaaaaattggaattttcaagcctcatctcagatttaaaagatgatagtcgtgatacaaaggatattaaagaatggcctgtaagagattttacatacgttaaaaatgttttaggaaagtttgatgttttgtcattgtatccattcatatatgatggaaagataaaagcagtatcatttgcttgcggtgacggatcgttttttgtagagattgatgattatgacaattttaaattgcttaataatgataagcttacgttgataggacacgatctgaaagattttttagtaaacatttcatactgcggtattgaacttaattgtaagattttagatacggccataatgacttatcttttaaatccgtctgagtcgaattacgacataagtcgcgtattgaaaaaatacttgaaagaggatttgcaaaacatagatgatatagtaggcaagggcaggaataaaaagagctacgatgacattgacaaaaagcttttagtcgattatatgtgttcagccgcatcaaacttatctaagttaaaagataagctcatgtcatttataaaagagatggagatggaagatcttttaaaaaatgtggaaattccgcttattgaagtgctaaaatctatggaggtgtacggctttacattagataaagatgtacttagaagtatttctaaagaaatagatgaaaagacagataagattgtaaaagatatttacgatgctgctggatacgaatttaatattaactctacaaagcagttatcagaatttttgtttgataaactgaatttgccagcaataaaaaagactaaaacagggtattcgactgacatggaagtccttgcagaacttataccgtacaatgacatagtaggagaaataatagaatatagacagcttatgaagcttaaatctacgtacatagatggcttcattcccatcatggatgaaaataatagggtccactctacgtttaaacaaacagttgctgctacagggagaattagctcaacagagcctaatctgcagaacatacctgtaagagaagaatttggcaggaggataagaaaggcatttgtatcaagttatgaagatgggcttataatatctgctgattattctcagattgagctaagggttcttgcacatctttcagaggatgaaaaacttattgagtcatttttgaacaacgaagatatacatttaaggacggcatcggaggtttttaaggtttcgaaagaagaagtgacaagtgaaatgagaaggcgggcgaaagctgtcaactttggtattgtatatggtataagcgattacggcttatctaaagacttaaagatttcgcgaaaagaagcgaaagaatacatagacaattattttgacaggtacaagggcgtcaaaaattacatcgactcaattgtcaaatttgcaaaggaaaatgggtatgttacgactatcttaaataggagaagatacatacaagaaatcaattcaaaaaattttaaccaaagatcttttggcgagagaatggcaatgaatacacctattcaaggtagcgctgcggatataataaagatgtcgatggttaaagtatacaatgaattaaaggaaagaggattgaaatcaagacttattcttcaggtgcacgatgagcttataattgacacacatcctgatgaagttgaaatagtcaaggagcttctaaaatcaataatggaaaatatcataaagttgaaagttcctttagttgtagatatagggcaagggaaaaactggtatgatgcaaaataaaaggatcc

SEQ ID NO: 633 - DNA, 2678 bp, Artificial Sequence
  Description of Artificial Sequence: Synthetic Clostridium thermosulfurogenes DNA Polymerase P787G
atgaaatacctgctgccgaccgctgctgctggtctgctgctcctcgctgcccagccggcgatggccatggcgaaatttttgatcatagatggtaatagcttgatgtacagggcgtattttgccctgcctgatttgatgaacagcgaaggaatgcatacaaatgccatatacggtttttcaatgatgcttcttaaattgctggaggaggagaaaccagactacatagcaatagctttcgataaaaaggcttctacatttaggcacaaggagtacagtgcttataaaggaacccgccagtcgatgccagaagagctgatagaacaggtggatattttaaaagatgtgataaatgcatttaacataaagaccatcgagatagagggatttgaagcagatgatatcattggtacagtatcaaaaattgcttccgaaagtgggatggatgtgcttatcgtcacaggcgacagagatgcgcttcagcttgtgtcggcaaatgtaaaagtaaaaatatgtaaaaaaggcataacgcagatggatgagtacgatgaaaaggcggtctttgaaaagtatgaagtgacgccgcttcaattcatagacttgaaagggcttatgggagacaaatcagacaacattccaggagtgcccaatataggggagaagacggccataaagcttgttaaagaatttggatcaattgaaaatttactgatgaatacagataagttaaaagggaaaataaaagaaaatgtagaaaacaatgcagaattagctgttttaagcaaacggcttgctacgattgagagaaatgttcctattgatattgatttgaatgaatacgcggttaaaaattacgatgtcaataagcttacagagctatttgaaaaattggaattttcaagcctcatctcagatttaaaagatgatagtcgtgatacaaaggatattaaagaatggcctgtaagagattttacatacgttaaaaatgttttaggaaagtttgatgttttgtcattgtatccattcatatatgatggaaagataaaagcagtatcatttgcttgcggtgacggatcgttttttgtagagattgatgattatgacaattttaaattgcttaataatgataagcttacgttgataggacacgatctgaaagattttttagtaaacatttcatactgcggtattgaacttaattgtaagattttagatacggccataatgacttatcttttaaatccgtctgagtcgaattacgacataagtcgcgtattgaaaaaatacttgaaagaggatttgcaaaacatagatgatatagtaggcaagggcaggaataaaaagagctacgatgacattgacaaaaagcttttagtcgattatatgtgttcagccgcatcaaacttatctaagttaaaagataagctcatgtcatttataaaagagatggagatggaagatcttttaaaaaatgtggaaattccgcttattgaagtgctaaaatctatggaggtgtacggctttacattagataaagatgtacttagaagtatttctaaagaaatagatgaaaagacagataagattgtaaaagatatttacgatgctgctggatacgaatttaatattaactctacaaagcagttatcagaatttttgtttgataaactgaatttgccagcaataaaaaagactaaaacagggtattcgactgacatggaagtccttgcagaacttataccgtacaatgacatagtaggagaaataatagaatatagacagcttatgaagcttaaatctacgtacatagatggcttcattcccatcatggatgaaaataatagggtccactctacgtttaaacaaacagttgctgctacagggagaattagctcaacagagcctaatctgcagaacatacctgtaagagaagaatttggcaggaggataagaaaggcatttgtatcaagttatgaagatgggcttataatatctgctgattattctcagattgagctaagggttcttgcacatctttcagaggatgaaaaacttattgagtcatttttgaacaacgaagatatacatttaaggacggcatcggaggtttttaaggtttcgaaagaagaagtgacaagtgaaatgagaaggcgggcgaaagctgtcaactttggtattgtatatggtataagcgattacggcttatctaaagacttaaagatttcgcgaaaagaagcgaaagaatacatagacaattattttgacaggtacaagggcgtcaaaaattacatcgactcaattgtcaaatttgcaaaggaaaatgggtatgttacgactatcttaaataggagaagatacataggtgaaatcaattcaaaaaattttaaccaaagatcttttggcgagagaatggcaatgaatacacctattcaaggtagcgctgcggatataataaagatgtcgatggttaaagtatacaatgaattaaaggaaagaggattgaaatcaagacttattcttcaggtgcacgatgagcttataattgacacacatcctgatgaagttgaaatagtcaaggagcttctaaaatcaataatggaaaatatcataaagttgaaagttcctttagttgtagatatagggcaagggaaaaactggtatgatgcaaaataaaaggatcc

SEQ ID NO: 634 - DNA, 2678 bp, Artificial Sequence
  Description of Artificial Sequence: Synthetic Clostridium thermosulfurogenes DNA Polymerase P787H
atgaaatacctgctgccgaccgctgctgctggtctgctgctcctcgctgcccagccggcgatggccatggcgaaatttttgatcatagatggtaatagcttgatgtacagggcgtattttgccctgcctgatttgatgaacagcgaaggaatgcatacaaatgccatatacggtttttcaatgatgcttcttaaattgctggaggaggagaaaccagactacatagcaatagctttcgataaaaaggcttctacatttaggcacaaggagtacagtgcttataaaggaacccgccagtcgatgccagaagagctgatagaacaggtggatattttaaaagatgtgataaatgcatttaacataaagaccatcgagatagagggatttgaagcagatgatatcattggtacagtatcaaaaattgcttccgaaagtgggatggatgtgcttatcgtcacaggcgacagagatgcgcttcagcttgtgtcggcaaatgtaaaagtaaaaatatgtaaaaaaggcataacgcagatggatgagtacgatgaaaaggcggtctttgaaaagtatgaagtgacgccgcttcaattcatagacttgaaagggcttatgggagacaaatcagacaacattccaggagtgcccaatataggggagaagacggccataaagcttgttaaagaatttggatcaattgaaaatttactgatgaatacagataagttaaaagggaaaataaaagaaaatgtagaaaacaatgcagaattagctgttttaagcaaacggcttgctacgattgagagaaatgttcctattgatattgatttgaatgaatacgcggttaaaaattacgatgtcaataagcttacagagctatttgaaaaattggaattttcaagcctcatctcagatttaaaagatgatagtcgtgatacaaaggatattaaagaatggcctgtaagagattttacatacgttaaaaatgttttaggaaagtttgatgttttgtcattgtatccattcatatatgatggaaagataaaagcagtatcatttgcttgcggtgacggatcgttttttgtagagattgatgattatgacaattttaaattgcttaataatgataagcttacgttgataggacacgatctgaaagattttttagtaaacatttcatactgcggtattgaacttaattgtaagattttagatacggccataatgacttatcttttaaatccgtctgagtcgaattacgacataagtcgcgtattgaaaaaatacttgaaagaggatttgcaaaacatagatgatatagtaggcaagggcaggaataaaaagagctacgatgacattgacaaaaagcttttagtcgattatatgtgttcagccgcatcaaacttatctaagttaaaagataagctcatgtcatttataaaagagatggagatggaagatcttttaaaaaatgtggaaattccgcttattgaagtgctaaaatctatggaggtgtacggctttacattagataaagatgtacttagaagtatttctaaagaaatagatgaaaagacagataagattgtaaaagatatttacgatgctgctggatacgaatttaatattaactctacaaagcagttatcagaatttttgtttgataaactgaatttgccagcaataaaaaagactaaaacagggtattcgactgacatggaagtccttgcagaacttataccgtacaatgacatagtaggagaaataatagaatatagacagcttatgaagcttaaatctacgtacatagatggcttcattcccatcatggatgaaaataatagggtccactctacgtttaaacaaacagttgctgctacagggagaattagctcaacagagcctaatctgcagaacatacctgtaagagaagaatttggcaggaggataagaaaggcatttgtatcaagttatgaagatgggcttataatatctgctgattattctcagattgagctaagggttcttgcacatctttcagaggatgaaaaacttattgagtcatttttgaacaacgaagatatacatttaaggacggcatcggaggtttttaaggtttcgaaagaagaagtgacaagtgaaatgagaaggcgggcgaaagctgtcaactttggtattgtatatggtataagcgattacggcttatctaaagacttaaagatttcgcgaaaagaagcgaaagaatacatagacaattattttgacaggtacaagggcgtcaaaaattacatcgactcaattgtcaaatttgcaaaggaaaatgggtatgttacgactatcttaaataggagaagatacatacatgaaatcaattcaaaaaattttaaccaaagatcttttggcgagagaatggcaatgaatacacctattcaaggtagcgctgcggatataataaagatgtcgatggttaaagtatacaatgaattaaaggaaagaggattgaaatcaagacttattcttcaggtgcacgatgagcttataattgacacacatcctgatgaagttgaaatagtcaaggagcttctaaaatcaataatggaaaatatcataaagttgaaagttcctttagttgtagatatagggcaagggaaaaactggtatgatgcaaaataaaaggatcc

SEQ ID NO: 635 - DNA, 2678 bp, Artificial Sequence
  Description of Artificial Sequence: Synthetic Clostridium thermosulfurogenes DNA Polymerase P787I
atgaaatacctgctgccgaccgctgctgctggtctgctgctcctcgctgcccagccggcgatggccatggcgaaatttttgatcatagatggtaatagcttgatgtacagggcgtattttgccctgcctgatttgatgaacagcgaaggaatgcatacaaatgccatatacggtttttcaatgatgcttcttaaattgctggaggaggagaaaccagactacatagcaatagctttcgataaaaaggcttctacatttaggcacaaggagtacagtgcttataaaggaacccgccagtcgatgccagaagagctgatagaacaggtggatattttaaaagatgtgataaatgcatttaacataaagaccatcgagatagagggatttgaagcagatgatatcattggtacagtatcaaaaattgcttccgaaagtgggatggatgtgcttatcgtcacaggcgacagagatgcgcttcagcttgtgtcggcaaatgtaaaagtaaaaatatgtaaaaaaggcataacgcagatggatgagtacgatgaaaaggcggtctttgaaaagtatgaagtgacgccgcttcaattcatagacttgaaagggcttatgggagacaaatcagacaacattccaggagtgcccaatataggggagaagacggccataaagcttgttaaagaatttggatcaattgaaaatttactgatgaatacagataagttaaaagggaaaataaaagaaaatgtagaaaacaatgcagaattagctgttttaagcaaacggcttgctacgattgagagaaatgttcctattgatattgatttgaatgaatacgcggttaaaaattacgatgtcaataagcttacagagctatttgaaaaattggaattttcaagcctcatctcagatttaaaagatgatagtcgtgatacaaaggatattaaagaatggcctgtaagagattttacatacgttaaaaatgttttaggaaagtttgatgttttgtcattgtatccattcatatatgatggaaagataaaagcagtatcatttgcttgcggtgacggatcgttttttgtagagattgatgattatgacaattttaaattgcttaataatgataagcttacgttgataggacacgatctgaaagattttttagtaaacatttcatactgcggtattgaacttaattgtaagattttagatacggccataatgacttatcttttaaatccgtctgagtcgaattacgacataagtcgcgtattgaaaaaatacttgaaagaggatttgcaaaacatagatgatatagtaggcaagggcaggaataaaaagagctacgatgacattgacaaaaagcttttagtcgattatatgtgttcagccgcatcaaacttatctaagttaaaagataagctcatgtcatttataaaagagatggagatggaagatcttttaaaaaatgtggaaattccgcttattgaagtgctaaaatctatggaggtgtacggctttacattagataaagatgtacttagaagtatttctaaagaaatagatgaaaagacagataagattgtaaaagatatttacgatgctgctggatacgaatttaatattaactctacaaagcagttatcagaatttttgtttgataaactgaatttgccagcaataaaaaagactaaaacagggtattcgactgacatggaagtccttgcagaacttataccgtacaatgacatagtaggagaaataatagaatatagacagcttatgaagcttaaatctacgtacatagatggcttcattcccatcatggatgaaaataatagggtccactctacgtttaaacaaacagttgctgctacagggagaattagctcaacagagcctaatctgcagaacatacctgtaagagaagaatttggcaggaggataagaaaggcatttgtatcaagttatgaagatgggcttataatatctgctgattattctcagattgagctaagggttcttgcacatctttcagaggatgaaaaacttattgagtcatttttgaacaacgaagatatacatttaaggacggcatcggaggtttttaaggtttcgaaagaagaagtgacaagtgaaatgagaaggcgggcgaaagctgtcaactttggtattgtatatggtataagcgattacggcttatctaaagacttaaagatttcgcgaaaagaagcgaaagaatacatagacaattattttgacaggtacaagggcgtcaaaaattacatcgactcaattgtcaaatttgcaaaggaaaatgggtatgttacgactatcttaaataggagaagatacataattgaaatcaattcaaaaaattttaaccaaagatcttttggcgagagaatggcaatgaatacacctattcaaggtagcgctgcggatataataaagatgtcgatggttaaagtatacaatgaattaaaggaaagaggattgaaatcaagacttattcttcaggtgcacgatgagcttataattgacacacatcctgatgaagttgaaatagtcaaggagcttctaaaatcaataatggaaaatatcataaagttgaaagttcctttagttgtagatatagggcaagggaaaaactggtatgatgcaaaataaaaggatcc

SEQ ID NO: 636 - DNA, 2678 bp, Artificial Sequence
  Description of Artificial Sequence: Synthetic Clostridium thermosulfurogenes DNA Polymerase P787L
atgaaatacctgctgccgaccgctgctgctggtctgctgctcctcgctgcccagccggcgatggccatggcgaaatttttgatcatagatggtaatagcttgatgtacagggcgtattttgccctgcctgatttgatgaacagcgaaggaatgcatacaaatgccatatacggtttttcaatgatgcttcttaaattgctggaggaggagaaaccagactacatagcaatagctttcgataaaaaggcttctacatttaggcacaaggagtacagtgcttataaaggaacccgccagtcgatgccagaagagctgatagaacaggtggatattttaaaagatgtgataaatgcatttaacataaagaccatcgagatagagggatttgaagcagatgatatcattggtacagtatcaaaaattgcttccgaaagtgggatggatgtgcttatcgtcacaggcgacagagatgcgcttcagcttgtgtcggcaaatgtaaaagtaaaaatatgtaaaaaaggcataacgcagatggatgagtacgatgaaaaggcggtctttgaaaagtatgaagtgacgccgcttcaattcatagacttgaaagggcttatgggagacaaatcagacaacattccaggagtgcccaatataggggagaagacggccataaagcttgttaaagaatttggatcaattgaaaatttactgatgaatacagataagttaaaagggaaaataaaagaaaatgtagaaaacaatgcagaattagctgttttaagcaaacggcttgctacgattgagagaaatgttcctattgatattgatttgaatgaatacgcggttaaaaattacgatgtcaataagcttacagagctatttgaaaaattggaattttcaagcctcatctcagatttaaaagatgatagtcgtgatacaaaggatattaaagaatggcctgtaagagattttacatacgttaaaaatgttttaggaaagtttgatgttttgtcattgtatccattcatatatgatggaaagataaaagcagtatcatttgcttgcggtgacggatcgttttttgtagagattgatgattatgacaattttaaattgcttaataatgataagcttacgttgataggacacgatctgaaagattttttagtaaacatttcatactgcggtattgaacttaattgtaagattttagatacggccataatgacttatcttttaaatccgtctgagtcgaattacgacataagtcgcgtattgaaaaaatacttgaaagaggatttgcaaaacatagatgatatagtaggcaagggcaggaataaaaagagctacgatgacattgacaaaaagcttttagtcgattatatgtgttcagccgcatcaaacttatctaagttaaaagataagctcatgtcatttataaaagagatggagatggaagatcttttaaaaaatgtggaaattccgcttattgaagtgctaaaatctatggaggtgtacggctttacattagataaagatgtacttagaagtatttctaaagaaatagatgaaaagacagataagattgtaaaagatatttacgatgctgctggatacgaatttaatattaactctacaaagcagttatcagaatttttgtttgataaactgaatttgccagcaataaaaaagactaaaacagggtattcgactgacatggaagtccttgcagaacttataccgtacaatgacatagtaggagaaataatagaatatagacagcttatgaagcttaaatctacgtacatagatggcttcattcccatcatggatgaaaataatagggtccactctacgtttaaacaaacagttgctgctacagggagaattagctcaacagagcctaatctgcagaacatacctgtaagagaagaatttggcaggaggataagaaaggcatttgtatcaagttatgaagatgggcttataatatctgctgattattctcagattgagctaagggttcttgcacatctttcagaggatgaaaaacttattgagtcatttttgaacaacgaagatatacatttaaggacggcatcggaggtttttaaggtttcgaaagaagaagtgacaagtgaaatgagaaggcgggcgaaagctgtcaactttggtattgtatatggtataagcgattacggcttatctaaagacttaaagatttcgcgaaaagaagcgaaagaatacatagacaattattttgacaggtacaagggcgtcaaaaattacatcgactcaattgtcaaatttgcaaaggaaaatgggtatgttacgactatcttaaataggagaagatacatacttgaaatcaattcaaaaaattttaaccaaagatcttttggcgagagaatggcaatgaatacacctattcaaggtagcgctgcggatataataaagatgtcgatggttaaagtatacaatgaattaaaggaaagaggattgaaatcaagacttattcttcaggtgcacgatgagcttataattgacacacatcctgatgaagttgaaatagtcaaggagcttctaaaatcaataatggaaaatatcataaagttgaaagttcctttagttgtagatatagggcaagggaaaaactggtatgatgcaaaataaaaggatcc

SEQ ID NO: 637 - DNA, 2678 bp, Artificial Sequence
  Description of Artificial Sequence: Synthetic Clostridium thermosulfurogenes DNA Polymerase P787K
atgaaatacctgctgccgaccgctgctgctggtctgctgctcctcgctgcccagccggcgatggccatggcgaaatttttgatcatagatggtaatagcttgatgtacagggcgtattttgccctgcctgatttgatgaacagcgaaggaatgcatacaaatgccatatacggtttttcaatgatgcttcttaaattgctggaggaggagaaaccagactacatagcaatagctttcgataaaaaggcttctacatttaggcacaaggagtacagtgcttataaaggaacccgccagtcgatgccagaagagctgatagaacaggtggatattttaaaagatgtgataaatgcatttaacataaagaccatcgagatagagggatttgaagcagatgatatcattggtacagtatcaaaaattgcttccgaaagtgggatggatgtgcttatcgtcacaggcgacagagatgcgcttcagcttgtgtcggcaaatgtaaaagtaaaaatatgtaaaaaaggcataacgcagatggatgagtacgatgaaaaggcggtctttgaaaagtatgaagtgacgccgcttcaattcatagacttgaaagggcttatgggagacaaatcagacaacattccaggagtgcccaatataggggagaagacggccataaagcttgttaaagaatttggatcaattgaaaatttactgatgaatacagataagttaaaagggaaaataaaagaaaatgtagaaaacaatgcagaattagctgttttaagcaaacggcttgctacgattgagagaaatgttcctattgatattgatttgaatgaatacgcggttaaaaattacgatgtcaataagcttacagagctatttgaaaaattggaattttcaagcctcatctcagatttaaaagatgatagtcgtgatacaaaggatattaaagaatggcctgtaagagattttacatacgttaaaaatgttttaggaaagtttgatgttttgtcattgtatccattcatatatgatggaaagataaaagcagtatcatttgcttgcggtgacggatcgttttttgtagagattgatgattatgacaattttaaattgcttaataatgataagcttacgttgataggacacgatctgaaagattttttagtaaacatttcatactgcggtattgaacttaattgtaagattttagatacggccataatgacttatcttttaaatccgtctgagtcgaattacgacataagtcgcgtattgaaaaaatacttgaaagaggatttgcaaaacatagatgatatagtaggcaagggcaggaataaaaagagctacgatgacattgacaaaaagcttttagtcgattatatgtgttcagccgcatcaaacttatctaagttaaaagataagctcatgtcatttataaaagagatggagatggaagatcttttaaaaaatgtggaaattccgcttattgaagtgctaaaatctatggaggtgtacggctttacattagataaagatgtacttagaagtatttctaaagaaatagatgaaaagacagataagattgtaaaagatatttacgatgctgctggatacgaatttaatattaactctacaaagcagttatcagaatttttgtttgataaactgaatttgccagcaataaaaaagactaaaacagggtattcgactgacatggaagtccttgcagaacttataccgtacaatgacatagtaggagaaataatagaatatagacagcttatgaagcttaaatctacgtacatagatggcttcattcccatcatggatgaaaataatagggtccactctacgtttaaacaaacagttgctgctacagggagaattagctcaacagagcctaatctgcagaacatacctgtaagagaagaatttggcaggaggataagaaaggcatttgtatcaagttatgaagatgggcttataatatctgctgattattctcagattgagctaagggttcttgcacatctttcagaggatgaaaaacttattgagtcatttttgaacaacgaagatatacatttaaggacggcatcggaggtttttaaggtttcgaaagaagaagtgacaagtgaaatgagaaggcgggcgaaagctgtcaactttggtattgtatatggtataagcgattacggcttatctaaagacttaaagatttcgcgaaaagaagcgaaagaatacatagacaattattttgacaggtacaagggcgtcaaaaattacatcgactcaattgtcaaatttgcaaaggaaaatgggtatgttacgactatcttaaataggagaagatacataaaagaaatcaattcaaaaaattttaaccaaagatcttttggcgagagaatggcaatgaatacacctattcaaggtagcgctgcggatataataaagatgtcgatggttaaagtatacaatgaattaaaggaaagaggattgaaatcaagacttattcttcaggtgcacgatgagcttataattgacacacatcctgatgaagttgaaatagtcaaggagcttctaaaatcaataatggaaaatatcataaagttgaaagttcctttagttgtagatatagggcaagggaaaaactggtatgatgcaaaataaaaggatcc

SEQ ID NO: 638 - DNA, 2678 bp, Artificial Sequence
  Description of Artificial Sequence: Synthetic Clostridium thermosulfurogenes DNA Polymerase P787M
atgaaatacctgctgccgaccgctgctgctggtctgctgctcctcgctgcccagccggcgatggccatggcgaaatttttgatcatagatggtaatagcttgatgtacagggcgtattttgccctgcctgatttgatgaacagcgaaggaatgcatacaaatgccatatacggtttttcaatgatgcttcttaaattgctggaggaggagaaaccagactacatagcaatagctttcgataaaaaggcttctacatttaggcacaaggagtacagtgcttataaaggaacccgccagtcgatgccagaagagctgatagaacaggtggatattttaaaagatgtgataaatgcatttaacataaagaccatcgagatagagggatttgaagcagatgatatcattggtacagtatcaaaaattgcttccgaaagtgggatggatgtgcttatcgtcacaggcgacagagatgcgcttcagcttgtgtcggcaaatgtaaaagtaaaaatatgtaaaaaaggcataacgcagatggatgagtacgatgaaaaggcggtctttgaaaagtatgaagtgacgccgcttcaattcatagacttgaaagggcttatgggagacaaatcagacaacattccaggagtgcccaatataggggagaagacggccataaagcttgttaaagaatttggatcaattgaaaatttactgatgaatacagataagttaaaagggaaaataaaagaaaatgtagaaaacaatgcagaattagctgttttaagcaaacggcttgctacgattgagagaaatgttcctattgatattgatttgaatgaatacgcggttaaaaattacgatgtcaataagcttacagagctatttgaaaaattggaattttcaagcctcatctcagatttaaaagatgatagtcgtgatacaaaggatattaaagaatggcctgtaagagattttacatacgttaaaaatgttttaggaaagtttgatgttttgtcattgtatccattcatatatgatggaaagataaaagcagtatcatttgcttgcggtgacggatcgttttttgtagagattgatgattatgacaattttaaattgcttaataatgataagcttacgttgataggacacgatctgaaagattttttagtaaacatttcatactgcggtattgaacttaattgtaagattttagatacggccataatgacttatcttttaaatccgtctgagtcgaattacgacataagtcgcgtattgaaaaaatacttgaaagaggatttgcaaaacatagatgatatagtaggcaagggcaggaataaaaagagctacgatgacattgacaaaaagcttttagtcgattatatgtgttcagccgcatcaaacttatctaagttaaaagataagctcatgtcatttataaaagagatggagatggaagatcttttaaaaaatgtggaaattccgcttattgaagtgctaaaatctatggaggtgtacggctttacattagataaagatgtacttagaagtatttctaaagaaatagatgaaaagacagataagattgtaaaagatatttacgatgctgctggatacgaatttaatattaactctacaaagcagttatcagaatttttgtttgataaactgaatttgccagcaataaaaaagactaaaacagggtattcgactgacatggaagtccttgcagaacttataccgtacaatgacatagtaggagaaataatagaatatagacagcttatgaagcttaaatctacgtacatagatggcttcattcccatcatggatgaaaataatagggtccactctacgtttaaacaaacagttgctgctacagggagaattagctcaacagagcctaatctgcagaacatacctgtaagagaagaatttggcaggaggataagaaaggcatttgtatcaagttatgaagatgggcttataatatctgctgattattctcagattgagctaagggttcttgcacatctttcagaggatgaaaaacttattgagtcatttttgaacaacgaagatatacatttaaggacggcatcggaggtttttaaggtttcgaaagaagaagtgacaagtgaaatgagaaggcgggcgaaagctgtcaactttggtattgtatatggtataagcgattacggcttatctaaagacttaaagatttcgcgaaaagaagcgaaagaatacatagacaattattttgacaggtacaagggcgtcaaaaattacatcgactcaattgtcaaatttgcaaaggaaaatgggtatgttacgactatcttaaataggagaagatacataatggaaatcaattcaaaaaattttaaccaaagatcttttggcgagagaatggcaatgaatacacctattcaaggtagcgctgcggatataataaagatgtcgatggttaaagtatacaatgaattaaaggaaagaggattgaaatcaagacttattcttcaggtgcacgatgagcttataattgacacacatcctgatgaagttgaaatagtcaaggagcttctaaaatcaataatggaaaatatcataaagttgaaagttcctttagttgtagatatagggcaagggaaaaactggtatgatgcaaaataaaaggatcc

SEQ ID NO: 639 - DNA, 2678 bp, Artificial Sequence
  Description of Artificial Sequence: Synthetic Clostridium thermosulfurogenes DNA Polymerase P787F
atgaaatacctgctgccgaccgctgctgctggtctgctgctcctcgctgcccagccggcgatggccatggcgaaatttttgatcatagatggtaatagcttgatgtacagggcgtattttgccctgcctgatttgatgaacagcgaaggaatgcatacaaatgccatatacggtttttcaatgatgcttcttaaattgctggaggaggagaaaccagactacatagcaatagctttcgataaaaaggcttctacatttaggcacaaggagtacagtgcttataaaggaacccgccagtcgatgccagaagagctgatagaacaggtggatattttaaaagatgtgataaatgcatttaacataaagaccatcgagatagagggatttgaagcagatgatatcattggtacagtatcaaaaattgcttccgaaagtgggatggatgtgcttatcgtcacaggcgacagagatgcgcttcagcttgtgtcggcaaatgtaaaagtaaaaatatgtaaaaaaggcataacgcagatggatgagtacgatgaaaaggcggtctttgaaaagtatgaagtgacgccgcttcaattcatagacttgaaagggcttatgggagacaaatcagacaacattccaggagtgcccaatataggggagaagacggccataaagcttgttaaagaatttggatcaattgaaaatttactgatgaatacagataagttaaaagggaaaataaaagaaaatgtagaaaacaatgcagaattagctgttttaagcaaacggcttgctacgattgagagaaatgttcctattgatattgatttgaatgaatacgcggttaaaaattacgatgtcaataagcttacagagctatttgaaaaattggaattttcaagcctcatctcagatttaaaagatgatagtcgtgatacaaaggatattaaagaatggcctgtaagagattttacatacgttaaaaatgttttaggaaagtttgatgttttgtcattgtatccattcatatatgatggaaagataaaagcagtatcatttgcttgcggtgacggatcgttttttgtagagattgatgattatgacaattttaaattgcttaataatgataagcttacgttgataggacacgatctgaaagattttttagtaaacatttcatactgcggtattgaacttaattgtaagattttagatacggccataatgacttatcttttaaatccgtctgagtcgaattacgacataagtcgcgtattgaaaaaatacttgaaagaggatttgcaaaacatagatgatatagtaggcaagggcaggaataaaaagagctacgatgacattgacaaaaagcttttagtcgattatatgtgttcagccgcatcaaacttatctaagttaaaagataagctcatgtcatttataaaagagatggagatggaagatcttttaaaaaatgtggaaattccgcttattgaagtgctaaaatctatggaggtgtacggctttacattagataaagatgtacttagaagtatttctaaagaaatagatgaaaagacagataagattgtaaaagatatttacgatgctgctggatacgaatttaatattaactctacaaagcagttatcagaatttttgtttgataaactgaatttgccagcaataaaaaagactaaaacagggtattcgactgacatggaagtccttgcagaacttataccgtacaatgacatagtaggagaaataatagaatatagacagcttatgaagcttaaatctacgtacatagatggcttcattcccatcatggatgaaaataatagggtccactctacgtttaaacaaacagttgctgctacagggagaattagctcaacagagcctaatctgcagaacatacctgtaagagaagaatttggcaggaggataagaaaggcatttgtatcaagttatgaagatgggcttataatatctgctgattattctcagattgagctaagggttcttgcacatctttcagaggatgaaaaacttattgagtcatttttgaacaacgaagatatacatttaaggacggcatcggaggtttttaaggtttcgaaagaagaagtgacaagtgaaatgagaaggcgggcgaaagctgtcaactttggtattgtatatggtataagcgattacggcttatctaaagacttaaagatttcgcgaaaagaagcgaaagaatacatagacaattattttgacaggtacaagggcgtcaaaaattacatcgactcaattgtcaaatttgcaaaggaaaatgggtatgttacgactatcttaaataggagaagatacatatttgaaatcaattcaaaaaattttaaccaaagatcttttggcgagagaatggcaatgaatacacctattcaaggtagcgctgcggatataataaagatgtcgatggttaaagtatacaatgaattaaaggaaagaggattgaaatcaagacttattcttcaggtgcacgatgagcttataattgacacacatcctgatgaagttgaaatagtcaaggagcttctaaaatcaataatggaaaatatcataaagttgaaagttcctttagttgtagatatagggcaagggaaaaactggtatgatgcaaaataaaaggatcc

SEQ ID NO: 640 - DNA, 2678 bp, Artificial Sequence
  Description of Artificial Sequence: Synthetic Clostridium thermosulfurogenes DNA Polymerase P787S
atgaaatacctgctgccgaccgctgctgctggtctgctgctcctcgctgcccagccggcgatggccatggcgaaatttttgatcatagatggtaatagcttgatgtacagggcgtattttgccctgcctgatttgatgaacagcgaaggaatgcatacaaatgccatatacggtttttcaatgatgcttcttaaattgctggaggaggagaaaccagactacatagcaatagctttcgataaaaaggcttctacatttaggcacaaggagtacagtgcttataaaggaacccgccagtcgatgccagaagagctgatagaacaggtggatattttaaaagatgtgataaatgcatttaacataaagaccatcgagatagagggatttgaagcagatgatatcattggtacagtatcaaaaattgcttccgaaagtgggatggatgtgcttatcgtcacaggcgacagagatgcgcttcagcttgtgtcggcaaatgtaaaagtaaaaatatgtaaaaaaggcataacgcagatggatgagtacgatgaaaaggcggtctttgaaaagtatgaagtgacgccgcttcaattcatagacttgaaagggcttatgggagacaaatcagacaacattccaggagtgcccaatataggggagaagacggccataaagcttgttaaagaatttggatcaattgaaaatttactgatgaatacagataagttaaaagggaaaataaaagaaaatgtagaaaacaatgcagaattagctgttttaagcaaacggcttgctacgattgagagaaatgttcctattgatattgatttgaatgaatacgcggttaaaaattacgatgtcaataagcttacagagctatttgaaaaattggaattttcaagcctcatctcagatttaaaagatgatagtcgtgatacaaaggatattaaagaatggcctgtaagagattttacatacgttaaaaatgttttaggaaagtttgatgttttgtcattgtatccattcatatatgatggaaagataaaagcagtatcatttgcttgcggtgacggatcgttttttgtagagattgatgattatgacaattttaaattgcttaataatgataagcttacgttgataggacacgatctgaaagattttttagtaaacatttcatactgcggtattgaacttaattgtaagattttagatacggccataatgacttatcttttaaatccgtctgagtcgaattacgacataagtcgcgtattgaaaaaatacttgaaagaggatttgcaaaacatagatgatatagtaggcaagggcaggaataaaaagagctacgatgacattgacaaaaagcttttagtcgattatatgtgttcagccgcatcaaacttatctaagttaaaagataagctcatgtcatttataaaagagatggagatggaagatcttttaaaaaatgtggaaattccgcttattgaagtgctaaaatctatggaggtgtacggctttacattagataaagatgtacttagaagtatttctaaagaaatagatgaaaagacagataagattgtaaaagatatttacgatgctgctggatacgaatttaatattaactctacaaagcagttatcagaatttttgtttgataaactgaatttgccagcaataaaaaagactaaaacagggtattcgactgacatggaagtccttgcagaacttataccgtacaatgacatagtaggagaaataatagaatatagacagcttatgaagcttaaatctacgtacatagatggcttcattcccatcatggatgaaaataatagggtccactctacgtttaaacaaacagttgctgctacagggagaattagctcaacagagcctaatctgcagaacatacctgtaagagaagaatttggcaggaggataagaaaggcatttgtatcaagttatgaagatgggcttataatatctgctgattattctcagattgagctaagggttcttgcacatctttcagaggatgaaaaacttattgagtcatttttgaacaacgaagatatacatttaaggacggcatcggaggtttttaaggtttcgaaagaagaagtgacaagtgaaatgagaaggcgggcgaaagctgtcaactttggtattgtatatggtataagcgattacggcttatctaaagacttaaagatttcgcgaaaagaagcgaaagaatacatagacaattattttgacaggtacaagggcgtcaaaaattacatcgactcaattgtcaaatttgcaaaggaaaatgggtatgttacgactatcttaaataggagaagatacatatctgaaatcaattcaaaaaattttaaccaaagatcttttggcgagagaatggcaatgaatacacctattcaaggtagcgctgcggatataataaagatgtcgatggttaaagtatacaatgaattaaaggaaagaggattgaaatcaagacttattcttcaggtgcacgatgagcttataattgacacacatcctgatgaagttgaaatagtcaaggagcttctaaaatcaataatggaaaatatcataaagttgaaagttcctttagttgtagatatagggcaagggaaaaactggtatgatgcaaaataaaaggatcc

SEQ ID NO: 641 - DNA, 2678 bp, Artificial Sequence
  Description of Artificial Sequence: Synthetic Clostridium thermosulfurogenes DNA Polymerase P787T
atgaaatacctgctgccgaccgctgctgctggtctgctgctcctcgctgcccagccggcgatggccatggcgaaatttttgatcatagatggtaatagcttgatgtacagggcgtattttgccctgcctgatttgatgaacagcgaaggaatgcatacaaatgccatatacggtttttcaatgatgcttcttaaattgctggaggaggagaaaccagactacatagcaatagctttcgataaaaaggcttctacatttaggcacaaggagtacagtgcttataaaggaacccgccagtcgatgccagaagagctgatagaacaggtggatattttaaaagatgtgataaatgcatttaacataaagaccatcgagatagagggatttgaagcagatgatatcattggtacagtatcaaaaattgcttccgaaagtgggatggatgtgcttatcgtcacaggcgacagagatgcgcttcagcttgtgtcggcaaatgtaaaagtaaaaatatgtaaaaaaggcataacgcagatggatgagtacgatgaaaaggcggtctttgaaaagtatgaagtgacgccgcttcaattcatagacttgaaagggcttatgggagacaaatcagacaacattccaggagtgcccaatataggggagaagacggccataaagcttgttaaagaatttggatcaattgaaaatttactgatgaatacagataagttaaaagggaaaataaaagaaaatgtagaaaacaatgcagaattagctgttttaagcaaacggcttgctacgattgagagaaatgttcctattgatattgatttgaatgaatacgcggttaaaaattacgatgtcaataagcttacagagctatttgaaaaattggaattttcaagcctcatctcagatttaaaagatgatagtcgtgatacaaaggatattaaagaatggcctgtaagagattttacatacgttaaaaatgttttaggaaagtttgatgttttgtcattgtatccattcatatatgatggaaagataaaagcagtatcatttgcttgcggtgacggatcgttttttgtagagattgatgattatgacaattttaaattgcttaataatgataagcttacgttgataggacacgatctgaaagattttttagtaaacatttcatactgcggtattgaacttaattgtaagattttagatacggccataatgacttatcttttaaatccgtctgagtcgaattacgacataagtcgcgtattgaaaaaatacttgaaagaggatttgcaaaacatagatgatatagtaggcaagggcaggaataaaaagagctacgatgacattgacaaaaagcttttagtcgattatatgtgttcagccgcatcaaacttatctaagttaaaagataagctcatgtcatttataaaagagatggagatggaagatcttttaaaaaatgtggaaattccgcttattgaagtgctaaaatctatggaggtgtacggctttacattagataaagatgtacttagaagtatttctaaagaaatagatgaaaagacagataagattgtaaaagatatttacgatgctgctggatacgaatttaatattaactctacaaagcagttatcagaatttttgtttgataaactgaatttgccagcaataaaaaagactaaaacagggtattcgactgacatggaagtccttgcagaacttataccgtacaatgacatagtaggagaaataatagaatatagacagcttatgaagcttaaatctacgtacatagatggcttcattcccatcatggatgaaaataatagggtccactctacgtttaaacaaacagttgctgctacagggagaattagctcaacagagcctaatctgcagaacatacctgtaagagaagaatttggcaggaggataagaaaggcatttgtatcaagttatgaagatgggcttataatatctgctgattattctcagattgagctaagggttcttgcacatctttcagaggatgaaaaacttattgagtcatttttgaacaacgaagatatacatttaaggacggcatcggaggtttttaaggtttcgaaagaagaagtgacaagtgaaatgagaaggcgggcgaaagctgtcaactttggtattgtatatggtataagcgattacggcttatctaaagacttaaagatttcgcgaaaagaagcgaaagaatacatagacaattattttgacaggtacaagggcgtcaaaaattacatcgactcaattgtcaaatttgcaaaggaaaatgggtatgttacgactatcttaaataggagaagatacataactgaaatcaattcaaaaaattttaaccaaagatcttttggcgagagaatggcaatgaatacacctattcaaggtagcgctgcggatataataaagatgtcgatggttaaagtatacaatgaattaaaggaaagaggattgaaatcaagacttattcttcaggtgcacgatgagcttataattgacacacatcctgatgaagttgaaatagtcaaggagcttctaaaatcaataatggaaaatatcataaagttgaaagttcctttagttgtagatatagggcaagggaaaaactggtatgatgcaaaataaaaggatcc

SEQ ID NO: 642 - DNA, 2678 bp, Artificial Sequence
  Description of Artificial Sequence: Synthetic Clostridium thermosulfurogenes DNA Polymerase P787W
atgaaatacctgctgccgaccgctgctgctggtctgctgctcctcgctgcccagccggcgatggccatggcgaaatttttgatcatagatggtaatagcttgatgtacagggcgtattttgccctgcctgatttgatgaacagcgaaggaatgcatacaaatgccatatacggtttttcaatgatgcttcttaaattgctggaggaggagaaaccagactacatagcaatagctttcgataaaaaggcttctacatttaggcacaaggagtacagtgcttataaaggaacccgccagtcgatgccagaagagctgatagaacaggtggatattttaaaagatgtgataaatgcatttaacataaagaccatcgagatagagggatttgaagcagatgatatcattggtacagtatcaaaaattgcttccgaaagtgggatggatgtgcttatcgtcacaggcgacagagatgcgcttcagcttgtgtcggcaaatgtaaaagtaaaaatatgtaaaaaaggcataacgcagatggatgagtacgatgaaaaggcggtctttgaaaagtatgaagtgacgccgcttcaattcatagacttgaaagggcttatgggagacaaatcagacaacattccaggagtgcccaatataggggagaagacggccataaagcttgttaaagaatttggatcaattgaaaatttactgatgaatacagataagttaaaagggaaaataaaagaaaatgtagaaaacaatgcagaattagctgttttaagcaaacggcttgctacgattgagagaaatgttcctattgatattgatttgaatgaatacgcggttaaaaattacgatgtcaataagcttacagagctatttgaaaaattggaattttcaagcctcatctcagatttaaaagatgatagtcgtgatacaaaggatattaaagaatggcctgtaagagattttacatacgttaaaaatgttttaggaaagtttgatgttttgtcattgtatccattcatatatgatggaaagataaaagcagtatcatttgcttgcggtgacggatcgttttttgtagagattgatgattatgacaattttaaattgcttaataatgataagcttacgttgataggacacgatctgaaagattttttagtaaacatttcatactgcggtattgaacttaattgtaagattttagatacggccataatgacttatcttttaaatccgtctgagtcgaattacgacataagtcgcgtattgaaaaaatacttgaaagaggatttgcaaaacatagatgatatagtaggcaagggcaggaataaaaagagctacgatgacattgacaaaaagcttttagtcgattatatgtgttcagccgcatcaaacttatctaagttaaaagataagctcatgtcatttataaaagagatggagatggaagatcttttaaaaaatgtggaaattccgcttattgaagtgctaaaatctatggaggtgtacggctttacattagataaagatgtacttagaagtatttctaaagaaatagatgaaaagacagataagattgtaaaagatatttacgatgctgctggatacgaatttaatattaactctacaaagcagttatcagaatttttgtttgataaactgaatttgccagcaataaaaaagactaaaacagggtattcgactgacatggaagtccttgcagaacttataccgtacaatgacatagtaggagaaataatagaatatagacagcttatgaagcttaaatctacgtacatagatggcttcattcccatcatggatgaaaataatagggtccactctacgtttaaacaaacagttgctgctacagggagaattagctcaacagagcctaatctgcagaacatacctgtaagagaagaatttggcaggaggataagaaaggcatttgtatcaagttatgaagatgggcttataatatctgctgattattctcagattgagctaagggttcttgcacatctttcagaggatgaaaaacttattgagtcatttttgaacaacgaagatatacatttaaggacggcatcggaggtttttaaggtttcgaaagaagaagtgacaagtgaaatgagaaggcgggcgaaagctgtcaactttggtattgtatatggtataagcgattacggcttatctaaagacttaaagatttcgcgaaaagaagcgaaagaatacatagacaattattttgacaggtacaagggcgtcaaaaattacatcgactcaattgtcaaatttgcaaaggaaaatgggtatgttacgactatcttaaataggagaagatacatatgggaaatcaattcaaaaaattttaaccaaagatcttttggcgagagaatggcaatgaatacacctattcaaggtagcgctgcggatataataaagatgtcgatggttaaagtatacaatgaattaaaggaaagaggattgaaatcaagacttattcttcaggtgcacgatgagcttataattgacacacatcctgatgaagttgaaatagtcaaggagcttctaaaatcaataatggaaaatatcataaagttgaaagttcctttagttgtagatatagggcaagggaaaaactggtatgatgcaaaataaaaggatcc

SEQ ID NO: 643 - DNA, 2678 bp, Artificial Sequence
  Description of Artificial Sequence: Synthetic Clostridium thermosulfurogenes DNA Polymerase P787Y
atgaaatacctgctgccgaccgctgctgctggtctgctgctcctcgctgcccagccggcgatggccatggcgaaatttttgatcatagatggtaatagcttgatgtacagggcgtattttgccctgcctgatttgatgaacagcgaaggaatgcatacaaatgccatatacggtttttcaatgatgcttcttaaattgctggaggaggagaaaccagactacatagcaatagctttcgataaaaaggcttctacatttaggcacaaggagtacagtgcttataaaggaacccgccagtcgatgccagaagagctgatagaacaggtggatattttaaaagatgtgataaatgcatttaacataaagaccatcgagatagagggatttgaagcagatgatatcattggtacagtatcaaaaattgcttccgaaagtgggatggatgtgcttatcgtcacaggcgacagagatgcgcttcagcttgtgtcggcaaatgtaaaagtaaaaatatgtaaaaaaggcataacgcagatggatgagtacgatgaaaaggcggtctttgaaaagtatgaagtgacgccgcttcaattcatagacttgaaagggcttatgggagacaaatcagacaacattccaggagtgcccaatataggggagaagacggccataaagcttgttaaagaatttggatcaattgaaaatttactgatgaatacagataagttaaaagggaaaataaaagaaaatgtagaaaacaatgcagaattagctgttttaagcaaacggcttgctacgattgagagaaatgttcctattgatattgatttgaatgaatacgcggttaaaaattacgatgtcaataagcttacagagctatttgaaaaattggaattttcaagcctcatctcagatttaaaagatgatagtcgtgatacaaaggatattaaagaatggcctgtaagagattttacatacgttaaaaatgttttaggaaagtttgatgttttgtcattgtatccattcatatatgatggaaagataaaagcagtatcatttgcttgcggtgacggatcgttttttgtagagattgatgattatgacaattttaaattgcttaataatgataagcttacgttgataggacacgatctgaaagattttttagtaaacatttcatactgcggtattgaacttaattgtaagattttagatacggccataatgacttatcttttaaatccgtctgagtcgaattacgacataagtcgcgtattgaaaaaatacttgaaagaggatttgcaaaacatagatgatatagtaggcaagggcaggaataaaaagagctacgatgacattgacaaaaagcttttagtcgattatatgtgttcagccgcatcaaacttatctaagttaaaagataagctcatgtcatttataaaagagatggagatggaagatcttttaaaaaatgtggaaattccgcttattgaagtgctaaaatctatggaggtgtacggctttacattagataaagatgtacttagaagtatttctaaagaaatagatgaaaagacagataagattgtaaaagatatttacgatgctgctggatacgaatttaatattaactctacaaagcagttatcagaatttttgtttgataaactgaatttgccagcaataaaaaagactaaaacagggtattcgactgacatggaagtccttgcagaacttataccgtacaatgacatagtaggagaaataatagaatatagacagcttatgaagcttaaatctacgtacatagatggcttcattcccatcatggatgaaaataatagggtccactctacgtttaaacaaacagttgctgctacagggagaattagctcaacagagcctaatctgcagaacatacctgtaagagaagaatttggcaggaggataagaaaggcatttgtatcaagttatgaagatgggcttataatatctgctgattattctcagattgagctaagggttcttgcacatctttcagaggatgaaaaacttattgagtcatttttgaacaacgaagatatacatttaaggacggcatcggaggtttttaaggtttcgaaagaagaagtgacaagtgaaatgagaaggcgggcgaaagctgtcaactttggtattgtatatggtataagcgattacggcttatctaaagacttaaagatttcgcgaaaagaagcgaaagaatacatagacaattattttgacaggtacaagggcgtcaaaaattacatcgactcaattgtcaaatttgcaaaggaaaatgggtatgttacgactatcttaaataggagaagatacatatatgaaatcaattcaaaaaattttaaccaaagatcttttggcgagagaatggcaatgaatacacctattcaaggtagcgctgcggatataataaagatgtcgatggttaaagtatacaatgaattaaaggaaagaggattgaaatcaagacttattcttcaggtgcacgatgagcttataattgacacacatcctgatgaagttgaaatagtcaaggagcttctaaaatcaataatggaaaatatcataaagttgaaagttcctttagttgtagatatagggcaagggaaaaactggtatgatgcaaaataaaaggatcc

SEQ ID NO: 644 - DNA, 2678 bp, Artificial Sequence
  Description of Artificial Sequence: Synthetic Clostridium thermosulfurogenes DNA Polymerase P787V
atgaaatacctgctgccgaccgctgctgctggtctgctgctcctcgctgcccagccggcgatggccatggcgaaatttttgatcatagatggtaatagcttgatgtacagggcgtattttgccctgcctgatttgatgaacagcgaaggaatgcatacaaatgccatatacggtttttcaatgatgcttcttaaattgctggaggaggagaaaccagactacatagcaatagctttcgataaaaaggcttctacatttaggcacaaggagtacagtgcttataaaggaacccgccagtcgatgccagaagagctgatagaacaggtggatattttaaaagatgtgataaatgcatttaacataaagaccatcgagatagagggatttgaagcagatgatatcattggtacagtatcaaaaattgcttccgaaagtgggatggatgtgcttatcgtcacaggcgacagagatgcgcttcagcttgtgtcggcaaatgtaaaagtaaaaatatgtaaaaaaggcataacgcagatggatgagtacgatgaaaaggcggtctttgaaaagtatgaagtgacgccgcttcaattcatagacttgaaagggcttatgggagacaaatcagacaacattccaggagtgcccaatataggggagaagacggccataaagcttgttaaagaatttggatcaattgaaaatttactgatgaatacagataagttaaaagggaaaataaaagaaaatgtagaaaacaatgcagaattagctgttttaagcaaacggcttgctacgattgagagaaatgttcctattgatattgatttgaatgaatacgcggttaaaaattacgatgtcaataagcttacagagctatttgaaaaattggaattttcaagcctcatctcagatttaaaagatgatagtcgtgatacaaaggatattaaagaatggcctgtaagagattttacatacgttaaaaatgttttaggaaagtttgatgttttgtcattgtatccattcatatatgatggaaagataaaagcagtatcatttgcttgcggtgacggatcgttttttgtagagattgatgattatgacaattttaaattgcttaataatgataagcttacgttgataggacacgatctgaaagattttttagtaaacatttcatactgcggtattgaacttaattgtaagattttagatacggccataatgacttatcttttaaatccgtctgagtcgaattacgacataagtcgcgtattgaaaaaatacttgaaagaggatttgcaaaacatagatgatatagtaggcaagggcaggaataaaaagagctacgatgacattgacaaaaagcttttagtcgattatatgtgttcagccgcatcaaacttatctaagttaaaagataagctcatgtcatttataaaagagatggagatggaagatcttttaaaaaatgtggaaattccgcttattgaagtgctaaaatctatggaggtgtacggctttacattagataaagatgtacttagaagtatttctaaagaaatagatgaaaagacagataagattgtaaaagatatttacgatgctgctggatacgaatttaatattaactctacaaagcagttatcagaatttttgtttgataaactgaatttgccagcaataaaaaagactaaaacagggtattcgactgacatggaagtccttgcagaacttataccgtacaatgacatagtaggagaaataatagaatatagacagcttatgaagcttaaatctacgtacatagatggcttcattcccatcatggatgaaaataatagggtccactctacgtttaaacaaacagttgctgctacagggagaattagctcaacagagcctaatctgcagaacatacctgtaagagaagaatttggcaggaggataagaaaggcatttgtatcaagttatgaagatgggcttataatatctgctgattattctcagattgagctaagggttcttgcacatctttcagaggatgaaaaacttattgagtcatttttgaacaacgaagatatacatttaaggacggcatcggaggtttttaaggtttcgaaagaagaagtgacaagtgaaatgagaaggcgggcgaaagctgtcaactttggtattgtatatggtataagcgattacggcttatctaaagacttaaagatttcgcgaaaagaagcgaaagaatacatagacaattattttgacaggtacaagggcgtcaaaaattacatcgactcaattgtcaaatttgcaaaggaaaatgggtatgttacgactatcttaaataggagaagatacatagttgaaatcaattcaaaaaattttaaccaaagatcttttggcgagagaatggcaatgaatacacctattcaaggtagcgctgcggatataataaagatgtcgatggttaaagtatacaatgaattaaaggaaagaggattgaaatcaagacttattcttcaggtgcacgatgagcttataattgacacacatcctgatgaagttgaaatagtcaaggagcttctaaaatcaataatggaaaatatcataaagttgaaagttcctttagttgtagatatagggcaagggaaaaactggtatgatgcaaaataaaaggatcc

SEQ ID NO: 645 - DNA, 2678 bp, Artificial Sequence
  Description of Artificial Sequence: Synthetic Clostridium thermosulfurogenes DNA Polymerase E788A
atgaaatacctgctgccgaccgctgctgctggtctgctgctcctcgctgcccagccggcgatggccatggcgaaatttttgatcatagatggtaatagcttgatgtacagggcgtattttgccctgcctgatttgatgaacagcgaaggaatgcatacaaatgccatatacggtttttcaatgatgcttcttaaattgctggaggaggagaaaccagactacatagcaatagctttcgataaaaaggcttctacatttaggcacaaggagtacagtgcttataaaggaacccgccagtcgatgccagaagagctgatagaacaggtggatattttaaaagatgtgataaatgcatttaacataaagaccatcgagatagagggatttgaagcagatgatatcattggtacagtatcaaaaattgcttccgaaagtgggatggatgtgcttatcgtcacaggcgacagagatgcgcttcagcttgtgtcggcaaatgtaaaagtaaaaatatgtaaaaaaggcataacgcagatggatgagtacgatgaaaaggcggtctttgaaaagtatgaagtgacgccgcttcaattcatagacttgaaagggcttatgggagacaaatcagacaacattccaggagtgcccaatataggggagaagacggccataaagcttgttaaagaatttggatcaattgaaaatttactgatgaatacagataagttaaaagggaaaataaaagaaaatgtagaaaacaatgcagaattagctgttttaagcaaacggcttgctacgattgagagaaatgttcctattgatattgatttgaatgaatacgcggttaaaaattacgatgtcaataagcttacagagctatttgaaaaattggaattttcaagcctcatctcagatttaaaagatgatagtcgtgatacaaaggatattaaagaatggcctgtaagagattttacatacgttaaaaatgttttaggaaagtttgatgttttgtcattgtatccattcatatatgatggaaagataaaagcagtatcatttgcttgcggtgacggatcgttttttgtagagattgatgattatgacaattttaaattgcttaataatgataagcttacgttgataggacacgatctgaaagattttttagtaaacatttcatactgcggtattgaacttaattgtaagattttagatacggccataatgacttatcttttaaatccgtctgagtcgaattacgacataagtcgcgtattgaaaaaatacttgaaagaggatttgcaaaacatagatgatatagtaggcaagggcaggaataaaaagagctacgatgacattgacaaaaagcttttagtcgattatatgtgttcagccgcatcaaacttatctaagttaaaagataagctcatgtcatttataaaagagatggagatggaagatcttttaaaaaatgtggaaattccgcttattgaagtgctaaaatctatggaggtgtacggctttacattagataaagatgtacttagaagtatttctaaagaaatagatgaaaagacagataagattgtaaaagatatttacgatgctgctggatacgaatttaatattaactctacaaagcagttatcagaatttttgtttgataaactgaatttgccagcaataaaaaagactaaaacagggtattcgactgacatggaagtccttgcagaacttataccgtacaatgacatagtaggagaaataatagaatatagacagcttatgaagcttaaatctacgtacatagatggcttcattcccatcatggatgaaaataatagggtccactctacgtttaaacaaacagttgctgctacagggagaattagctcaacagagcctaatctgcagaacatacctgtaagagaagaatttggcaggaggataagaaaggcatttgtatcaagttatgaagatgggcttataatatctgctgattattctcagattgagctaagggttcttgcacatctttcagaggatgaaaaacttattgagtcatttttgaacaacgaagatatacatttaaggacggcatcggaggtttttaaggtttcgaaagaagaagtgacaagtgaaatgagaaggcgggcgaaagctgtcaactttggtattgtatatggtataagcgattacggcttatctaaagacttaaagatttcgcgaaaagaagcgaaagaatacatagacaattattttgacaggtacaagggcgtcaaaaattacatcgactcaattgtcaaatttgcaaaggaaaatgggtatgttacgactatcttaaataggagaagatacataccggctatcaattcaaaaaattttaaccaaagatcttttggcgagagaatggcaatgaatacacctattcaaggtagcgctgcggatataataaagatgtcgatggttaaagtatacaatgaattaaaggaaagaggattgaaatcaagacttattcttcaggtgcacgatgagcttataattgacacacatcctgatgaagttgaaatagtcaaggagcttctaaaatcaataatggaaaatatcataaagttgaaagttcctttagttgtagatatagggcaagggaaaaactggtatgatgcaaaataaaaggatcc

SEQ ID NO: 646 - DNA, 2678 bp, Artificial Sequence
  Description of Artificial Sequence: Synthetic Clostridium thermosulfurogenes DNA Polymerase E788R
atgaaatacctgctgccgaccgctgctgctggtctgctgctcctcgctgcccagccggcgatggccatggcgaaatttttgatcatagatggtaatagcttgatgtacagggcgtattttgccctgcctgatttgatgaacagcgaaggaatgcatacaaatgccatatacggtttttcaatgatgcttcttaaattgctggaggaggagaaaccagactacatagcaatagctttcgataaaaaggcttctacatttaggcacaaggagtacagtgcttataaaggaacccgccagtcgatgccagaagagctgatagaacaggtggatattttaaaagatgtgataaatgcatttaacataaagaccatcgagatagagggatttgaagcagatgatatcattggtacagtatcaaaaattgcttccgaaagtgggatggatgtgcttatcgtcacaggcgacagagatgcgcttcagcttgtgtcggcaaatgtaaaagtaaaaatatgtaaaaaaggcataacgcagatggatgagtacgatgaaaaggcggtctttgaaaagtatgaagtgacgccgcttcaattcatagacttgaaagggcttatgggagacaaatcagacaacattccaggagtgcccaatataggggagaagacggccataaagcttgttaaagaatttggatcaattgaaaatttactgatgaatacagataagttaaaagggaaaataaaagaaaatgtagaaaacaatgcagaattagctgttttaagcaaacggcttgctacgattgagagaaatgttcctattgatattgatttgaatgaatacgcggttaaaaattacgatgtcaataagcttacagagctatttgaaaaattggaattttcaagcctcatctcagatttaaaagatgatagtcgtgatacaaaggatattaaagaatggcctgtaagagattttacatacgttaaaaatgttttaggaaagtttgatgttttgtcattgtatccattcatatatgatggaaagataaaagcagtatcatttgcttgcggtgacggatcgttttttgtagagattgatgattatgacaattttaaattgcttaataatgataagcttacgttgataggacacgatctgaaagattttttagtaaacatttcatactgcggtattgaacttaattgtaagattttagatacggccataatgacttatcttttaaatccgtctgagtcgaattacgacataagtcgcgtattgaaaaaatacttgaaagaggatttgcaaaacatagatgatatagtaggcaagggcaggaataaaaagagctacgatgacattgacaaaaagcttttagtcgattatatgtgttcagccgcatcaaacttatctaagttaaaagataagctcatgtcatttataaaagagatggagatggaagatcttttaaaaaatgtggaaattccgcttattgaagtgctaaaatctatggaggtgtacggctttacattagataaagatgtacttagaagtatttctaaagaaatagatgaaaagacagataagattgtaaaagatatttacgatgctgctggatacgaatttaatattaactctacaaagcagttatcagaatttttgtttgataaactgaatttgccagcaataaaaaagactaaaacagggtattcgactgacatggaagtccttgcagaacttataccgtacaatgacatagtaggagaaataatagaatatagacagcttatgaagcttaaatctacgtacatagatggcttcattcccatcatggatgaaaataatagggtccactctacgtttaaacaaacagttgctgctacagggagaattagctcaacagagcctaatctgcagaacatacctgtaagagaagaatttggcaggaggataagaaaggcatttgtatcaagttatgaagatgggcttataatatctgctgattattctcagattgagctaagggttcttgcacatctttcagaggatgaaaaacttattgagtcatttttgaacaacgaagatatacatttaaggacggcatcggaggtttttaaggtttcgaaagaagaagtgacaagtgaaatgagaaggcgggcgaaagctgtcaactttggtattgtatatggtataagcgattacggcttatctaaagacttaaagatttcgcgaaaagaagcgaaagaatacatagacaattattttgacaggtacaagggcgtcaaaaattacatcgactcaattgtcaaatttgcaaaggaaaatgggtatgttacgactatcttaaataggagaagatacataccgcgtatcaattcaaaaaattttaaccaaagatcttttggcgagagaatggcaatgaatacacctattcaaggtagcgctgcggatataataaagatgtcgatggttaaagtatacaatgaattaaaggaaagaggattgaaatcaagacttattcttcaggtgcacgatgagcttataattgacacacatcctgatgaagttgaaatagtcaaggagcttctaaaatcaataatggaaaatatcataaagttgaaagttcctttagttgtagatatagggcaagggaaaaactggtatgatgcaaaataaaaggatcc

SEQ ID NO: 647 - DNA, 2678 bp, Artificial Sequence
  Description of Artificial Sequence: Synthetic Clostridium thermosulfurogenes DNA Polymerase E788N
atgaaatacctgctgccgaccgctgctgctggtctgctgctcctcgctgcccagccggcgatggccatggcgaaatttttgatcatagatggtaatagcttgatgtacagggcgtattttgccctgcctgatttgatgaacagcgaaggaatgcatacaaatgccatatacggtttttcaatgatgcttcttaaattgctggaggaggagaaaccagactacatagcaatagctttcgataaaaaggcttctacatttaggcacaaggagtacagtgcttataaaggaacccgccagtcgatgccagaagagctgatagaacaggtggatattttaaaagatgtgataaatgcatttaacataaagaccatcgagatagagggatttgaagcagatgatatcattggtacagtatcaaaaattgcttccgaaagtgggatggatgtgcttatcgtcacaggcgacagagatgcgcttcagcttgtgtcggcaaatgtaaaagtaaaaatatgtaaaaaaggcataacgcagatggatgagtacgatgaaaaggcggtctttgaaaagtatgaagtgacgccgcttcaattcatagacttgaaagggcttatgggagacaaatcagacaacattccaggagtgcccaatataggggagaagacggccataaagcttgttaaagaatttggatcaattgaaaatttactgatgaatacagataagttaaaagggaaaataaaagaaaatgtagaaaacaatgcagaattagctgttttaagcaaacggcttgctacgattgagagaaatgttcctattgatattgatttgaatgaatacgcggttaaaaattacgatgtcaataagcttacagagctatttgaaaaattggaattttcaagcctcatctcagatttaaaagatgatagtcgtgatacaaaggatattaaagaatggcctgtaagagattttacatacgttaaaaatgttttaggaaagtttgatgttttgtcattgtatccattcatatatgatggaaagataaaagcagtatcatttgcttgcggtgacggatcgttttttgtagagattgatgattatgacaattttaaattgcttaataatgataagcttacgttgataggacacgatctgaaagattttttagtaaacatttcatactgcggtattgaacttaattgtaagattttagatacggccataatgacttatcttttaaatccgtctgagtcgaattacgacataagtcgcgtattgaaaaaatacttgaaagaggatttgcaaaacatagatgatatagtaggcaagggcaggaataaaaagagctacgatgacattgacaaaaagcttttagtcgattatatgtgttcagccgcatcaaacttatctaagttaaaagataagctcatgtcatttataaaagagatggagatggaagatcttttaaaaaatgtggaaattccgcttattgaagtgctaaaatctatggaggtgtacggctttacattagataaagatgtacttagaagtatttctaaagaaatagatgaaaagacagataagattgtaaaagatatttacgatgctgctggatacgaatttaatattaactctacaaagcagttatcagaatttttgtttgataaactgaatttgccagcaataaaaaagactaaaacagggtattcgactgacatggaagtccttgcagaacttataccgtacaatgacatagtaggagaaataatagaatatagacagcttatgaagcttaaatctacgtacatagatggcttcattcccatcatggatgaaaataatagggtccactctacgtttaaacaaacagttgctgctacagggagaattagctcaacagagcctaatctgcagaacatacctgtaagagaagaatttggcaggaggataagaaaggcatttgtatcaagttatgaagatgggcttataatatctgctgattattctcagattgagctaagggttcttgcacatctttcagaggatgaaaaacttattgagtcatttttgaacaacgaagatatacatttaaggacggcatcggaggtttttaaggtttcgaaagaagaagtgacaagtgaaatgagaaggcgggcgaaagctgtcaactttggtattgtatatggtataagcgattacggcttatctaaagacttaaagatttcgcgaaaagaagcgaaagaatacatagacaattattttgacaggtacaagggcgtcaaaaattacatcgactcaattgtcaaatttgcaaaggaaaatgggtatgttacgactatcttaaataggagaagatacataccgaatatcaattcaaaaaattttaaccaaagatcttttggcgagagaatggcaatgaatacacctattcaaggtagcgctgcggatataataaagatgtcgatggttaaagtatacaatgaattaaaggaaagaggattgaaatcaagacttattcttcaggtgcacgatgagcttataattgacacacatcctgatgaagttgaaatagtcaaggagcttctaaaatcaataatggaaaatatcataaagttgaaagttcctttagttgtagatatagggcaagggaaaaactggtatgatgcaaaataaaaggatcc

SEQ ID NO: 648 - DNA, 2678 bp, Artificial Sequence
  Description of Artificial Sequence: Synthetic Clostridium thermosulfurogenes DNA Polymerase E788D
atgaaatacctgctgccgaccgctgctgctggtctgctgctcctcgctgcccagccggcgatggccatggcgaaatttttgatcatagatggtaatagcttgatgtacagggcgtattttgccctgcctgatttgatgaacagcgaaggaatgcatacaaatgccatatacggtttttcaatgatgcttcttaaattgctggaggaggagaaaccagactacatagcaatagctttcgataaaaaggcttctacatttaggcacaaggagtacagtgcttataaaggaacccgccagtcgatgccagaagagctgatagaacaggtggatattttaaaagatgtgataaatgcatttaacataaagaccatcgagatagagggatttgaagcagatgatatcattggtacagtatcaaaaattgcttccgaaagtgggatggatgtgcttatcgtcacaggcgacagagatgcgcttcagcttgtgtcggcaaatgtaaaagtaaaaatatgtaaaaaaggcataacgcagatggatgagtacgatgaaaaggcggtctttgaaaagtatgaagtgacgccgcttcaattcatagacttgaaagggcttatgggagacaaatcagacaacattccaggagtgcccaatataggggagaagacggccataaagcttgttaaagaatttggatcaattgaaaatttactgatgaatacagataagttaaaagggaaaataaaagaaaatgtagaaaacaatgcagaattagctgttttaagcaaacggcttgctacgattgagagaaatgttcctattgatattgatttgaatgaatacgcggttaaaaattacgatgtcaataagcttacagagctatttgaaaaattggaattttcaagcctcatctcagatttaaaagatgatagtcgtgatacaaaggatattaaagaatggcctgtaagagattttacatacgttaaaaatgttttaggaaagtttgatgttttgtcattgtatccattcatatatgatggaaagataaaagcagtatcatttgcttgcggtgacggatcgttttttgtagagattgatgattatgacaattttaaattgcttaataatgataagcttacgttgataggacacgatctgaaagattttttagtaaacatttcatactgcggtattgaacttaattgtaagattttagatacggccataatgacttatcttttaaatccgtctgagtcgaattacgacataagtcgcgtattgaaaaaatacttgaaagaggatttgcaaaacatagatgatatagtaggcaagggcaggaataaaaagagctacgatgacattgacaaaaagcttttagtcgattatatgtgttcagccgcatcaaacttatctaagttaaaagataagctcatgtcatttataaaagagatggagatggaagatcttttaaaaaatgtggaaattccgcttattgaagtgctaaaatctatggaggtgtacggctttacattagataaagatgtacttagaagtatttctaaagaaatagatgaaaagacagataagattgtaaaagatatttacgatgctgctggatacgaatttaatattaactctacaaagcagttatcagaatttttgtttgataaactgaatttgccagcaataaaaaagactaaaacagggtattcgactgacatggaagtccttgcagaacttataccgtacaatgacatagtaggagaaataatagaatatagacagcttatgaagcttaaatctacgtacatagatggcttcattcccatcatggatgaaaataatagggtccactctacgtttaaacaaacagttgctgctacagggagaattagctcaacagagcctaatctgcagaacatacctgtaagagaagaatttggcaggaggataagaaaggcatttgtatcaagttatgaagatgggcttataatatctgctgattattctcagattgagctaagggttcttgcacatctttcagaggatgaaaaacttattgagtcatttttgaacaacgaagatatacatttaaggacggcatcggaggtttttaaggtttcgaaagaagaagtgacaagtgaaatgagaaggcgggcgaaagctgtcaactttggtattgtatatggtataagcgattacggcttatctaaagacttaaagatttcgcgaaaagaagcgaaagaatacatagacaattattttgacaggtacaagggcgtcaaaaattacatcgactcaattgtcaaatttgcaaaggaaaatgggtatgttacgactatcttaaataggagaagatacataccggatatcaattcaaaaaattttaaccaaagatcttttggcgagagaatggcaatgaatacacctattcaaggtagcgctgcggatataataaagatgtcgatggttaaagtatacaatgaattaaaggaaagaggattgaaatcaagacttattcttcaggtgcacgatgagcttataattgacacacatcctgatgaagttgaaatagtcaaggagcttctaaaatcaataatggaaaatatcataaagttgaaagttcctttagttgtagatatagggcaagggaaaaactggtatgatgcaaaataaaaggatcc

SEQ ID NO: 649 - DNA, 2678 bp, Artificial Sequence
  Description of Artificial Sequence: Synthetic Clostridium thermosulfurogenes DNA Polymerase E788C
atgaaatacctgctgccgaccgctgctgctggtctgctgctcctcgctgcccagccggcgatggccatggcgaaatttttgatcatagatggtaatagcttgatgtacagggcgtattttgccctgcctgatttgatgaacagcgaaggaatgcatacaaatgccatatacggtttttcaatgatgcttcttaaattgctggaggaggagaaaccagactacatagcaatagctttcgataaaaaggcttctacatttaggcacaaggagtacagtgcttataaaggaacccgccagtcgatgccagaagagctgatagaacaggtggatattttaaaagatgtgataaatgcatttaacataaagaccatcgagatagagggatttgaagcagatgatatcattggtacagtatcaaaaattgcttccgaaagtgggatggatgtgcttatcgtcacaggcgacagagatgcgcttcagcttgtgtcggcaaatgtaaaagtaaaaatatgtaaaaaaggcataacgcagatggatgagtacgatgaaaaggcggtctttgaaaagtatgaagtgacgccgcttcaattcatagacttgaaagggcttatgggagacaaatcagacaacattccaggagtgcccaatataggggagaagacggccataaagcttgttaaagaatttggatcaattgaaaatttactgatgaatacagataagttaaaagggaaaataaaagaaaatgtagaaaacaatgcagaattagctgttttaagcaaacggcttgctacgattgagagaaatgttcctattgatattgatttgaatgaatacgcggttaaaaattacgatgtcaataagcttacagagctatttgaaaaattggaattttcaagcctcatctcagatttaaaagatgatagtcgtgatacaaaggatattaaagaatggcctgtaagagattttacatacgttaaaaatgttttaggaaagtttgatgttttgtcattgtatccattcatatatgatggaaagataaaagcagtatcatttgcttgcggtgacggatcgttttttgtagagattgatgattatgacaattttaaattgcttaataatgataagcttacgttgataggacacgatctgaaagattttttagtaaacatttcatactgcggtattgaacttaattgtaagattttagatacggccataatgacttatcttttaaatccgtctgagtcgaattacgacataagtcgcgtattgaaaaaatacttgaaagaggatttgcaaaacatagatgatatagtaggcaagggcaggaataaaaagagctacgatgacattgacaaaaagcttttagtcgattatatgtgttcagccgcatcaaacttatctaagttaaaagataagctcatgtcatttataaaagagatggagatggaagatcttttaaaaaatgtggaaattccgcttattgaagtgctaaaatctatggaggtgtacggctttacattagataaagatgtacttagaagtatttctaaagaaatagatgaaaagacagataagattgtaaaagatatttacgatgctgctggatacgaatttaatattaactctacaaagcagttatcagaatttttgtttgataaactgaatttgccagcaataaaaaagactaaaacagggtattcgactgacatggaagtccttgcagaacttataccgtacaatgacatagtaggagaaataatagaatatagacagcttatgaagcttaaatctacgtacatagatggcttcattcccatcatggatgaaaataatagggtccactctacgtttaaacaaacagttgctgctacagggagaattagctcaacagagcctaatctgcagaacatacctgtaagagaagaatttggcaggaggataagaaaggcatttgtatcaagttatgaagatgggcttataatatctgctgattattctcagattgagctaagggttcttgcacatctttcagaggatgaaaaacttattgagtcatttttgaacaacgaagatatacatttaaggacggcatcggaggtttttaaggtttcgaaagaagaagtgacaagtgaaatgagaaggcgggcgaaagctgtcaactttggtattgtatatggtataagcgattacggcttatctaaagacttaaagatttcgcgaaaagaagcgaaagaatacatagacaattattttgacaggtacaagggcgtcaaaaattacatcgactcaattgtcaaatttgcaaaggaaaatgggtatgttacgactatcttaaataggagaagatacataccgtgtatcaattcaaaaaattttaaccaaagatcttttggcgagagaatggcaatgaatacacctattcaaggtagcgctgcggatataataaagatgtcgatggttaaagtatacaatgaattaaaggaaagaggattgaaatcaagacttattcttcaggtgcacgatgagcttataattgacacacatcctgatgaagttgaaatagtcaaggagcttctaaaatcaataatggaaaatatcataaagttgaaagttcctttagttgtagatatagggcaagggaaaaactggtatgatgcaaaataaaaggatcc

SEQ ID NO: 650 - DNA, 2678 bp, Artificial Sequence
  Description of Artificial Sequence: Synthetic Clostridium thermosulfurogenes DNA Polymerase E788Q
atgaaatacctgctgccgaccgctgctgctggtctgctgctcctcgctgcccagccggcgatggccatggcgaaatttttgatcatagatggtaatagcttgatgtacagggcgtattttgccctgcctgatttgatgaacagcgaaggaatgcatacaaatgccatatacggtttttcaatgatgcttcttaaattgctggaggaggagaaaccagactacatagcaatagctttcgataaaaaggcttctacatttaggcacaaggagtacagtgcttataaaggaacccgccagtcgatgccagaagagctgatagaacaggtggatattttaaaagatgtgataaatgcatttaacataaagaccatcgagatagagggatttgaagcagatgatatcattggtacagtatcaaaaattgcttccgaaagtgggatggatgtgcttatcgtcacaggcgacagagatgcgcttcagcttgtgtcggcaaatgtaaaagtaaaaatatgtaaaaaaggcataacgcagatggatgagtacgatgaaaaggcggtctttgaaaagtatgaagtgacgccgcttcaattcatagacttgaaagggcttatgggagacaaatcagacaacattccaggagtgcccaatataggggagaagacggccataaagcttgttaaagaatttggatcaattgaaaatttactgatgaatacagataagttaaaagggaaaataaaagaaaatgtagaaaacaatgcagaattagctgttttaagcaaacggcttgctacgattgagagaaatgttcctattgatattgatttgaatgaatacgcggttaaaaattacgatgtcaataagcttacagagctatttgaaaaattggaattttcaagcctcatctcagatttaaaagatgatagtcgtgatacaaaggatattaaagaatggcctgtaagagattttacatacgttaaaaatgttttaggaaagtttgatgttttgtcattgtatccattcatatatgatggaaagataaaagcagtatcatttgcttgcggtgacggatcgttttttgtagagattgatgattatgacaattttaaattgcttaataatgataagcttacgttgataggacacgatctgaaagattttttagtaaacatttcatactgcggtattgaacttaattgtaagattttagatacggccataatgacttatcttttaaatccgtctgagtcgaattacgacataagtcgcgtattgaaaaaatacttgaaagaggatttgcaaaacatagatgatatagtaggcaagggcaggaataaaaagagctacgatgacattgacaaaaagcttttagtcgattatatgtgttcagccgcatcaaacttatctaagttaaaagataagctcatgtcatttataaaagagatggagatggaagatcttttaaaaaatgtggaaattccgcttattgaagtgctaaaatctatggaggtgtacggctttacattagataaagatgtacttagaagtatttctaaagaaatagatgaaaagacagataagattgtaaaagatatttacgatgctgctggatacgaatttaatattaactctacaaagcagttatcagaatttttgtttgataaactgaatttgccagcaataaaaaagactaaaacagggtattcgactgacatggaagtccttgcagaacttataccgtacaatgacatagtaggagaaataatagaatatagacagcttatgaagcttaaatctacgtacatagatggcttcattcccatcatggatgaaaataatagggtccactctacgtttaaacaaacagttgctgctacagggagaattagctcaacagagcctaatctgcagaacatacctgtaagagaagaatttggcaggaggataagaaaggcatttgtatcaagttatgaagatgggcttataatatctgctgattattctcagattgagctaagggttcttgcacatctttcagaggatgaaaaacttattgagtcatttttgaacaacgaagatatacatttaaggacggcatcggaggtttttaaggtttcgaaagaagaagtgacaagtgaaatgagaaggcgggcgaaagctgtcaactttggtattgtatatggtataagcgattacggcttatctaaagacttaaagatttcgcgaaaagaagcgaaagaatacatagacaattattttgacaggtacaagggcgtcaaaaattacatcgactcaattgtcaaatttgcaaaggaaaatgggtatgttacgactatcttaaataggagaagatacataccgcaaatcaattcaaaaaattttaaccaaagatcttttggcgagagaatggcaatgaatacacctattcaaggtagcgctgcggatataataaagatgtcgatggttaaagtatacaatgaattaaaggaaagaggattgaaatcaagacttattcttcaggtgcacgatgagcttataattgacacacatcctgatgaagttgaaatagtcaaggagcttctaaaatcaataatggaaaatatcataaagttgaaagttcctttagttgtagatatagggcaagggaaaaactggtatgatgcaaaataaaaggatcc

SEQ ID NO: 651 - DNA, 2678 bp, Artificial Sequence
  Description of Artificial Sequence: Synthetic Clostridium thermosulfurogenes DNA Polymerase E788G
atgaaatacctgctgccgaccgctgctgctggtctgctgctcctcgctgcccagccggcgatggccatggcgaaatttttgatcatagatggtaatagcttgatgtacagggcgtattttgccctgcctgatttgatgaacagcgaaggaatgcatacaaatgccatatacggtttttcaatgatgcttcttaaattgctggaggaggagaaaccagactacatagcaatagctttcgataaaaaggcttctacatttaggcacaaggagtacagtgcttataaaggaacccgccagtcgatgccagaagagctgatagaacaggtggatattttaaaagatgtgataaatgcatttaacataaagaccatcgagatagagggatttgaagcagatgatatcattggtacagtatcaaaaattgcttccgaaagtgggatggatgtgcttatcgtcacaggcgacagagatgcgcttcagcttgtgtcggcaaatgtaaaagtaaaaatatgtaaaaaaggcataacgcagatggatgagtacgatgaaaaggcggtctttgaaaagtatgaagtgacgccgcttcaattcatagacttgaaagggcttatgggagacaaatcagacaacattccaggagtgcccaatataggggagaagacggccataaagcttgttaaagaatttggatcaattgaaaatttactgatgaatacagataagttaaaagggaaaataaaagaaaatgtagaaaacaatgcagaattagctgttttaagcaaacggcttgctacgattgagagaaatgttcctattgatattgatttgaatgaatacgcggttaaaaattacgatgtcaataagcttacagagctatttgaaaaattggaattttcaagcctcatctcagatttaaaagatgatagtcgtgatacaaaggatattaaagaatggcctgtaagagattttacatacgttaaaaatgttttaggaaagtttgatgttttgtcattgtatccattcatatatgatggaaagataaaagcagtatcatttgcttgcggtgacggatcgttttttgtagagattgatgattatgacaattttaaattgcttaataatgataagcttacgttgataggacacgatctgaaagattttttagtaaacatttcatactgcggtattgaacttaattgtaagattttagatacggccataatgacttatcttttaaatccgtctgagtcgaattacgacataagtcgcgtattgaaaaaatacttgaaagaggatttgcaaaacatagatgatatagtaggcaagggcaggaataaaaagagctacgatgacattgacaaaaagcttttagtcgattatatgtgttcagccgcatcaaacttatctaagttaaaagataagctcatgtcatttataaaagagatggagatggaagatcttttaaaaaatgtggaaattccgcttattgaagtgctaaaatctatggaggtgtacggctttacattagataaagatgtacttagaagtatttctaaagaaatagatgaaaagacagataagattgtaaaagatatttacgatgctgctggatacgaatttaatattaactctacaaagcagttatcagaatttttgtttgataaactgaatttgccagcaataaaaaagactaaaacagggtattcgactgacatggaagtccttgcagaacttataccgtacaatgacatagtaggagaaataatagaatatagacagcttatgaagcttaaatctacgtacatagatggcttcattcccatcatggatgaaaataatagggtccactctacgtttaaacaaacagttgctgctacagggagaattagctcaacagagcctaatctgcagaacatacctgtaagagaagaatttggcaggaggataagaaaggcatttgtatcaagttatgaagatgggcttataatatctgctgattattctcagattgagctaagggttcttgcacatctttcagaggatgaaaaacttattgagtcatttttgaacaacgaagatatacatttaaggacggcatcggaggtttttaaggtttcgaaagaagaagtgacaagtgaaatgagaaggcgggcgaaagctgtcaactttggtattgtatatggtataagcgattacggcttatctaaagacttaaagatttcgcgaaaagaagcgaaagaatacatagacaattattttgacaggtacaagggcgtcaaaaattacatcgactcaattgtcaaatttgcaaaggaaaatgggtatgttacgactatcttaaataggagaagatacataccgggtatcaattcaaaaaattttaaccaaagatcttttggcgagagaatggcaatgaatacacctattcaaggtagcgctgcggatataataaagatgtcgatggttaaagtatacaatgaattaaaggaaagaggattgaaatcaagacttattcttcaggtgcacgatgagcttataattgacacacatcctgatgaagttgaaatagtcaaggagcttctaaaatcaataatggaaaatatcataaagttgaaagttcctttagttgtagatatagggcaagggaaaaactggtatgatgcaaaataaaaggatcc

SEQ ID NO: 652 - DNA, 2678 bp, Artificial Sequence
  Description of Artificial Sequence: Synthetic Clostridium thermosulfurogenes DNA Polymerase E788H
atgaaatacctgctgccgaccgctgctgctggtctgctgctcctcgctgcccagccggcgatggccatggcgaaatttttgatcatagatggtaatagcttgatgtacagggcgtattttgccctgcctgatttgatgaacagcgaaggaatgcatacaaatgccatatacggtttttcaatgatgcttcttaaattgctggaggaggagaaaccagactacatagcaatagctttcgataaaaaggcttctacatttaggcacaaggagtacagtgcttataaaggaacccgccagtcgatgccagaagagctgatagaacaggtggatattttaaaagatgtgataaatgcatttaacataaagaccatcgagatagagggatttgaagcagatgatatcattggtacagtatcaaaaattgcttccgaaagtgggatggatgtgcttatcgtcacaggcgacagagatgcgcttcagcttgtgtcggcaaatgtaaaagtaaaaatatgtaaaaaaggcataacgcagatggatgagtacgatgaaaaggcggtctttgaaaagtatgaagtgacgccgcttcaattcatagacttgaaagggcttatgggagacaaatcagacaacattccaggagtgcccaatataggggagaagacggccataaagcttgttaaagaatttggatcaattgaaaatttactgatgaatacagataagttaaaagggaaaataaaagaaaatgtagaaaacaatgcagaattagctgttttaagcaaacggcttgctacgattgagagaaatgttcctattgatattgatttgaatgaatacgcggttaaaaattacgatgtcaataagcttacagagctatttgaaaaattggaattttcaagcctcatctcagatttaaaagatgatagtcgtgatacaaaggatattaaagaatggcctgtaagagattttacatacgttaaaaatgttttaggaaagtttgatgttttgtcattgtatccattcatatatgatggaaagataaaagcagtatcatttgcttgcggtgacggatcgttttttgtagagattgatgattatgacaattttaaattgcttaataatgataagcttacgttgataggacacgatctgaaagattttttagtaaacatttcatactgcggtattgaacttaattgtaagattttagatacggccataatgacttatcttttaaatccgtctgagtcgaattacgacataagtcgcgtattgaaaaaatacttgaaagaggatttgcaaaacatagatgatatagtaggcaagggcaggaataaaaagagctacgatgacattgacaaaaagcttttagtcgattatatgtgttcagccgcatcaaacttatctaagttaaaagataagctcatgtcatttataaaagagatggagatggaagatcttttaaaaaatgtggaaattccgcttattgaagtgctaaaatctatggaggtgtacggctttacattagataaagatgtacttagaagtatttctaaagaaatagatgaaaagacagataagattgtaaaagatatttacgatgctgctggatacgaatttaatattaactctacaaagcagttatcagaatttttgtttgataaactgaatttgccagcaataaaaaagactaaaacagggtattcgactgacatggaagtccttgcagaacttataccgtacaatgacatagtaggagaaataatagaatatagacagcttatgaagcttaaatctacgtacatagatggcttcattcccatcatggatgaaaataatagggtccactctacgtttaaacaaacagttgctgctacagggagaattagctcaacagagcctaatctgcagaacatacctgtaagagaagaatttggcaggaggataagaaaggcatttgtatcaagttatgaagatgggcttataatatctgctgattattctcagattgagctaagggttcttgcacatctttcagaggatgaaaaacttattgagtcatttttgaacaacgaagatatacatttaaggacggcatcggaggtttttaaggtttcgaaagaagaagtgacaagtgaaatgagaaggcgggcgaaagctgtcaactttggtattgtatatggtataagcgattacggcttatctaaagacttaaagatttcgcgaaaagaagcgaaagaatacatagacaattattttgacaggtacaagggcgtcaaaaattacatcgactcaattgtcaaatttgcaaaggaaaatgggtatgttacgactatcttaaataggagaagatacataccgcatatcaattcaaaaaattttaaccaaagatcttttggcgagagaatggcaatgaatacacctattcaaggtagcgctgcggatataataaagatgtcgatggttaaagtatacaatgaattaaaggaaagaggattgaaatcaagacttattcttcaggtgcacgatgagcttataattgacacacatcctgatgaagttgaaatagtcaaggagcttctaaaatcaataatggaaaatatcataaagttgaaagttcctttagttgtagatatagggcaagggaaaaactggtatgatgcaaaataaaaggatcc

SEQ ID NO: 653 - DNA, 2678 bp, Artificial Sequence
  Description of Artificial Sequence: Synthetic Clostridium thermosulfurogenes DNA Polymerase E788I
atgaaatacctgctgccgaccgctgctgctggtctgctgctcctcgctgcccagccggcgatggccatggcgaaatttttgatcatagatggtaatagcttgatgtacagggcgtattttgccctgcctgatttgatgaacagcgaaggaatgcatacaaatgccatatacggtttttcaatgatgcttcttaaattgctggaggaggagaaaccagactacatagcaatagctttcgataaaaaggcttctacatttaggcacaaggagtacagtgcttataaaggaacccgccagtcgatgccagaagagctgatagaacaggtggatattttaaaagatgtgataaatgcatttaacataaagaccatcgagatagagggatttgaagcagatgatatcattggtacagtatcaaaaattgcttccgaaagtgggatggatgtgcttatcgtcacaggcgacagagatgcgcttcagcttgtgtcggcaaatgtaaaagtaaaaatatgtaaaaaaggcataacgcagatggatgagtacgatgaaaaggcggtctttgaaaagtatgaagtgacgccgcttcaattcatagacttgaaagggcttatgggagacaaatcagacaacattccaggagtgcccaatataggggagaagacggccataaagcttgttaaagaatttggatcaattgaaaatttactgatgaatacagataagttaaaagggaaaataaaagaaaatgtagaaaacaatgcagaattagctgttttaagcaaacggcttgctacgattgagagaaatgttcctattgatattgatttgaatgaatacgcggttaaaaattacgatgtcaataagcttacagagctatttgaaaaattggaattttcaagcctcatctcagatttaaaagatgatagtcgtgatacaaaggatattaaagaatggcctgtaagagattttacatacgttaaaaatgttttaggaaagtttgatgttttgtcattgtatccattcatatatgatggaaagataaaagcagtatcatttgcttgcggtgacggatcgttttttgtagagattgatgattatgacaattttaaattgcttaataatgataagcttacgttgataggacacgatctgaaagattttttagtaaacatttcatactgcggtattgaacttaattgtaagattttagatacggccataatgacttatcttttaaatccgtctgagtcgaattacgacataagtcgcgtattgaaaaaatacttgaaagaggatttgcaaaacatagatgatatagtaggcaagggcaggaataaaaagagctacgatgacattgacaaaaagcttttagtcgattatatgtgttcagccgcatcaaacttatctaagttaaaagataagctcatgtcatttataaaagagatggagatggaagatcttttaaaaaatgtggaaattccgcttattgaagtgctaaaatctatggaggtgtacggctttacattagataaagatgtacttagaagtatttctaaagaaatagatgaaaagacagataagattgtaaaagatatttacgatgctgctggatacgaatttaatattaactctacaaagcagttatcagaatttttgtttgataaactgaatttgccagcaataaaaaagactaaaacagggtattcgactgacatggaagtccttgcagaacttataccgtacaatgacatagtaggagaaataatagaatatagacagcttatgaagcttaaatctacgtacatagatggcttcattcccatcatggatgaaaataatagggtccactctacgtttaaacaaacagttgctgctacagggagaattagctcaacagagcctaatctgcagaacatacctgtaagagaagaatttggcaggaggataagaaaggcatttgtatcaagttatgaagatgggcttataatatctgctgattattctcagattgagctaagggttcttgcacatctttcagaggatgaaaaacttattgagtcatttttgaacaacgaagatatacatttaaggacggcatcggaggtttttaaggtttcgaaagaagaagtgacaagtgaaatgagaaggcgggcgaaagctgtcaactttggtattgtatatggtataagcgattacggcttatctaaagacttaaagatttcgcgaaaagaagcgaaagaatacatagacaattattttgacaggtacaagggcgtcaaaaattacatcgactcaattgtcaaatttgcaaaggaaaatgggtatgttacgactatcttaaataggagaagatacataccgattatcaattcaaaaaattttaaccaaagatcttttggcgagagaatggcaatgaatacacctattcaaggtagcgctgcggatataataaagatgtcgatggttaaagtatacaatgaattaaaggaaagaggattgaaatcaagacttattcttcaggtgcacgatgagcttataattgacacacatcctgatgaagttgaaatagtcaaggagcttctaaaatcaataatggaaaatatcataaagttgaaagttcctttagttgtagatatagggcaagggaaaaactggtatgatgcaaaataaaaggatcc

SEQ ID NO: 654 - DNA, 2678 bp, Artificial Sequence
  Description of Artificial Sequence: Synthetic Clostridium thermosulfurogenes DNA Polymerase E788L
atgaaatacctgctgccgaccgctgctgctggtctgctgctcctcgctgcccagccggcgatggccatggcgaaatttttgatcatagatggtaatagcttgatgtacagggcgtattttgccctgcctgatttgatgaacagcgaaggaatgcatacaaatgccatatacggtttttcaatgatgcttcttaaattgctggaggaggagaaaccagactacatagcaatagctttcgataaaaaggcttctacatttaggcacaaggagtacagtgcttataaaggaacccgccagtcgatgccagaagagctgatagaacaggtggatattttaaaagatgtgataaatgcatttaacataaagaccatcgagatagagggatttgaagcagatgatatcattggtacagtatcaaaaattgcttccgaaagtgggatggatgtgcttatcgtcacaggcgacagagatgcgcttcagcttgtgtcggcaaatgtaaaagtaaaaatatgtaaaaaaggcataacgcagatggatgagtacgatgaaaaggcggtctttgaaaagtatgaagtgacgccgcttcaattcatagacttgaaagggcttatgggagacaaatcagacaacattccaggagtgcccaatataggggagaagacggccataaagcttgttaaagaatttggatcaattgaaaatttactgatgaatacagataagttaaaagggaaaataaaagaaaatgtagaaaacaatgcagaattagctgttttaagcaaacggcttgctacgattgagagaaatgttcctattgatattgatttgaatgaatacgcggttaaaaattacgatgtcaataagcttacagagctatttgaaaaattggaattttcaagcctcatctcagatttaaaagatgatagtcgtgatacaaaggatattaaagaatggcctgtaagagattttacatacgttaaaaatgttttaggaaagtttgatgttttgtcattgtatccattcatatatgatggaaagataaaagcagtatcatttgcttgcggtgacggatcgttttttgtagagattgatgattatgacaattttaaattgcttaataatgataagcttacgttgataggacacgatctgaaagattttttagtaaacatttcatactgcggtattgaacttaattgtaagattttagatacggccataatgacttatcttttaaatccgtctgagtcgaattacgacataagtcgcgtattgaaaaaatacttgaaagaggatttgcaaaacatagatgatatagtaggcaagggcaggaataaaaagagctacgatgacattgacaaaaagcttttagtcgattatatgtgttcagccgcatcaaacttatctaagttaaaagataagctcatgtcatttataaaagagatggagatggaagatcttttaaaaaatgtggaaattccgcttattgaagtgctaaaatctatggaggtgtacggctttacattagataaagatgtacttagaagtatttctaaagaaatagatgaaaagacagataagattgtaaaagatatttacgatgctgctggatacgaatttaatattaactctacaaagcagttatcagaatttttgtttgataaactgaatttgccagcaataaaaaagactaaaacagggtattcgactgacatggaagtccttgcagaacttataccgtacaatgacatagtaggagaaataatagaatatagacagcttatgaagcttaaatctacgtacatagatggcttcattcccatcatggatgaaaataatagggtccactctacgtttaaacaaacagttgctgctacagggagaattagctcaacagagcctaatctgcagaacatacctgtaagagaagaatttggcaggaggataagaaaggcatttgtatcaagttatgaagatgggcttataatatctgctgattattctcagattgagctaagggttcttgcacatctttcagaggatgaaaaacttattgagtcatttttgaacaacgaagatatacatttaaggacggcatcggaggtttttaaggtttcgaaagaagaagtgacaagtgaaatgagaaggcgggcgaaagctgtcaactttggtattgtatatggtataagcgattacggcttatctaaagacttaaagatttcgcgaaaagaagcgaaagaatacatagacaattattttgacaggtacaagggcgtcaaaaattacatcgactcaattgtcaaatttgcaaaggaaaatgggtatgttacgactatcttaaataggagaagatacataccgcttatcaattcaaaaaattttaaccaaagatcttttggcgagagaatggcaatgaatacacctattcaaggtagcgctgcggatataataaagatgtcgatggttaaagtatacaatgaattaaaggaaagaggattgaaatcaagacttattcttcaggtgcacgatgagcttataattgacacacatcctgatgaagttgaaatagtcaaggagcttctaaaatcaataatggaaaatatcataaagttgaaagttcctttagttgtagatatagggcaagggaaaaactggtatgatgcaaaataaaaggatcc

SEQ ID NO: 655 - DNA, 2678 bp, Artificial Sequence
  Description of Artificial Sequence: Synthetic Clostridium thermosulfurogenes DNA Polymerase E788K
atgaaatacctgctgccgaccgctgctgctggtctgctgctcctcgctgcccagccggcgatggccatggcgaaatttttgatcatagatggtaatagcttgatgtacagggcgtattttgccctgcctgatttgatgaacagcgaaggaatgcatacaaatgccatatacggtttttcaatgatgcttcttaaattgctggaggaggagaaaccagactacatagcaatagctttcgataaaaaggcttctacatttaggcacaaggagtacagtgcttataaaggaacccgccagtcgatgccagaagagctgatagaacaggtggatattttaaaagatgtgataaatgcatttaacataaagaccatcgagatagagggatttgaagcagatgatatcattggtacagtatcaaaaattgcttccgaaagtgggatggatgtgcttatcgtcacaggcgacagagatgcgcttcagcttgtgtcggcaaatgtaaaagtaaaaatatgtaaaaaaggcataacgcagatggatgagtacgatgaaaaggcggtctttgaaaagtatgaagtgacgccgcttcaattcatagacttgaaagggcttatgggagacaaatcagacaacattccaggagtgcccaatataggggagaagacggccataaagcttgttaaagaatttggatcaattgaaaatttactgatgaatacagataagttaaaagggaaaataaaagaaaatgtagaaaacaatgcagaattagctgttttaagcaaacggcttgctacgattgagagaaatgttcctattgatattgatttgaatgaatacgcggttaaaaattacgatgtcaataagcttacagagctatttgaaaaattggaattttcaagcctcatctcagatttaaaagatgatagtcgtgatacaaaggatattaaagaatggcctgtaagagattttacatacgttaaaaatgttttaggaaagtttgatgttttgtcattgtatccattcatatatgatggaaagataaaagcagtatcatttgcttgcggtgacggatcgttttttgtagagattgatgattatgacaattttaaattgcttaataatgataagcttacgttgataggacacgatctgaaagattttttagtaaacatttcatactgcggtattgaacttaattgtaagattttagatacggccataatgacttatcttttaaatccgtctgagtcgaattacgacataagtcgcgtattgaaaaaatacttgaaagaggatttgcaaaacatagatgatatagtaggcaagggcaggaataaaaagagctacgatgacattgacaaaaagcttttagtcgattatatgtgttcagccgcatcaaacttatctaagttaaaagataagctcatgtcatttataaaagagatggagatggaagatcttttaaaaaatgtggaaattccgcttattgaagtgctaaaatctatggaggtgtacggctttacattagataaagatgtacttagaagtatttctaaagaaatagatgaaaagacagataagattgtaaaagatatttacgatgctgctggatacgaatttaatattaactctacaaagcagttatcagaatttttgtttgataaactgaatttgccagcaataaaaaagactaaaacagggtattcgactgacatggaagtccttgcagaacttataccgtacaatgacatagtaggagaaataatagaatatagacagcttatgaagcttaaatctacgtacatagatggcttcattcccatcatggatgaaaataatagggtccactctacgtttaaacaaacagttgctgctacagggagaattagctcaacagagcctaatctgcagaacatacctgtaagagaagaatttggcaggaggataagaaaggcatttgtatcaagttatgaagatgggcttataatatctgctgattattctcagattgagctaagggttcttgcacatctttcagaggatgaaaaacttattgagtcatttttgaacaacgaagatatacatttaaggacggcatcggaggtttttaaggtttcgaaagaagaagtgacaagtgaaatgagaaggcgggcgaaagctgtcaactttggtattgtatatggtataagcgattacggcttatctaaagacttaaagatttcgcgaaaagaagcgaaagaatacatagacaattattttgacaggtacaagggcgtcaaaaattacatcgactcaattgtcaaatttgcaaaggaaaatgggtatgttacgactatcttaaataggagaagatacataccgaaaatcaattcaaaaaattttaaccaaagatcttttggcgagagaatggcaatgaatacacctattcaaggtagcgctgcggatataataaagatgtcgatggttaaagtatacaatgaattaaaggaaagaggattgaaatcaagacttattcttcaggtgcacgatgagcttataattgacacacatcctgatgaagttgaaatagtcaaggagcttctaaaatcaataatggaaaatatcataaagttgaaagttcctttagttgtagatatagggcaagggaaaaactggtatgatgcaaaataaaaggatcc

SEQ ID NO: 656 - DNA, 2678 bp, Artificial Sequence
  Description of Artificial Sequence: Synthetic Clostridium thermosulfurogenes DNA Polymerase E788M
atgaaatacctgctgccgaccgctgctgctggtctgctgctcctcgctgcccagccggcgatggccatggcgaaatttttgatcatagatggtaatagcttgatgtacagggcgtattttgccctgcctgatttgatgaacagcgaaggaatgcatacaaatgccatatacggtttttcaatgatgcttcttaaattgctggaggaggagaaaccagactacatagcaatagctttcgataaaaaggcttctacatttaggcacaaggagtacagtgcttataaaggaacccgccagtcgatgccagaagagctgatagaacaggtggatattttaaaagatgtgataaatgcatttaacataaagaccatcgagatagagggatttgaagcagatgatatcattggtacagtatcaaaaattgcttccgaaagtgggatggatgtgcttatcgtcacaggcgacagagatgcgcttcagcttgtgtcggcaaatgtaaaagtaaaaatatgtaaaaaaggcataacgcagatggatgagtacgatgaaaaggcggtctttgaaaagtatgaagtgacgccgcttcaattcatagacttgaaagggcttatgggagacaaatcagacaacattccaggagtgcccaatataggggagaagacggccataaagcttgttaaagaatttggatcaattgaaaatttactgatgaatacagataagttaaaagggaaaataaaagaaaatgtagaaaacaatgcagaattagctgttttaagcaaacggcttgctacgattgagagaaatgttcctattgatattgatttgaatgaatacgcggttaaaaattacgatgtcaataagcttacagagctatttgaaaaattggaattttcaagcctcatctcagatttaaaagatgatagtcgtgatacaaaggatattaaagaatggcctgtaagagattttacatacgttaaaaatgttttaggaaagtttgatgttttgtcattgtatccattcatatatgatggaaagataaaagcagtatcatttgcttgcggtgacggatcgttttttgtagagattgatgattatgacaattttaaattgcttaataatgataagcttacgttgataggacacgatctgaaagattttttagtaaacatttcatactgcggtattgaacttaattgtaagattttagatacggccataatgacttatcttttaaatccgtctgagtcgaattacgacataagtcgcgtattgaaaaaatacttgaaagaggatttgcaaaacatagatgatatagtaggcaagggcaggaataaaaagagctacgatgacattgacaaaaagcttttagtcgattatatgtgttcagccgcatcaaacttatctaagttaaaagataagctcatgtcatttataaaagagatggagatggaagatcttttaaaaaatgtggaaattccgcttattgaagtgctaaaatctatggaggtgtacggctttacattagataaagatgtacttagaagtatttctaaagaaatagatgaaaagacagataagattgtaaaagatatttacgatgctgctggatacgaatttaatattaactctacaaagcagttatcagaatttttgtttgataaactgaatttgccagcaataaaaaagactaaaacagggtattcgactgacatggaagtccttgcagaacttataccgtacaatgacatagtaggagaaataatagaatatagacagcttatgaagcttaaatctacgtacatagatggcttcattcccatcatggatgaaaataatagggtccactctacgtttaaacaaacagttgctgctacagggagaattagctcaacagagcctaatctgcagaacatacctgtaagagaagaatttggcaggaggataagaaaggcatttgtatcaagttatgaagatgggcttataatatctgctgattattctcagattgagctaagggttcttgcacatctttcagaggatgaaaaacttattgagtcatttttgaacaacgaagatatacatttaaggacggcatcggaggtttttaaggtttcgaaagaagaagtgacaagtgaaatgagaaggcgggcgaaagctgtcaactttggtattgtatatggtataagcgattacggcttatctaaagacttaaagatttcgcgaaaagaagcgaaagaatacatagacaattattttgacaggtacaagggcgtcaaaaattacatcgactcaattgtcaaatttgcaaaggaaaatgggtatgttacgactatcttaaataggagaagatacataccgatgatcaattcaaaaaattttaaccaaagatcttttggcgagagaatggcaatgaatacacctattcaaggtagcgctgcggatataataaagatgtcgatggttaaagtatacaatgaattaaaggaaagaggattgaaatcaagacttattcttcaggtgcacgatgagcttataattgacacacatcctgatgaagttgaaatagtcaaggagcttctaaaatcaataatggaaaatatcataaagttgaaagttcctttagttgtagatatagggcaagggaaaaactggtatgatgcaaaataaaaggatcc

SEQ ID NO: 657 - DNA, 2678 bp, Artificial Sequence
  Description of Artificial Sequence: Synthetic Clostridium thermosulfurogenes DNA Polymerase E788F
atgaaatacctgctgccgaccgctgctgctggtctgctgctcctcgctgcccagccggcgatggccatggcgaaatttttgatcatagatggtaatagcttgatgtacagggcgtattttgccctgcctgatttgatgaacagcgaaggaatgcatacaaatgccatatacggtttttcaatgatgcttcttaaattgctggaggaggagaaaccagactacatagcaatagctttcgataaaaaggcttctacatttaggcacaaggagtacagtgcttataaaggaacccgccagtcgatgccagaagagctgatagaacaggtggatattttaaaagatgtgataaatgcatttaacataaagaccatcgagatagagggatttgaagcagatgatatcattggtacagtatcaaaaattgcttccgaaagtgggatggatgtgcttatcgtcacaggcgacagagatgcgcttcagcttgtgtcggcaaatgtaaaagtaaaaatatgtaaaaaaggcataacgcagatggatgagtacgatgaaaaggcggtctttgaaaagtatgaagtgacgccgcttcaattcatagacttgaaagggcttatgggagacaaatcagacaacattccaggagtgcccaatataggggagaagacggccataaagcttgttaaagaatttggatcaattgaaaatttactgatgaatacagataagttaaaagggaaaataaaagaaaatgtagaaaacaatgcagaattagctgttttaagcaaacggcttgctacgattgagagaaatgttcctattgatattgatttgaatgaatacgcggttaaaaattacgatgtcaataagcttacagagctatttgaaaaattggaattttcaagcctcatctcagatttaaaagatgatagtcgtgatacaaaggatattaaagaatggcctgtaagagattttacatacgttaaaaatgttttaggaaagtttgatgttttgtcattgtatccattcatatatgatggaaagataaaagcagtatcatttgcttgcggtgacggatcgttttttgtagagattgatgattatgacaattttaaattgcttaataatgataagcttacgttgataggacacgatctgaaagattttttagtaaacatttcatactgcggtattgaacttaattgtaagattttagatacggccataatgacttatcttttaaatccgtctgagtcgaattacgacataagtcgcgtattgaaaaaatacttgaaagaggatttgcaaaacatagatgatatagtaggcaagggcaggaataaaaagagctacgatgacattgacaaaaagcttttagtcgattatatgtgttcagccgcatcaaacttatctaagttaaaagataagctcatgtcatttataaaagagatggagatggaagatcttttaaaaaatgtggaaattccgcttattgaagtgctaaaatctatggaggtgtacggctttacattagataaagatgtacttagaagtatttctaaagaaatagatgaaaagacagataagattgtaaaagatatttacgatgctgctggatacgaatttaatattaactctacaaagcagttatcagaatttttgtttgataaactgaatttgccagcaataaaaaagactaaaacagggtattcgactgacatggaagtccttgcagaacttataccgtacaatgacatagtaggagaaataatagaatatagacagcttatgaagcttaaatctacgtacatagatggcttcattcccatcatggatgaaaataatagggtccactctacgtttaaacaaacagttgctgctacagggagaattagctcaacagagcctaatctgcagaacatacctgtaagagaagaatttggcaggaggataagaaaggcatttgtatcaagttatgaagatgggcttataatatctgctgattattctcagattgagctaagggttcttgcacatctttcagaggatgaaaaacttattgagtcatttttgaacaacgaagatatacatttaaggacggcatcggaggtttttaaggtttcgaaagaagaagtgacaagtgaaatgagaaggcgggcgaaagctgtcaactttggtattgtatatggtataagcgattacggcttatctaaagacttaaagatttcgcgaaaagaagcgaaagaatacatagacaattattttgacaggtacaagggcgtcaaaaattacatcgactcaattgtcaaatttgcaaaggaaaatgggtatgttacgactatcttaaataggagaagatacataccgtttatcaattcaaaaaattttaaccaaagatcttttggcgagagaatggcaatgaatacacctattcaaggtagcgctgcggatataataaagatgtcgatggttaaagtatacaatgaattaaaggaaagaggattgaaatcaagacttattcttcaggtgcacgatgagcttataattgacacacatcctgatgaagttgaaatagtcaaggagcttctaaaatcaataatggaaaatatcataaagttgaaagttcctttagttgtagatatagggcaagggaaaaactggtatgatgcaaaataaaaggatcc

SEQ ID NO: 658 - DNA, 2678 bp, Artificial Sequence
  Description of Artificial Sequence: Synthetic Clostridium thermosulfurogenes DNA Polymerase E788P
atgaaatacctgctgccgaccgctgctgctggtctgctgctcctcgctgcccagccggcgatggccatggcgaaatttttgatcatagatggtaatagcttgatgtacagggcgtattttgccctgcctgatttgatgaacagcgaaggaatgcatacaaatgccatatacggtttttcaatgatgcttcttaaattgctggaggaggagaaaccagactacatagcaatagctttcgataaaaaggcttctacatttaggcacaaggagtacagtgcttataaaggaacccgccagtcgatgccagaagagctgatagaacaggtggatattttaaaagatgtgataaatgcatttaacataaagaccatcgagatagagggatttgaagcagatgatatcattggtacagtatcaaaaattgcttccgaaagtgggatggatgtgcttatcgtcacaggcgacagagatgcgcttcagcttgtgtcggcaaatgtaaaagtaaaaatatgtaaaaaaggcataacgcagatggatgagtacgatgaaaaggcggtctttgaaaagtatgaagtgacgccgcttcaattcatagacttgaaagggcttatgggagacaaatcagacaacattccaggagtgcccaatataggggagaagacggccataaagcttgttaaagaatttggatcaattgaaaatttactgatgaatacagataagttaaaagggaaaataaaagaaaatgtagaaaacaatgcagaattagctgttttaagcaaacggcttgctacgattgagagaaatgttcctattgatattgatttgaatgaatacgcggttaaaaattacgatgtcaataagcttacagagctatttgaaaaattggaattttcaagcctcatctcagatttaaaagatgatagtcgtgatacaaaggatattaaagaatggcctgtaagagattttacatacgttaaaaatgttttaggaaagtttgatgttttgtcattgtatccattcatatatgatggaaagataaaagcagtatcatttgcttgcggtgacggatcgttttttgtagagattgatgattatgacaattttaaattgcttaataatgataagcttacgttgataggacacgatctgaaagattttttagtaaacatttcatactgcggtattgaacttaattgtaagattttagatacggccataatgacttatcttttaaatccgtctgagtcgaattacgacataagtcgcgtattgaaaaaatacttgaaagaggatttgcaaaacatagatgatatagtaggcaagggcaggaataaaaagagctacgatgacattgacaaaaagcttttagtcgattatatgtgttcagccgcatcaaacttatctaagttaaaagataagctcatgtcatttataaaagagatggagatggaagatcttttaaaaaatgtggaaattccgcttattgaagtgctaaaatctatggaggtgtacggctttacattagataaagatgtacttagaagtatttctaaagaaatagatgaaaagacagataagattgtaaaagatatttacgatgctgctggatacgaatttaatattaactctacaaagcagttatcagaatttttgtttgataaactgaatttgccagcaataaaaaagactaaaacagggtattcgactgacatggaagtccttgcagaacttataccgtacaatgacatagtaggagaaataatagaatatagacagcttatgaagcttaaatctacgtacatagatggcttcattcccatcatggatgaaaataatagggtccactctacgtttaaacaaacagttgctgctacagggagaattagctcaacagagcctaatctgcagaacatacctgtaagagaagaatttggcaggaggataagaaaggcatttgtatcaagttatgaagatgggcttataatatctgctgattattctcagattgagctaagggttcttgcacatctttcagaggatgaaaaacttattgagtcatttttgaacaacgaagatatacatttaaggacggcatcggaggtttttaaggtttcgaaagaagaagtgacaagtgaaatgagaaggcgggcgaaagctgtcaactttggtattgtatatggtataagcgattacggcttatctaaagacttaaagatttcgcgaaaagaagcgaaagaatacatagacaattattttgacaggtacaagggcgtcaaaaattacatcgactcaattgtcaaatttgcaaaggaaaatgggtatgttacgactatcttaaataggagaagatacataccgcctatcaattcaaaaaattttaaccaaagatcttttggcgagagaatggcaatgaatacacctattcaaggtagcgctgcggatataataaagatgtcgatggttaaagtatacaatgaattaaaggaaagaggattgaaatcaagacttattcttcaggtgcacgatgagcttataattgacacacatcctgatgaagttgaaatagtcaaggagcttctaaaatcaataatggaaaatatcataaagttgaaagttcctttagttgtagatatagggcaagggaaaaactggtatgatgcaaaataaaaggatcc

SEQ ID NO: 659 - DNA, 2678 bp, Artificial Sequence
  Description of Artificial Sequence: Synthetic Clostridium thermosulfurogenes DNA Polymerase E788S
atgaaatacctgctgccgaccgctgctgctggtctgctgctcctcgctgcccagccggcgatggccatggcgaaatttttgatcatagatggtaatagcttgatgtacagggcgtattttgccctgcctgatttgatgaacagcgaaggaatgcatacaaatgccatatacggtttttcaatgatgcttcttaaattgctggaggaggagaaaccagactacatagcaatagctttcgataaaaaggcttctacatttaggcacaaggagtacagtgcttataaaggaacccgccagtcgatgccagaagagctgatagaacaggtggatattttaaaagatgtgataaatgcatttaacataaagaccatcgagatagagggatttgaagcagatgatatcattggtacagtatcaaaaattgcttccgaaagtgggatggatgtgcttatcgtcacaggcgacagagatgcgcttcagcttgtgtcggcaaatgtaaaagtaaaaatatgtaaaaaaggcataacgcagatggatgagtacgatgaaaaggcggtctttgaaaagtatgaagtgacgccgcttcaattcatagacttgaaagggcttatgggagacaaatcagacaacattccaggagtgcccaatataggggagaagacggccataaagcttgttaaagaatttggatcaattgaaaatttactgatgaatacagataagttaaaagggaaaataaaagaaaatgtagaaaacaatgcagaattagctgttttaagcaaacggcttgctacgattgagagaaatgttcctattgatattgatttgaatgaatacgcggttaaaaattacgatgtcaataagcttacagagctatttgaaaaattggaattttcaagcctcatctcagatttaaaagatgatagtcgtgatacaaaggatattaaagaatggcctgtaagagattttacatacgttaaaaatgttttaggaaagtttgatgttttgtcattgtatccattcatatatgatggaaagataaaagcagtatcatttgcttgcggtgacggatcgttttttgtagagattgatgattatgacaattttaaattgcttaataatgataagcttacgttgataggacacgatctgaaagattttttagtaaacatttcatactgcggtattgaacttaattgtaagattttagatacggccataatgacttatcttttaaatccgtctgagtcgaattacgacataagtcgcgtattgaaaaaatacttgaaagaggatttgcaaaacatagatgatatagtaggcaagggcaggaataaaaagagctacgatgacattgacaaaaagcttttagtcgattatatgtgttcagccgcatcaaacttatctaagttaaaagataagctcatgtcatttataaaagagatggagatggaagatcttttaaaaaatgtggaaattccgcttattgaagtgctaaaatctatggaggtgtacggctttacattagataaagatgtacttagaagtatttctaaagaaatagatgaaaagacagataagattgtaaaagatatttacgatgctgctggatacgaatttaatattaactctacaaagcagttatcagaatttttgtttgataaactgaatttgccagcaataaaaaagactaaaacagggtattcgactgacatggaagtccttgcagaacttataccgtacaatgacatagtaggagaaataatagaatatagacagcttatgaagcttaaatctacgtacatagatggcttcattcccatcatggatgaaaataatagggtccactctacgtttaaacaaacagttgctgctacagggagaattagctcaacagagcctaatctgcagaacatacctgtaagagaagaatttggcaggaggataagaaaggcatttgtatcaagttatgaagatgggcttataatatctgctgattattctcagattgagctaagggttcttgcacatctttcagaggatgaaaaacttattgagtcatttttgaacaacgaagatatacatttaaggacggcatcggaggtttttaaggtttcgaaagaagaagtgacaagtgaaatgagaaggcgggcgaaagctgtcaactttggtattgtatatggtataagcgattacggcttatctaaagacttaaagatttcgcgaaaagaagcgaaagaatacatagacaattattttgacaggtacaagggcgtcaaaaattacatcgactcaattgtcaaatttgcaaaggaaaatgggtatgttacgactatcttaaataggagaagatacataccgtctatcaattcaaaaaattttaaccaaagatcttttggcgagagaatggcaatgaatacacctattcaaggtagcgctgcggatataataaagatgtcgatggttaaagtatacaatgaattaaaggaaagaggattgaaatcaagacttattcttcaggtgcacgatgagcttataattgacacacatcctgatgaagttgaaatagtcaaggagcttctaaaatcaataatggaaaatatcataaagttgaaagttcctttagttgtagatatagggcaagggaaaaactggtatgatgcaaaataaaaggatcc

SEQ ID NO: 660 - DNA, 2678 bp, Artificial Sequence
  Description of Artificial Sequence: Synthetic Clostridium thermosulfurogenes DNA Polymerase E788T
atgaaatacctgctgccgaccgctgctgctggtctgctgctcctcgctgcccagccggcgatggccatggcgaaatttttgatcatagatggtaatagcttgatgtacagggcgtattttgccctgcctgatttgatgaacagcgaaggaatgcatacaaatgccatatacggtttttcaatgatgcttcttaaattgctggaggaggagaaaccagactacatagcaatagctttcgataaaaaggcttctacatttaggcacaaggagtacagtgcttataaaggaacccgccagtcgatgccagaagagctgatagaacaggtggatattttaaaagatgtgataaatgcatttaacataaagaccatcgagatagagggatttgaagcagatgatatcattggtacagtatcaaaaattgcttccgaaagtgggatggatgtgcttatcgtcacaggcgacagagatgcgcttcagcttgtgtcggcaaatgtaaaagtaaaaatatgtaaaaaaggcataacgcagatggatgagtacgatgaaaaggcggtctttgaaaagtatgaagtgacgccgcttcaattcatagacttgaaagggcttatgggagacaaatcagacaacattccaggagtgcccaatataggggagaagacggccataaagcttgttaaagaatttggatcaattgaaaatttactgatgaatacagataagttaaaagggaaaataaaagaaaatgtagaaaacaatgcagaattagctgttttaagcaaacggcttgctacgattgagagaaatgttcctattgatattgatttgaatgaatacgcggttaaaaattacgatgtcaataagcttacagagctatttgaaaaattggaattttcaagcctcatctcagatttaaaagatgatagtcgtgatacaaaggatattaaagaatggcctgtaagagattttacatacgttaaaaatgttttaggaaagtttgatgttttgtcattgtatccattcatatatgatggaaagataaaagcagtatcatttgcttgcggtgacggatcgttttttgtagagattgatgattatgacaattttaaattgcttaataatgataagcttacgttgataggacacgatctgaaagattttttagtaaacatttcatactgcggtattgaacttaattgtaagattttagatacggccataatgacttatcttttaaatccgtctgagtcgaattacgacataagtcgcgtattgaaaaaatacttgaaagaggatttgcaaaacatagatgatatagtaggcaagggcaggaataaaaagagctacgatgacattgacaaaaagcttttagtcgattatatgtgttcagccgcatcaaacttatctaagttaaaagataagctcatgtcatttataaaagagatggagatggaagatcttttaaaaaatgtggaaattccgcttattgaagtgctaaaatctatggaggtgtacggctttacattagataaagatgtacttagaagtatttctaaagaaatagatgaaaagacagataagattgtaaaagatatttacgatgctgctggatacgaatttaatattaactctacaaagcagttatcagaatttttgtttgataaactgaatttgccagcaataaaaaagactaaaacagggtattcgactgacatggaagtccttgcagaacttataccgtacaatgacatagtaggagaaataatagaatatagacagcttatgaagcttaaatctacgtacatagatggcttcattcccatcatggatgaaaataatagggtccactctacgtttaaacaaacagttgctgctacagggagaattagctcaacagagcctaatctgcagaacatacctgtaagagaagaatttggcaggaggataagaaaggcatttgtatcaagttatgaagatgggcttataatatctgctgattattctcagattgagctaagggttcttgcacatctttcagaggatgaaaaacttattgagtcatttttgaacaacgaagatatacatttaaggacggcatcggaggtttttaaggtttcgaaagaagaagtgacaagtgaaatgagaaggcgggcgaaagctgtcaactttggtattgtatatggtataagcgattacggcttatctaaagacttaaagatttcgcgaaaagaagcgaaagaatacatagacaattattttgacaggtacaagggcgtcaaaaattacatcgactcaattgtcaaatttgcaaaggaaaatgggtatgttacgactatcttaaataggagaagatacataccgactatcaattcaaaaaattttaaccaaagatcttttggcgagagaatggcaatgaatacacctattcaaggtagcgctgcggatataataaagatgtcgatggttaaagtatacaatgaattaaaggaaagaggattgaaatcaagacttattcttcaggtgcacgatgagcttataattgacacacatcctgatgaagttgaaatagtcaaggagcttctaaaatcaataatggaaaatatcataaagttgaaagttcctttagttgtagatatagggcaagggaaaaactggtatgatgcaaaataaaaggatcc

SEQ ID NO: 661 - DNA, 2678 bp, Artificial Sequence
  Description of Artificial Sequence: Synthetic Clostridium thermosulfurogenes DNA Polymerase E788W
atgaaatacctgctgccgaccgctgctgctggtctgctgctcctcgctgcccagccggcgatggccatggcgaaatttttgatcatagatggtaatagcttgatgtacagggcgtattttgccctgcctgatttgatgaacagcgaaggaatgcatacaaatgccatatacggtttttcaatgatgcttcttaaattgctggaggaggagaaaccagactacatagcaatagctttcgataaaaaggcttctacatttaggcacaaggagtacagtgcttataaaggaacccgccagtcgatgccagaagagctgatagaacaggtggatattttaaaagatgtgataaatgcatttaacataaagaccatcgagatagagggatttgaagcagatgatatcattggtacagtatcaaaaattgcttccgaaagtgggatggatgtgcttatcgtcacaggcgacagagatgcgcttcagcttgtgtcggcaaatgtaaaagtaaaaatatgtaaaaaaggcataacgcagatggatgagtacgatgaaaaggcggtctttgaaaagtatgaagtgacgccgcttcaattcatagacttgaaagggcttatgggagacaaatcagacaacattccaggagtgcccaatataggggagaagacggccataaagcttgttaaagaatttggatcaattgaaaatttactgatgaatacagataagttaaaagggaaaataaaagaaaatgtagaaaacaatgcagaattagctgttttaagcaaacggcttgctacgattgagagaaatgttcctattgatattgatttgaatgaatacgcggttaaaaattacgatgtcaataagcttacagagctatttgaaaaattggaattttcaagcctcatctcagatttaaaagatgatagtcgtgatacaaaggatattaaagaatggcctgtaagagattttacatacgttaaaaatgttttaggaaagtttgatgttttgtcattgtatccattcatatatgatggaaagataaaagcagtatcatttgcttgcggtgacggatcgttttttgtagagattgatgattatgacaattttaaattgcttaataatgataagcttacgttgataggacacgatctgaaagattttttagtaaacatttcatactgcggtattgaacttaattgtaagattttagatacggccataatgacttatcttttaaatccgtctgagtcgaattacgacataagtcgcgtattgaaaaaatacttgaaagaggatttgcaaaacatagatgatatagtaggcaagggcaggaataaaaagagctacgatgacattgacaaaaagcttttagtcgattatatgtgttcagccgcatcaaacttatctaagttaaaagataagctcatgtcatttataaaagagatggagatggaagatcttttaaaaaatgtggaaattccgcttattgaagtgctaaaatctatggaggtgtacggctttacattagataaagatgtacttagaagtatttctaaagaaatagatgaaaagacagataagattgtaaaagatatttacgatgctgctggatacgaatttaatattaactctacaaagcagttatcagaatttttgtttgataaactgaatttgccagcaataaaaaagactaaaacagggtattcgactgacatggaagtccttgcagaacttataccgtacaatgacatagtaggagaaataatagaatatagacagcttatgaagcttaaatctacgtacatagatggcttcattcccatcatggatgaaaataatagggtccactctacgtttaaacaaacagttgctgctacagggagaattagctcaacagagcctaatctgcagaacatacctgtaagagaagaatttggcaggaggataagaaaggcatttgtatcaagttatgaagatgggcttataatatctgctgattattctcagattgagctaagggttcttgcacatctttcagaggatgaaaaacttattgagtcatttttgaacaacgaagatatacatttaaggacggcatcggaggtttttaaggtttcgaaagaagaagtgacaagtgaaatgagaaggcgggcgaaagctgtcaactttggtattgtatatggtataagcgattacggcttatctaaagacttaaagatttcgcgaaaagaagcgaaagaatacatagacaattattttgacaggtacaagggcgtcaaaaattacatcgactcaattgtcaaatttgcaaaggaaaatgggtatgttacgactatcttaaataggagaagatacataccgtggatcaattcaaaaaattttaaccaaagatcttttggcgagagaatggcaatgaatacacctattcaaggtagcgctgcggatataataaagatgtcgatggttaaagtatacaatgaattaaaggaaagaggattgaaatcaagacttattcttcaggtgcacgatgagcttataattgacacacatcctgatgaagttgaaatagtcaaggagcttctaaaatcaataatggaaaatatcataaagttgaaagttcctttagttgtagatatagggcaagggaaaaactggtatgatgcaaaataaaaggatcc

SEQ ID NO: 662 - DNA, 2678 bp, Artificial Sequence
  Description of Artificial Sequence: Synthetic Clostridium thermosulfurogenes DNA Polymerase E788Y
atgaaatacctgctgccgaccgctgctgctggtctgctgctcctcgctgcccagccggcgatggccatggcgaaatttttgatcatagatggtaatagcttgatgtacagggcgtattttgccctgcctgatttgatgaacagcgaaggaatgcatacaaatgccatatacggtttttcaatgatgcttcttaaattgctggaggaggagaaaccagactacatagcaatagctttcgataaaaaggcttctacatttaggcacaaggagtacagtgcttataaaggaacccgccagtcgatgccagaagagctgatagaacaggtggatattttaaaagatgtgataaatgcatttaacataaagaccatcgagatagagggatttgaagcagatgatatcattggtacagtatcaaaaattgcttccgaaagtgggatggatgtgcttatcgtcacaggcgacagagatgcgcttcagcttgtgtcggcaaatgtaaaagtaaaaatatgtaaaaaaggcataacgcagatggatgagtacgatgaaaaggcggtctttgaaaagtatgaagtgacgccgcttcaattcatagacttgaaagggcttatgggagacaaatcagacaacattccaggagtgcccaatataggggagaagacggccataaagcttgttaaagaatttggatcaattgaaaatttactgatgaatacagataagttaaaagggaaaataaaagaaaatgtagaaaacaatgcagaattagctgttttaagcaaacggcttgctacgattgagagaaatgttcctattgatattgatttgaatgaatacgcggttaaaaattacgatgtcaataagcttacagagctatttgaaaaattggaattttcaagcctcatctcagatttaaaagatgatagtcgtgatacaaaggatattaaagaatggcctgtaagagattttacatacgttaaaaatgttttaggaaagtttgatgttttgtcattgtatccattcatatatgatggaaagataaaagcagtatcatttgcttgcggtgacggatcgttttttgtagagattgatgattatgacaattttaaattgcttaataatgataagcttacgttgataggacacgatctgaaagattttttagtaaacatttcatactgcggtattgaacttaattgtaagattttagatacggccataatgacttatcttttaaatccgtctgagtcgaattacgacataagtcgcgtattgaaaaaatacttgaaagaggatttgcaaaacatagatgatatagtaggcaagggcaggaataaaaagagctacgatgacattgacaaaaagcttttagtcgattatatgtgttcagccgcatcaaacttatctaagttaaaagataagctcatgtcatttataaaagagatggagatggaagatcttttaaaaaatgtggaaattccgcttattgaagtgctaaaatctatggaggtgtacggctttacattagataaagatgtacttagaagtatttctaaagaaatagatgaaaagacagataagattgtaaaagatatttacgatgctgctggatacgaatttaatattaactctacaaagcagttatcagaatttttgtttgataaactgaatttgccagcaataaaaaagactaaaacagggtattcgactgacatggaagtccttgcagaacttataccgtacaatgacatagtaggagaaataatagaatatagacagcttatgaagcttaaatctacgtacatagatggcttcattcccatcatggatgaaaataatagggtccactctacgtttaaacaaacagttgctgctacagggagaattagctcaacagagcctaatctgcagaacatacctgtaagagaagaatttggcaggaggataagaaaggcatttgtatcaagttatgaagatgggcttataatatctgctgattattctcagattgagctaagggttcttgcacatctttcagaggatgaaaaacttattgagtcatttttgaacaacgaagatatacatttaaggacggcatcggaggtttttaaggtttcgaaagaagaagtgacaagtgaaatgagaaggcgggcgaaagctgtcaactttggtattgtatatggtataagcgattacggcttatctaaagacttaaagatttcgcgaaaagaagcgaaagaatacatagacaattattttgacaggtacaagggcgtcaaaaattacatcgactcaattgtcaaatttgcaaaggaaaatgggtatgttacgactatcttaaataggagaagatacataccgtatatcaattcaaaaaattttaaccaaagatcttttggcgagagaatggcaatgaatacacctattcaaggtagcgctgcggatataataaagatgtcgatggttaaagtatacaatgaattaaaggaaagaggattgaaatcaagacttattcttcaggtgcacgatgagcttataattgacacacatcctgatgaagttgaaatagtcaaggagcttctaaaatcaataatggaaaatatcataaagttgaaagttcctttagttgtagatatagggcaagggaaaaactggtatgatgcaaaataaaaggatcc

SEQ ID NO: 663 - DNA, 2678 bp, Artificial Sequence
  Description of Artificial Sequence: Synthetic Clostridium thermosulfurogenes DNA Polymerase E788V
atgaaatacctgctgccgaccgctgctgctggtctgctgctcctcgctgcccagccggcgatggccatggcgaaatttttgatcatagatggtaatagcttgatgtacagggcgtattttgccctgcctgatttgatgaacagcgaaggaatgcatacaaatgccatatacggtttttcaatgatgcttcttaaattgctggaggaggagaaaccagactacatagcaatagctttcgataaaaaggcttctacatttaggcacaaggagtacagtgcttataaaggaacccgccagtcgatgccagaagagctgatagaacaggtggatattttaaaagatgtgataaatgcatttaacataaagaccatcgagatagagggatttgaagcagatgatatcattggtacagtatcaaaaattgcttccgaaagtgggatggatgtgcttatcgtcacaggcgacagagatgcgcttcagcttgtgtcggcaaatgtaaaagtaaaaatatgtaaaaaaggcataacgcagatggatgagtacgatgaaaaggcggtctttgaaaagtatgaagtgacgccgcttcaattcatagacttgaaagggcttatgggagacaaatcagacaacattccaggagtgcccaatataggggagaagacggccataaagcttgttaaagaatttggatcaattgaaaatttactgatgaatacagataagttaaaagggaaaataaaagaaaatgtagaaaacaatgcagaattagctgttttaagcaaacggcttgctacgattgagagaaatgttcctattgatattgatttgaatgaatacgcggttaaaaattacgatgtcaataagcttacagagctatttgaaaaattggaattttcaagcctcatctcagatttaaaagatgatagtcgtgatacaaaggatattaaagaatggcctgtaagagattttacatacgttaaaaatgttttaggaaagtttgatgttttgtcattgtatccattcatatatgatggaaagataaaagcagtatcatttgcttgcggtgacggatcgttttttgtagagattgatgattatgacaattttaaattgcttaataatgataagcttacgttgataggacacgatctgaaagattttttagtaaacatttcatactgcggtattgaacttaattgtaagattttagatacggccataatgacttatcttttaaatccgtctgagtcgaattacgacataagtcgcgtattgaaaaaatacttgaaagaggatttgcaaaacatagatgatatagtaggcaagggcaggaataaaaagagctacgatgacattgacaaaaagcttttagtcgattatatgtgttcagccgcatcaaacttatctaagttaaaagataagctcatgtcatttataaaagagatggagatggaagatcttttaaaaaatgtggaaattccgcttattgaagtgctaaaatctatggaggtgtacggctttacattagataaagatgtacttagaagtatttctaaagaaatagatgaaaagacagataagattgtaaaagatatttacgatgctgctggatacgaatttaatattaactctacaaagcagttatcagaatttttgtttgataaactgaatttgccagcaataaaaaagactaaaacagggtattcgactgacatggaagtccttgcagaacttataccgtacaatgacatagtaggagaaataatagaatatagacagcttatgaagcttaaatctacgtacatagatggcttcattcccatcatggatgaaaataatagggtccactctacgtttaaacaaacagttgctgctacagggagaattagctcaacagagcctaatctgcagaacatacctgtaagagaagaatttggcaggaggataagaaaggcatttgtatcaagttatgaagatgggcttataatatctgctgattattctcagattgagctaagggttcttgcacatctttcagaggatgaaaaacttattgagtcatttttgaacaacgaagatatacatttaaggacggcatcggaggtttttaaggtttcgaaagaagaagtgacaagtgaaatgagaaggcgggcgaaagctgtcaactttggtattgtatatggtataagcgattacggcttatctaaagacttaaagatttcgcgaaaagaagcgaaagaatacatagacaattattttgacaggtacaagggcgtcaaaaattacatcgactcaattgtcaaatttgcaaaggaaaatgggtatgttacgactatcttaaataggagaagatacataccggttatcaattcaaaaaattttaaccaaagatcttttggcgagagaatggcaatgaatacacctattcaaggtagcgctgcggatataataaagatgtcgatggttaaagtatacaatgaattaaaggaaagaggattgaaatcaagacttattcttcaggtgcacgatgagcttataattgacacacatcctgatgaagttgaaatagtcaaggagcttctaaaatcaataatggaaaatatcataaagttgaaagttcctttagttgtagatatagggcaagggaaaaactggtatgatgcaaaataaaaggatcc

SEQ ID NO: 664 - DNA, 2678 bp, Artificial Sequence
  Description of Artificial Sequence: Synthetic Clostridium thermosulfurogenes DNA Polymerase I789A
atgaaatacctgctgccgaccgctgctgctggtctgctgctcctcgctgcccagccggcgatggccatggcgaaatttttgatcatagatggtaatagcttgatgtacagggcgtattttgccctgcctgatttgatgaacagcgaaggaatgcatacaaatgccatatacggtttttcaatgatgcttcttaaattgctggaggaggagaaaccagactacatagcaatagctttcgataaaaaggcttctacatttaggcacaaggagtacagtgcttataaaggaacccgccagtcgatgccagaagagctgatagaacaggtggatattttaaaagatgtgataaatgcatttaacataaagaccatcgagatagagggatttgaagcagatgatatcattggtacagtatcaaaaattgcttccgaaagtgggatggatgtgcttatcgtcacaggcgacagagatgcgcttcagcttgtgtcggcaaatgtaaaagtaaaaatatgtaaaaaaggcataacgcagatggatgagtacgatgaaaaggcggtctttgaaaagtatgaagtgacgccgcttcaattcatagacttgaaagggcttatgggagacaaatcagacaacattccaggagtgcccaatataggggagaagacggccataaagcttgttaaagaatttggatcaattgaaaatttactgatgaatacagataagttaaaagggaaaataaaagaaaatgtagaaaacaatgcagaattagctgttttaagcaaacggcttgctacgattgagagaaatgttcctattgatattgatttgaatgaatacgcggttaaaaattacgatgtcaataagcttacagagctatttgaaaaattggaattttcaagcctcatctcagatttaaaagatgatagtcgtgatacaaaggatattaaagaatggcctgtaagagattttacatacgttaaaaatgttttaggaaagtttgatgttttgtcattgtatccattcatatatgatggaaagataaaagcagtatcatttgcttgcggtgacggatcgttttttgtagagattgatgattatgacaattttaaattgcttaataatgataagcttacgttgataggacacgatctgaaagattttttagtaaacatttcatactgcggtattgaacttaattgtaagattttagatacggccataatgacttatcttttaaatccgtctgagtcgaattacgacataagtcgcgtattgaaaaaatacttgaaagaggatttgcaaaacatagatgatatagtaggcaagggcaggaataaaaagagctacgatgacattgacaaaaagcttttagtcgattatatgtgttcagccgcatcaaacttatctaagttaaaagataagctcatgtcatttataaaagagatggagatggaagatcttttaaaaaatgtggaaattccgcttattgaagtgctaaaatctatggaggtgtacggctttacattagataaagatgtacttagaagtatttctaaagaaatagatgaaaagacagataagattgtaaaagatatttacgatgctgctggatacgaatttaatattaactctacaaagcagttatcagaatttttgtttgataaactgaatttgccagcaataaaaaagactaaaacagggtattcgactgacatggaagtccttgcagaacttataccgtacaatgacatagtaggagaaataatagaatatagacagcttatgaagcttaaatctacgtacatagatggcttcattcccatcatggatgaaaataatagggtccactctacgtttaaacaaacagttgctgctacagggagaattagctcaacagagcctaatctgcagaacatacctgtaagagaagaatttggcaggaggataagaaaggcatttgtatcaagttatgaagatgggcttataatatctgctgattattctcagattgagctaagggttcttgcacatctttcagaggatgaaaaacttattgagtcatttttgaacaacgaagatatacatttaaggacggcatcggaggtttttaaggtttcgaaagaagaagtgacaagtgaaatgagaaggcgggcgaaagctgtcaactttggtattgtatatggtataagcgattacggcttatctaaagacttaaagatttcgcgaaaagaagcgaaagaatacatagacaattattttgacaggtacaagggcgtcaaaaattacatcgactcaattgtcaaatttgcaaaggaaaatgggtatgttacgactatcttaaataggagaagatacataccggaagctaattcaaaaaattttaaccaaagatcttttggcgagagaatggcaatgaatacacctattcaaggtagcgctgcggatataataaagatgtcgatggttaaagtatacaatgaattaaaggaaagaggattgaaatcaagacttattcttcaggtgcacgatgagcttataattgacacacatcctgatgaagttgaaatagtcaaggagcttctaaaatcaataatggaaaatatcataaagttgaaagttcctttagttgtagatatagggcaagggaaaaactggtatgatgcaaaataaaaggatcc

SEQ ID NO: 665 - DNA, 2678 bp, Artificial Sequence
  Description of Artificial Sequence: Synthetic Clostridium thermosulfurogenes DNA Polymerase I789R
atgaaatacctgctgccgaccgctgctgctggtctgctgctcctcgctgcccagccggcgatggccatggcgaaatttttgatcatagatggtaatagcttgatgtacagggcgtattttgccctgcctgatttgatgaacagcgaaggaatgcatacaaatgccatatacggtttttcaatgatgcttcttaaattgctggaggaggagaaaccagactacatagcaatagctttcgataaaaaggcttctacatttaggcacaaggagtacagtgcttataaaggaacccgccagtcgatgccagaagagctgatagaacaggtggatattttaaaagatgtgataaatgcatttaacataaagaccatcgagatagagggatttgaagcagatgatatcattggtacagtatcaaaaattgcttccgaaagtgggatggatgtgcttatcgtcacaggcgacagagatgcgcttcagcttgtgtcggcaaatgtaaaagtaaaaatatgtaaaaaaggcataacgcagatggatgagtacgatgaaaaggcggtctttgaaaagtatgaagtgacgccgcttcaattcatagacttgaaagggcttatgggagacaaatcagacaacattccaggagtgcccaatataggggagaagacggccataaagcttgttaaagaatttggatcaattgaaaatttactgatgaatacagataagttaaaagggaaaataaaagaaaatgtagaaaacaatgcagaattagctgttttaagcaaacggcttgctacgattgagagaaatgttcctattgatattgatttgaatgaatacgcggttaaaaattacgatgtcaataagcttacagagctatttgaaaaattggaattttcaagcctcatctcagatttaaaagatgatagtcgtgatacaaaggatattaaagaatggcctgtaagagattttacatacgttaaaaatgttttaggaaagtttgatgttttgtcattgtatccattcatatatgatggaaagataaaagcagtatcatttgcttgcggtgacggatcgttttttgtagagattgatgattatgacaattttaaattgcttaataatgataagcttacgttgataggacacgatctgaaagattttttagtaaacatttcatactgcggtattgaacttaattgtaagattttagatacggccataatgacttatcttttaaatccgtctgagtcgaattacgacataagtcgcgtattgaaaaaatacttgaaagaggatttgcaaaacatagatgatatagtaggcaagggcaggaataaaaagagctacgatgacattgacaaaaagcttttagtcgattatatgtgttcagccgcatcaaacttatctaagttaaaagataagctcatgtcatttataaaagagatggagatggaagatcttttaaaaaatgtggaaattccgcttattgaagtgctaaaatctatggaggtgtacggctttacattagataaagatgtacttagaagtatttctaaagaaatagatgaaaagacagataagattgtaaaagatatttacgatgctgctggatacgaatttaatattaactctacaaagcagttatcagaatttttgtttgataaactgaatttgccagcaataaaaaagactaaaacagggtattcgactgacatggaagtccttgcagaacttataccgtacaatgacatagtaggagaaataatagaatatagacagcttatgaagcttaaatctacgtacatagatggcttcattcccatcatggatgaaaataatagggtccactctacgtttaaacaaacagttgctgctacagggagaattagctcaacagagcctaatctgcagaacatacctgtaagagaagaatttggcaggaggataagaaaggcatttgtatcaagttatgaagatgggcttataatatctgctgattattctcagattgagctaagggttcttgcacatctttcagaggatgaaaaacttattgagtcatttttgaacaacgaagatatacatttaaggacggcatcggaggtttttaaggtttcgaaagaagaagtgacaagtgaaatgagaaggcgggcgaaagctgtcaactttggtattgtatatggtataagcgattacggcttatctaaagacttaaagatttcgcgaaaagaagcgaaagaatacatagacaattattttgacaggtacaagggcgtcaaaaattacatcgactcaattgtcaaatttgcaaaggaaaatgggtatgttacgactatcttaaataggagaagatacataccggaacgtaattcaaaaaattttaaccaaagatcttttggcgagagaatggcaatgaatacacctattcaaggtagcgctgcggatataataaagatgtcgatggttaaagtatacaatgaattaaaggaaagaggattgaaatcaagacttattcttcaggtgcacgatgagcttataattgacacacatcctgatgaagttgaaatagtcaaggagcttctaaaatcaataatggaaaatatcataaagttgaaagttcctttagttgtagatatagggcaagggaaaaactggtatgatgcaaaataaaaggatcc

SEQ ID NO: 666 - DNA, 2678 bp, Artificial Sequence
  Description of Artificial Sequence: Synthetic Clostridium thermosulfurogenes DNA Polymerase I789N
atgaaatacctgctgccgaccgctgctgctggtctgctgctcctcgctgcccagccggcgatggccatggcgaaatttttgatcatagatggtaatagcttgatgtacagggcgtattttgccctgcctgatttgatgaacagcgaaggaatgcatacaaatgccatatacggtttttcaatgatgcttcttaaattgctggaggaggagaaaccagactacatagcaatagctttcgataaaaaggcttctacatttaggcacaaggagtacagtgcttataaaggaacccgccagtcgatgccagaagagctgatagaacaggtggatattttaaaagatgtgataaatgcatttaacataaagaccatcgagatagagggatttgaagcagatgatatcattggtacagtatcaaaaattgcttccgaaagtgggatggatgtgcttatcgtcacaggcgacagagatgcgcttcagcttgtgtcggcaaatgtaaaagtaaaaatatgtaaaaaaggcataacgcagatggatgagtacgatgaaaaggcggtctttgaaaagtatgaagtgacgccgcttcaattcatagacttgaaagggcttatgggagacaaatcagacaacattccaggagtgcccaatataggggagaagacggccataaagcttgttaaagaatttggatcaattgaaaatttactgatgaatacagataagttaaaagggaaaataaaagaaaatgtagaaaacaatgcagaattagctgttttaagcaaacggcttgctacgattgagagaaatgttcctattgatattgatttgaatgaatacgcggttaaaaattacgatgtcaataagcttacagagctatttgaaaaattggaattttcaagcctcatctcagatttaaaagatgatagtcgtgatacaaaggatattaaagaatggcctgtaagagattttacatacgttaaaaatgttttaggaaagtttgatgttttgtcattgtatccattcatatatgatggaaagataaaagcagtatcatttgcttgcggtgacggatcgttttttgtagagattgatgattatgacaattttaaattgcttaataatgataagcttacgttgataggacacgatctgaaagattttttagtaaacatttcatactgcggtattgaacttaattgtaagattttagatacggccataatgacttatcttttaaatccgtctgagtcgaattacgacataagtcgcgtattgaaaaaatacttgaaagaggatttgcaaaacatagatgatatagtaggcaagggcaggaataaaaagagctacgatgacattgacaaaaagcttttagtcgattatatgtgttcagccgcatcaaacttatctaagttaaaagataagctcatgtcatttataaaagagatggagatggaagatcttttaaaaaatgtggaaattccgcttattgaagtgctaaaatctatggaggtgtacggctttacattagataaagatgtacttagaagtatttctaaagaaatagatgaaaagacagataagattgtaaaagatatttacgatgctgctggatacgaatttaatattaactctacaaagcagttatcagaatttttgtttgataaactgaatttgccagcaataaaaaagactaaaacagggtattcgactgacatggaagtccttgcagaacttataccgtacaatgacatagtaggagaaataatagaatatagacagcttatgaagcttaaatctacgtacatagatggcttcattcccatcatggatgaaaataatagggtccactctacgtttaaacaaacagttgctgctacagggagaattagctcaacagagcctaatctgcagaacatacctgtaagagaagaatttggcaggaggataagaaaggcatttgtatcaagttatgaagatgggcttataatatctgctgattattctcagattgagctaagggttcttgcacatctttcagaggatgaaaaacttattgagtcatttttgaacaacgaagatatacatttaaggacggcatcggaggtttttaaggtttcgaaagaagaagtgacaagtgaaatgagaaggcgggcgaaagctgtcaactttggtattgtatatggtataagcgattacggcttatctaaagacttaaagatttcgcgaaaagaagcgaaagaatacatagacaattattttgacaggtacaagggcgtcaaaaattacatcgactcaattgtcaaatttgcaaaggaaaatgggtatgttacgactatcttaaataggagaagatacataccggaaaataattcaaaaaattttaaccaaagatcttttggcgagagaatggcaatgaatacacctattcaaggtagcgctgcggatataataaagatgtcgatggttaaagtatacaatgaattaaaggaaagaggattgaaatcaagacttattcttcaggtgcacgatgagcttataattgacacacatcctgatgaagttgaaatagtcaaggagcttctaaaatcaataatggaaaatatcataaagttgaaagttcctttagttgtagatatagggcaagggaaaaactggtatgatgcaaaataaaaggatcc

SEQ ID NO: 667 - DNA, 2678 bp, Artificial Sequence
  Description of Artificial Sequence: Synthetic Clostridium thermosulfurogenes DNA Polymerase I789D
atgaaatacctgctgccgaccgctgctgctggtctgctgctcctcgctgcccagccggcgatggccatggcgaaatttttgatcatagatggtaatagcttgatgtacagggcgtattttgccctgcctgatttgatgaacagcgaaggaatgcatacaaatgccatatacggtttttcaatgatgcttcttaaattgctggaggaggagaaaccagactacatagcaatagctttcgataaaaaggcttctacatttaggcacaaggagtacagtgcttataaaggaacccgccagtcgatgccagaagagctgatagaacaggtggatattttaaaagatgtgataaatgcatttaacataaagaccatcgagatagagggatttgaagcagatgatatcattggtacagtatcaaaaattgcttccgaaagtgggatggatgtgcttatcgtcacaggcgacagagatgcgcttcagcttgtgtcggcaaatgtaaaagtaaaaatatgtaaaaaaggcataacgcagatggatgagtacgatgaaaaggcggtctttgaaaagtatgaagtgacgccgcttcaattcatagacttgaaagggcttatgggagacaaatcagacaacattccaggagtgcccaatataggggagaagacggccataaagcttgttaaagaatttggatcaattgaaaatttactgatgaatacagataagttaaaagggaaaataaaagaaaatgtagaaaacaatgcagaattagctgttttaagcaaacggcttgctacgattgagagaaatgttcctattgatattgatttgaatgaatacgcggttaaaaattacgatgtcaataagcttacagagctatttgaaaaattggaattttcaagcctcatctcagatttaaaagatgatagtcgtgatacaaaggatattaaagaatggcctgtaagagattttacatacgttaaaaatgttttaggaaagtttgatgttttgtcattgtatccattcatatatgatggaaagataaaagcagtatcatttgcttgcggtgacggatcgttttttgtagagattgatgattatgacaattttaaattgcttaataatgataagcttacgttgataggacacgatctgaaagattttttagtaaacatttcatactgcggtattgaacttaattgtaagattttagatacggccataatgacttatcttttaaatccgtctgagtcgaattacgacataagtcgcgtattgaaaaaatacttgaaagaggatttgcaaaacatagatgatatagtaggcaagggcaggaataaaaagagctacgatgacattgacaaaaagcttttagtcgattatatgtgttcagccgcatcaaacttatctaagttaaaagataagctcatgtcatttataaaagagatggagatggaagatcttttaaaaaatgtggaaattccgcttattgaagtgctaaaatctatggaggtgtacggctttacattagataaagatgtacttagaagtatttctaaagaaatagatgaaaagacagataagattgtaaaagatatttacgatgctgctggatacgaatttaatattaactctacaaagcagttatcagaatttttgtttgataaactgaatttgccagcaataaaaaagactaaaacagggtattcgactgacatggaagtccttgcagaacttataccgtacaatgacatagtaggagaaataatagaatatagacagcttatgaagcttaaatctacgtacatagatggcttcattcccatcatggatgaaaataatagggtccactctacgtttaaacaaacagttgctgctacagggagaattagctcaacagagcctaatctgcagaacatacctgtaagagaagaatttggcaggaggataagaaaggcatttgtatcaagttatgaagatgggcttataatatctgctgattattctcagattgagctaagggttcttgcacatctttcagaggatgaaaaacttattgagtcatttttgaacaacgaagatatacatttaaggacggcatcggaggtttttaaggtttcgaaagaagaagtgacaagtgaaatgagaaggcgggcgaaagctgtcaactttggtattgtatatggtataagcgattacggcttatctaaagacttaaagatttcgcgaaaagaagcgaaagaatacatagacaattattttgacaggtacaagggcgtcaaaaattacatcgactcaattgtcaaatttgcaaaggaaaatgggtatgttacgactatcttaaataggagaagatacataccggaagataattcaaaaaattttaaccaaagatcttttggcgagagaatggcaatgaatacacctattcaaggtagcgctgcggatataataaagatgtcgatggttaaagtatacaatgaattaaaggaaagaggattgaaatcaagacttattcttcaggtgcacgatgagcttataattgacacacatcctgatgaagttgaaatagtcaaggagcttctaaaatcaataatggaaaatatcataaagttgaaagttcctttagttgtagatatagggcaagggaaaaactggtatgatgcaaaataaaaggatcc

SEQ ID NO: 668 - DNA, 2678 bp, Artificial Sequence
  Description of Artificial Sequence: Synthetic Clostridium thermosulfurogenes DNA Polymerase I789C
atgaaatacctgctgccgaccgctgctgctggtctgctgctcctcgctgcccagccggcgatggccatggcgaaatttttgatcatagatggtaatagcttgatgtacagggcgtattttgccctgcctgatttgatgaacagcgaaggaatgcatacaaatgccatatacggtttttcaatgatgcttcttaaattgctggaggaggagaaaccagactacatagcaatagctttcgataaaaaggcttctacatttaggcacaaggagtacagtgcttataaaggaacccgccagtcgatgccagaagagctgatagaacaggtggatattttaaaagatgtgataaatgcatttaacataaagaccatcgagatagagggatttgaagcagatgatatcattggtacagtatcaaaaattgcttccgaaagtgggatggatgtgcttatcgtcacaggcgacagagatgcgcttcagcttgtgtcggcaaatgtaaaagtaaaaatatgtaaaaaaggcataacgcagatggatgagtacgatgaaaaggcggtctttgaaaagtatgaagtgacgccgcttcaattcatagacttgaaagggcttatgggagacaaatcagacaacattccaggagtgcccaatataggggagaagacggccataaagcttgttaaagaatttggatcaattgaaaatttactgatgaatacagataagttaaaagggaaaataaaagaaaatgtagaaaacaatgcagaattagctgttttaagcaaacggcttgctacgattgagagaaatgttcctattgatattgatttgaatgaatacgcggttaaaaattacgatgtcaataagcttacagagctatttgaaaaattggaattttcaagcctcatctcagatttaaaagatgatagtcgtgatacaaaggatattaaagaatggcctgtaagagattttacatacgttaaaaatgttttaggaaagtttgatgttttgtcattgtatccattcatatatgatggaaagataaaagcagtatcatttgcttgcggtgacggatcgttttttgtagagattgatgattatgacaattttaaattgcttaataatgataagcttacgttgataggacacgatctgaaagattttttagtaaacatttcatactgcggtattgaacttaattgtaagattttagatacggccataatgacttatcttttaaatccgtctgagtcgaattacgacataagtcgcgtattgaaaaaatacttgaaagaggatttgcaaaacatagatgatatagtaggcaagggcaggaataaaaagagctacgatgacattgacaaaaagcttttagtcgattatatgtgttcagccgcatcaaacttatctaagttaaaagataagctcatgtcatttataaaagagatggagatggaagatcttttaaaaaatgtggaaattccgcttattgaagtgctaaaatctatggaggtgtacggctttacattagataaagatgtacttagaagtatttctaaagaaatagatgaaaagacagataagattgtaaaagatatttacgatgctgctggatacgaatttaatattaactctacaaagcagttatcagaatttttgtttgataaactgaatttgccagcaataaaaaagactaaaacagggtattcgactgacatggaagtccttgcagaacttataccgtacaatgacatagtaggagaaataatagaatatagacagcttatgaagcttaaatctacgtacatagatggcttcattcccatcatggatgaaaataatagggtccactctacgtttaaacaaacagttgctgctacagggagaattagctcaacagagcctaatctgcagaacatacctgtaagagaagaatttggcaggaggataagaaaggcatttgtatcaagttatgaagatgggcttataatatctgctgattattctcagattgagctaagggttcttgcacatctttcagaggatgaaaaacttattgagtcatttttgaacaacgaagatatacatttaaggacggcatcggaggtttttaaggtttcgaaagaagaagtgacaagtgaaatgagaaggcgggcgaaagctgtcaactttggtattgtatatggtataagcgattacggcttatctaaagacttaaagatttcgcgaaaagaagcgaaagaatacatagacaattattttgacaggtacaagggcgtcaaaaattacatcgactcaattgtcaaatttgcaaaggaaaatgggtatgttacgactatcttaaataggagaagatacataccggaatgtaattcaaaaaattttaaccaaagatcttttggcgagagaatggcaatgaatacacctattcaaggtagcgctgcggatataataaagatgtcgatggttaaagtatacaatgaattaaaggaaagaggattgaaatcaagacttattcttcaggtgcacgatgagcttataattgacacacatcctgatgaagttgaaatagtcaaggagcttctaaaatcaataatggaaaatatcataaagttgaaagttcctttagttgtagatatagggcaagggaaaaactggtatgatgcaaaataaaaggatcc

SEQ ID NO: 669 - DNA, 2678 bp, Artificial Sequence
  Description of Artificial Sequence: Synthetic Clostridium thermosulfurogenes DNA Polymerase I789E
atgaaatacctgctgccgaccgctgctgctggtctgctgctcctcgctgcccagccggcgatggccatggcgaaatttttgatcatagatggtaatagcttgatgtacagggcgtattttgccctgcctgatttgatgaacagcgaaggaatgcatacaaatgccatatacggtttttcaatgatgcttcttaaattgctggaggaggagaaaccagactacatagcaatagctttcgataaaaaggcttctacatttaggcacaaggagtacagtgcttataaaggaacccgccagtcgatgccagaagagctgatagaacaggtggatattttaaaagatgtgataaatgcatttaacataaagaccatcgagatagagggatttgaagcagatgatatcattggtacagtatcaaaaattgcttccgaaagtgggatggatgtgcttatcgtcacaggcgacagagatgcgcttcagcttgtgtcggcaaatgtaaaagtaaaaatatgtaaaaaaggcataacgcagatggatgagtacgatgaaaaggcggtctttgaaaagtatgaagtgacgccgcttcaattcatagacttgaaagggcttatgggagacaaatcagacaacattccaggagtgcccaatataggggagaagacggccataaagcttgttaaagaatttggatcaattgaaaatttactgatgaatacagataagttaaaagggaaaataaaagaaaatgtagaaaacaatgcagaattagctgttttaagcaaacggcttgctacgattgagagaaatgttcctattgatattgatttgaatgaatacgcggttaaaaattacgatgtcaataagcttacagagctatttgaaaaattggaattttcaagcctcatctcagatttaaaagatgatagtcgtgatacaaaggatattaaagaatggcctgtaagagattttacatacgttaaaaatgttttaggaaagtttgatgttttgtcattgtatccattcatatatgatggaaagataaaagcagtatcatttgcttgcggtgacggatcgttttttgtagagattgatgattatgacaattttaaattgcttaataatgataagcttacgttgataggacacgatctgaaagattttttagtaaacatttcatactgcggtattgaacttaattgtaagattttagatacggccataatgacttatcttttaaatccgtctgagtcgaattacgacataagtcgcgtattgaaaaaatacttgaaagaggatttgcaaaacatagatgatatagtaggcaagggcaggaataaaaagagctacgatgacattgacaaaaagcttttagtcgattatatgtgttcagccgcatcaaacttatctaagttaaaagataagctcatgtcatttataaaagagatggagatggaagatcttttaaaaaatgtggaaattccgcttattgaagtgctaaaatctatggaggtgtacggctttacattagataaagatgtacttagaagtatttctaaagaaatagatgaaaagacagataagattgtaaaagatatttacgatgctgctggatacgaatttaatattaactctacaaagcagttatcagaatttttgtttgataaactgaatttgccagcaataaaaaagactaaaacagggtattcgactgacatggaagtccttgcagaacttataccgtacaatgacatagtaggagaaataatagaatatagacagcttatgaagcttaaatctacgtacatagatggcttcattcccatcatggatgaaaataatagggtccactctacgtttaaacaaacagttgctgctacagggagaattagctcaacagagcctaatctgcagaacatacctgtaagagaagaatttggcaggaggataagaaaggcatttgtatcaagttatgaagatgggcttataatatctgctgattattctcagattgagctaagggttcttgcacatctttcagaggatgaaaaacttattgagtcatttttgaacaacgaagatatacatttaaggacggcatcggaggtttttaaggtttcgaaagaagaagtgacaagtgaaatgagaaggcgggcgaaagctgtcaactttggtattgtatatggtataagcgattacggcttatctaaagacttaaagatttcgcgaaaagaagcgaaagaatacatagacaattattttgacaggtacaagggcgtcaaaaattacatcgactcaattgtcaaatttgcaaaggaaaatgggtatgttacgactatcttaaataggagaagatacataccggaagaaaattcaaaaaattttaaccaaagatcttttggcgagagaatggcaatgaatacacctattcaaggtagcgctgcggatataataaagatgtcgatggttaaagtatacaatgaattaaaggaaagaggattgaaatcaagacttattcttcaggtgcacgatgagcttataattgacacacatcctgatgaagttgaaatagtcaaggagcttctaaaatcaataatggaaaatatcataaagttgaaagttcctttagttgtagatatagggcaagggaaaaactggtatgatgcaaaataaaaggatcc

SEQ ID NO: 670 - DNA, 2678 bp, Artificial Sequence
  Description of Artificial Sequence: Synthetic Clostridium thermosulfurogenes DNA Polymerase I789Q
atgaaatacctgctgccgaccgctgctgctggtctgctgctcctcgctgcccagccggcgatggccatggcgaaatttttgatcatagatggtaatagcttgatgtacagggcgtattttgccctgcctgatttgatgaacagcgaaggaatgcatacaaatgccatatacggtttttcaatgatgcttcttaaattgctggaggaggagaaaccagactacatagcaatagctttcgataaaaaggcttctacatttaggcacaaggagtacagtgcttataaaggaacccgccagtcgatgccagaagagctgatagaacaggtggatattttaaaagatgtgataaatgcatttaacataaagaccatcgagatagagggatttgaagcagatgatatcattggtacagtatcaaaaattgcttccgaaagtgggatggatgtgcttatcgtcacaggcgacagagatgcgcttcagcttgtgtcggcaaatgtaaaagtaaaaatatgtaaaaaaggcataacgcagatggatgagtacgatgaaaaggcggtctttgaaaagtatgaagtgacgccgcttcaattcatagacttgaaagggcttatgggagacaaatcagacaacattccaggagtgcccaatataggggagaagacggccataaagcttgttaaagaatttggatcaattgaaaatttactgatgaatacagataagttaaaagggaaaataaaagaaaatgtagaaaacaatgcagaattagctgttttaagcaaacggcttgctacgattgagagaaatgttcctattgatattgatttgaatgaatacgcggttaaaaattacgatgtcaataagcttacagagctatttgaaaaattggaattttcaagcctcatctcagatttaaaagatgatagtcgtgatacaaaggatattaaagaatggcctgtaagagattttacatacgttaaaaatgttttaggaaagtttgatgttttgtcattgtatccattcatatatgatggaaagataaaagcagtatcatttgcttgcggtgacggatcgttttttgtagagattgatgattatgacaattttaaattgcttaataatgataagcttacgttgataggacacgatctgaaagattttttagtaaacatttcatactgcggtattgaacttaattgtaagattttagatacggccataatgacttatcttttaaatccgtctgagtcgaattacgacataagtcgcgtattgaaaaaatacttgaaagaggatttgcaaaacatagatgatatagtaggcaagggcaggaataaaaagagctacgatgacattgacaaaaagcttttagtcgattatatgtgttcagccgcatcaaacttatctaagttaaaagataagctcatgtcatttataaaagagatggagatggaagatcttttaaaaaatgtggaaattccgcttattgaagtgctaaaatctatggaggtgtacggctttacattagataaagatgtacttagaagtatttctaaagaaatagatgaaaagacagataagattgtaaaagatatttacgatgctgctggatacgaatttaatattaactctacaaagcagttatcagaatttttgtttgataaactgaatttgccagcaataaaaaagactaaaacagggtattcgactgacatggaagtccttgcagaacttataccgtacaatgacatagtaggagaaataatagaatatagacagcttatgaagcttaaatctacgtacatagatggcttcattcccatcatggatgaaaataatagggtccactctacgtttaaacaaacagttgctgctacagggagaattagctcaacagagcctaatctgcagaacatacctgtaagagaagaatttggcaggaggataagaaaggcatttgtatcaagttatgaagatgggcttataatatctgctgattattctcagattgagctaagggttcttgcacatctttcagaggatgaaaaacttattgagtcatttttgaacaacgaagatatacatttaaggacggcatcggaggtttttaaggtttcgaaagaagaagtgacaagtgaaatgagaaggcgggcgaaagctgtcaactttggtattgtatatggtataagcgattacggcttatctaaagacttaaagatttcgcgaaaagaagcgaaagaatacatagacaattattttgacaggtacaagggcgtcaaaaattacatcgactcaattgtcaaatttgcaaaggaaaatgggtatgttacgactatcttaaataggagaagatacataccggaacaaaattcaaaaaattttaaccaaagatcttttggcgagagaatggcaatgaatacacctattcaaggtagcgctgcggatataataaagatgtcgatggttaaagtatacaatgaattaaaggaaagaggattgaaatcaagacttattcttcaggtgcacgatgagcttataattgacacacatcctgatgaagttgaaatagtcaaggagcttctaaaatcaataatggaaaatatcataaagttgaaagttcctttagttgtagatatagggcaagggaaaaactggtatgatgcaaaataaaaggatcc

SEQ ID NO: 671 - DNA, 2678 bp, Artificial Sequence
  Description of Artificial Sequence: Synthetic Clostridium thermosulfurogenes DNA Polymerase I789G
atgaaatacctgctgccgaccgctgctgctggtctgctgctcctcgctgcccagccggcgatggccatggcgaaatttttgatcatagatggtaatagcttgatgtacagggcgtattttgccctgcctgatttgatgaacagcgaaggaatgcatacaaatgccatatacggtttttcaatgatgcttcttaaattgctggaggaggagaaaccagactacatagcaatagctttcgataaaaaggcttctacatttaggcacaaggagtacagtgcttataaaggaacccgccagtcgatgccagaagagctgatagaacaggtggatattttaaaagatgtgataaatgcatttaacataaagaccatcgagatagagggatttgaagcagatgatatcattggtacagtatcaaaaattgcttccgaaagtgggatggatgtgcttatcgtcacaggcgacagagatgcgcttcagcttgtgtcggcaaatgtaaaagtaaaaatatgtaaaaaaggcataacgcagatggatgagtacgatgaaaaggcggtctttgaaaagtatgaagtgacgccgcttcaattcatagacttgaaagggcttatgggagacaaatcagacaacattccaggagtgcccaatataggggagaagacggccataaagcttgttaaagaatttggatcaattgaaaatttactgatgaatacagataagttaaaagggaaaataaaagaaaatgtagaaaacaatgcagaattagctgttttaagcaaacggcttgctacgattgagagaaatgttcctattgatattgatttgaatgaatacgcggttaaaaattacgatgtcaataagcttacagagctatttgaaaaattggaattttcaagcctcatctcagatttaaaagatgatagtcgtgatacaaaggatattaaagaatggcctgtaagagattttacatacgttaaaaatgttttaggaaagtttgatgttttgtcattgtatccattcatatatgatggaaagataaaagcagtatcatttgcttgcggtgacggatcgttttttgtagagattgatgattatgacaattttaaattgcttaataatgataagcttacgttgataggacacgatctgaaagattttttagtaaacatttcatactgcggtattgaacttaattgtaagattttagatacggccataatgacttatcttttaaatccgtctgagtcgaattacgacataagtcgcgtattgaaaaaatacttgaaagaggatttgcaaaacatagatgatatagtaggcaagggcaggaataaaaagagctacgatgacattgacaaaaagcttttagtcgattatatgtgttcagccgcatcaaacttatctaagttaaaagataagctcatgtcatttataaaagagatggagatggaagatcttttaaaaaatgtggaaattccgcttattgaagtgctaaaatctatggaggtgtacggctttacattagataaagatgtacttagaagtatttctaaagaaatagatgaaaagacagataagattgtaaaagatatttacgatgctgctggatacgaatttaatattaactctacaaagcagttatcagaatttttgtttgataaactgaatttgccagcaataaaaaagactaaaacagggtattcgactgacatggaagtccttgcagaacttataccgtacaatgacatagtaggagaaataatagaatatagacagcttatgaagcttaaatctacgtacatagatggcttcattcccatcatggatgaaaataatagggtccactctacgtttaaacaaacagttgctgctacagggagaattagctcaacagagcctaatctgcagaacatacctgtaagagaagaatttggcaggaggataagaaaggcatttgtatcaagttatgaagatgggcttataatatctgctgattattctcagattgagctaagggttcttgcacatctttcagaggatgaaaaacttattgagtcatttttgaacaacgaagatatacatttaaggacggcatcggaggtttttaaggtttcgaaagaagaagtgacaagtgaaatgagaaggcgggcgaaagctgtcaactttggtattgtatatggtataagcgattacggcttatctaaagacttaaagatttcgcgaaaagaagcgaaagaatacatagacaattattttgacaggtacaagggcgtcaaaaattacatcgactcaattgtcaaatttgcaaaggaaaatgggtatgttacgactatcttaaataggagaagatacataccggaaggtaattcaaaaaattttaaccaaagatcttttggcgagagaatggcaatgaatacacctattcaaggtagcgctgcggatataataaagatgtcgatggttaaagtatacaatgaattaaaggaaagaggattgaaatcaagacttattcttcaggtgcacgatgagcttataattgacacacatcctgatgaagttgaaatagtcaaggagcttctaaaatcaataatggaaaatatcataaagttgaaagttcctttagttgtagatatagggcaagggaaaaactggtatgatgcaaaataaaaggatcc

SEQ ID NO: 672 - DNA, 2678 bp, Artificial Sequence
  Description of Artificial Sequence: Synthetic Clostridium thermosulfurogenes DNA Polymerase I789H
atgaaatacctgctgccgaccgctgctgctggtctgctgctcctcgctgcccagccggcgatggccatggcgaaatttttgatcatagatggtaatagcttgatgtacagggcgtattttgccctgcctgatttgatgaacagcgaaggaatgcatacaaatgccatatacggtttttcaatgatgcttcttaaattgctggaggaggagaaaccagactacatagcaatagctttcgataaaaaggcttctacatttaggcacaaggagtacagtgcttataaaggaacccgccagtcgatgccagaagagctgatagaacaggtggatattttaaaagatgtgataaatgcatttaacataaagaccatcgagatagagggatttgaagcagatgatatcattggtacagtatcaaaaattgcttccgaaagtgggatggatgtgcttatcgtcacaggcgacagagatgcgcttcagcttgtgtcggcaaatgtaaaagtaaaaatatgtaaaaaaggcataacgcagatggatgagtacgatgaaaaggcggtctttgaaaagtatgaagtgacgccgcttcaattcatagacttgaaagggcttatgggagacaaatcagacaacattccaggagtgcccaatataggggagaagacggccataaagcttgttaaagaatttggatcaattgaaaatttactgatgaatacagataagttaaaagggaaaataaaagaaaatgtagaaaacaatgcagaattagctgttttaagcaaacggcttgctacgattgagagaaatgttcctattgatattgatttgaatgaatacgcggttaaaaattacgatgtcaataagcttacagagctatttgaaaaattggaattttcaagcctcatctcagatttaaaagatgatagtcgtgatacaaaggatattaaagaatggcctgtaagagattttacatacgttaaaaatgttttaggaaagtttgatgttttgtcattgtatccattcatatatgatggaaagataaaagcagtatcatttgcttgcggtgacggatcgttttttgtagagattgatgattatgacaattttaaattgcttaataatgataagcttacgttgataggacacgatctgaaagattttttagtaaacatttcatactgcggtattgaacttaattgtaagattttagatacggccataatgacttatcttttaaatccgtctgagtcgaattacgacataagtcgcgtattgaaaaaatacttgaaagaggatttgcaaaacatagatgatatagtaggcaagggcaggaataaaaagagctacgatgacattgacaaaaagcttttagtcgattatatgtgttcagccgcatcaaacttatctaagttaaaagataagctcatgtcatttataaaagagatggagatggaagatcttttaaaaaatgtggaaattccgcttattgaagtgctaaaatctatggaggtgtacggctttacattagataaagatgtacttagaagtatttctaaagaaatagatgaaaagacagataagattgtaaaagatatttacgatgctgctggatacgaatttaatattaactctacaaagcagttatcagaatttttgtttgataaactgaatttgccagcaataaaaaagactaaaacagggtattcgactgacatggaagtccttgcagaacttataccgtacaatgacatagtaggagaaataatagaatatagacagcttatgaagcttaaatctacgtacatagatggcttcattcccatcatggatgaaaataatagggtccactctacgtttaaacaaacagttgctgctacagggagaattagctcaacagagcctaatctgcagaacatacctgtaagagaagaatttggcaggaggataagaaaggcatttgtatcaagttatgaagatgggcttataatatctgctgattattctcagattgagctaagggttcttgcacatctttcagaggatgaaaaacttattgagtcatttttgaacaacgaagatatacatttaaggacggcatcggaggtttttaaggtttcgaaagaagaagtgacaagtgaaatgagaaggcgggcgaaagctgtcaactttggtattgtatatggtataagcgattacggcttatctaaagacttaaagatttcgcgaaaagaagcgaaagaatacatagacaattattttgacaggtacaagggcgtcaaaaattacatcgactcaattgtcaaatttgcaaaggaaaatgggtatgttacgactatcttaaataggagaagatacataccggaacataattcaaaaaattttaaccaaagatcttttggcgagagaatggcaatgaatacacctattcaaggtagcgctgcggatataataaagatgtcgatggttaaagtatacaatgaattaaaggaaagaggattgaaatcaagacttattcttcaggtgcacgatgagcttataattgacacacatcctgatgaagttgaaatagtcaaggagcttctaaaatcaataatggaaaatatcataaagttgaaagttcctttagttgtagatatagggcaagggaaaaactggtatgatgcaaaataaaaggatcc

SEQ ID NO: 673 - DNA, 2678 bp, Artificial Sequence
  Description of Artificial Sequence: Synthetic Clostridium thermosulfurogenes DNA Polymerase I789L
atgaaatacctgctgccgaccgctgctgctggtctgctgctcctcgctgcccagccggcgatggccatggcgaaatttttgatcatagatggtaatagcttgatgtacagggcgtattttgccctgcctgatttgatgaacagcgaaggaatgcatacaaatgccatatacggtttttcaatgatgcttcttaaattgctggaggaggagaaaccagactacatagcaatagctttcgataaaaaggcttctacatttaggcacaaggagtacagtgcttataaaggaacccgccagtcgatgccagaagagctgatagaacaggtggatattttaaaagatgtgataaatgcatttaacataaagaccatcgagatagagggatttgaagcagatgatatcattggtacagtatcaaaaattgcttccgaaagtgggatggatgtgcttatcgtcacaggcgacagagatgcgcttcagcttgtgtcggcaaatgtaaaagtaaaaatatgtaaaaaaggcataacgcagatggatgagtacgatgaaaaggcggtctttgaaaagtatgaagtgacgccgcttcaattcatagacttgaaagggcttatgggagacaaatcagacaacattccaggagtgcccaatataggggagaagacggccataaagcttgttaaagaatttggatcaattgaaaatttactgatgaatacagataagttaaaagggaaaataaaagaaaatgtagaaaacaatgcagaattagctgttttaagcaaacggcttgctacgattgagagaaatgttcctattgatattgatttgaatgaatacgcggttaaaaattacgatgtcaataagcttacagagctatttgaaaaattggaattttcaagcctcatctcagatttaaaagatgatagtcgtgatacaaaggatattaaagaatggcctgtaagagattttacatacgttaaaaatgttttaggaaagtttgatgttttgtcattgtatccattcatatatgatggaaagataaaagcagtatcatttgcttgcggtgacggatcgttttttgtagagattgatgattatgacaattttaaattgcttaataatgataagcttacgttgataggacacgatctgaaagattttttagtaaacatttcatactgcggtattgaacttaattgtaagattttagatacggccataatgacttatcttttaaatccgtctgagtcgaattacgacataagtcgcgtattgaaaaaatacttgaaagaggatttgcaaaacatagatgatatagtaggcaagggcaggaataaaaagagctacgatgacattgacaaaaagcttttagtcgattatatgtgttcagccgcatcaaacttatctaagttaaaagataagctcatgtcatttataaaagagatggagatggaagatcttttaaaaaatgtggaaattccgcttattgaagtgctaaaatctatggaggtgtacggctttacattagataaagatgtacttagaagtatttctaaagaaatagatgaaaagacagataagattgtaaaagatatttacgatgctgctggatacgaatttaatattaactctacaaagcagttatcagaatttttgtttgataaactgaatttgccagcaataaaaaagactaaaacagggtattcgactgacatggaagtccttgcagaacttataccgtacaatgacatagtaggagaaataatagaatatagacagcttatgaagcttaaatctacgtacatagatggcttcattcccatcatggatgaaaataatagggtccactctacgtttaaacaaacagttgctgctacagggagaattagctcaacagagcctaatctgcagaacatacctgtaagagaagaatttggcaggaggataagaaaggcatttgtatcaagttatgaagatgggcttataatatctgctgattattctcagattgagctaagggttcttgcacatctttcagaggatgaaaaacttattgagtcatttttgaacaacgaagatatacatttaaggacggcatcggaggtttttaaggtttcgaaagaagaagtgacaagtgaaatgagaaggcgggcgaaagctgtcaactttggtattgtatatggtataagcgattacggcttatctaaagacttaaagatttcgcgaaaagaagcgaaagaatacatagacaattattttgacaggtacaagggcgtcaaaaattacatcgactcaattgtcaaatttgcaaaggaaaatgggtatgttacgactatcttaaataggagaagatacataccggaacttaattcaaaaaattttaaccaaagatcttttggcgagagaatggcaatgaatacacctattcaaggtagcgctgcggatataataaagatgtcgatggttaaagtatacaatgaattaaaggaaagaggattgaaatcaagacttattcttcaggtgcacgatgagcttataattgacacacatcctgatgaagttgaaatagtcaaggagcttctaaaatcaataatggaaaatatcataaagttgaaagttcctttagttgtagatatagggcaagggaaaaactggtatgatgcaaaataaaaggatcc

SEQ ID NO: 674 - DNA, 2678 bp, Artificial Sequence
  Description of Artificial Sequence: Synthetic Clostridium thermosulfurogenes DNA Polymerase I789K
atgaaatacctgctgccgaccgctgctgctggtctgctgctcctcgctgcccagccggcgatggccatggcgaaatttttgatcatagatggtaatagcttgatgtacagggcgtattttgccctgcctgatttgatgaacagcgaaggaatgcatacaaatgccatatacggtttttcaatgatgcttcttaaattgctggaggaggagaaaccagactacatagcaatagctttcgataaaaaggcttctacatttaggcacaaggagtacagtgcttataaaggaacccgccagtcgatgccagaagagctgatagaacaggtggatattttaaaagatgtgataaatgcatttaacataaagaccatcgagatagagggatttgaagcagatgatatcattggtacagtatcaaaaattgcttccgaaagtgggatggatgtgcttatcgtcacaggcgacagagatgcgcttcagcttgtgtcggcaaatgtaaaagtaaaaatatgtaaaaaaggcataacgcagatggatgagtacgatgaaaaggcggtctttgaaaagtatgaagtgacgccgcttcaattcatagacttgaaagggcttatgggagacaaatcagacaacattccaggagtgcccaatataggggagaagacggccataaagcttgttaaagaatttggatcaattgaaaatttactgatgaatacagataagttaaaagggaaaataaaagaaaatgtagaaaacaatgcagaattagctgttttaagcaaacggcttgctacgattgagagaaatgttcctattgatattgatttgaatgaatacgcggttaaaaattacgatgtcaataagcttacagagctatttgaaaaattggaattttcaagcctcatctcagatttaaaagatgatagtcgtgatacaaaggatattaaagaatggcctgtaagagattttacatacgttaaaaatgttttaggaaagtttgatgttttgtcattgtatccattcatatatgatggaaagataaaagcagtatcatttgcttgcggtgacggatcgttttttgtagagattgatgattatgacaattttaaattgcttaataatgataagcttacgttgataggacacgatctgaaagattttttagtaaacatttcatactgcggtattgaacttaattgtaagattttagatacggccataatgacttatcttttaaatccgtctgagtcgaattacgacataagtcgcgtattgaaaaaatacttgaaagaggatttgcaaaacatagatgatatagtaggcaagggcaggaataaaaagagctacgatgacattgacaaaaagcttttagtcgattatatgtgttcagccgcatcaaacttatctaagttaaaagataagctcatgtcatttataaaagagatggagatggaagatcttttaaaaaatgtggaaattccgcttattgaagtgctaaaatctatggaggtgtacggctttacattagataaagatgtacttagaagtatttctaaagaaatagatgaaaagacagataagattgtaaaagatatttacgatgctgctggatacgaatttaatattaactctacaaagcagttatcagaatttttgtttgataaactgaatttgccagcaataaaaaagactaaaacagggtattcgactgacatggaagtccttgcagaacttataccgtacaatgacatagtaggagaaataatagaatatagacagcttatgaagcttaaatctacgtacatagatggcttcattcccatcatggatgaaaataatagggtccactctacgtttaaacaaacagttgctgctacagggagaattagctcaacagagcctaatctgcagaacatacctgtaagagaagaatttggcaggaggataagaaaggcatttgtatcaagttatgaagatgggcttataatatctgctgattattctcagattgagctaagggttcttgcacatctttcagaggatgaaaaacttattgagtcatttttgaacaacgaagatatacatttaaggacggcatcggaggtttttaaggtttcgaaagaagaagtgacaagtgaaatgagaaggcgggcgaaagctgtcaactttggtattgtatatggtataagcgattacggcttatctaaagacttaaagatttcgcgaaaagaagcgaaagaatacatagacaattattttgacaggtacaagggcgtcaaaaattacatcgactcaattgtcaaatttgcaaaggaaaatgggtatgttacgactatcttaaataggagaagatacataccggaaaaaaattcaaaaaattttaaccaaagatcttttggcgagagaatggcaatgaatacacctattcaaggtagcgctgcggatataataaagatgtcgatggttaaagtatacaatgaattaaaggaaagaggattgaaatcaagacttattcttcaggtgcacgatgagcttataattgacacacatcctgatgaagttgaaatagtcaaggagcttctaaaatcaataatggaaaatatcataaagttgaaagttcctttagttgtagatatagggcaagggaaaaactggtatgatgcaaaataaaaggatcc

SEQ ID NO: 675 - DNA, 2678 bp, Artificial Sequence
  Description of Artificial Sequence: Synthetic Clostridium thermosulfurogenes DNA Polymerase I789M
atgaaatacctgctgccgaccgctgctgctggtctgctgctcctcgctgcccagccggcgatggccatggcgaaatttttgatcatagatggtaatagcttgatgtacagggcgtattttgccctgcctgatttgatgaacagcgaaggaatgcatacaaatgccatatacggtttttcaatgatgcttcttaaattgctggaggaggagaaaccagactacatagcaatagctttcgataaaaaggcttctacatttaggcacaaggagtacagtgcttataaaggaacccgccagtcgatgccagaagagctgatagaacaggtggatattttaaaagatgtgataaatgcatttaacataaagaccatcgagatagagggatttgaagcagatgatatcattggtacagtatcaaaaattgcttccgaaagtgggatggatgtgcttatcgtcacaggcgacagagatgcgcttcagcttgtgtcggcaaatgtaaaagtaaaaatatgtaaaaaaggcataacgcagatggatgagtacgatgaaaaggcggtctttgaaaagtatgaagtgacgccgcttcaattcatagacttgaaagggcttatgggagacaaatcagacaacattccaggagtgcccaatataggggagaagacggccataaagcttgttaaagaatttggatcaattgaaaatttactgatgaatacagataagttaaaagggaaaataaaagaaaatgtagaaaacaatgcagaattagctgttttaagcaaacggcttgctacgattgagagaaatgttcctattgatattgatttgaatgaatacgcggttaaaaattacgatgtcaataagcttacagagctatttgaaaaattggaattttcaagcctcatctcagatttaaaagatgatagtcgtgatacaaaggatattaaagaatggcctgtaagagattttacatacgttaaaaatgttttaggaaagtttgatgttttgtcattgtatccattcatatatgatggaaagataaaagcagtatcatttgcttgcggtgacggatcgttttttgtagagattgatgattatgacaattttaaattgcttaataatgataagcttacgttgataggacacgatctgaaagattttttagtaaacatttcatactgcggtattgaacttaattgtaagattttagatacggccataatgacttatcttttaaatccgtctgagtcgaattacgacataagtcgcgtattgaaaaaatacttgaaagaggatttgcaaaacatagatgatatagtaggcaagggcaggaataaaaagagctacgatgacattgacaaaaagcttttagtcgattatatgtgttcagccgcatcaaacttatctaagttaaaagataagctcatgtcatttataaaagagatggagatggaagatcttttaaaaaatgtggaaattccgcttattgaagtgctaaaatctatggaggtgtacggctttacattagataaagatgtacttagaagtatttctaaagaaatagatgaaaagacagataagattgtaaaagatatttacgatgctgctggatacgaatttaatattaactctacaaagcagttatcagaatttttgtttgataaactgaatttgccagcaataaaaaagactaaaacagggtattcgactgacatggaagtccttgcagaacttataccgtacaatgacatagtaggagaaataatagaatatagacagcttatgaagcttaaatctacgtacatagatggcttcattcccatcatggatgaaaataatagggtccactctacgtttaaacaaacagttgctgctacagggagaattagctcaacagagcctaatctgcagaacatacctgtaagagaagaatttggcaggaggataagaaaggcatttgtatcaagttatgaagatgggcttataatatctgctgattattctcagattgagctaagggttcttgcacatctttcagaggatgaaaaacttattgagtcatttttgaacaacgaagatatacatttaaggacggcatcggaggtttttaaggtttcgaaagaagaagtgacaagtgaaatgagaaggcgggcgaaagctgtcaactttggtattgtatatggtataagcgattacggcttatctaaagacttaaagatttcgcgaaaagaagcgaaagaatacatagacaattattttgacaggtacaagggcgtcaaaaattacatcgactcaattgtcaaatttgcaaaggaaaatgggtatgttacgactatcttaaataggagaagatacataccggaaatgaattcaaaaaattttaaccaaagatcttttggcgagagaatggcaatgaatacacctattcaaggtagcgctgcggatataataaagatgtcgatggttaaagtatacaatgaattaaaggaaagaggattgaaatcaagacttattcttcaggtgcacgatgagcttataattgacacacatcctgatgaagttgaaatagtcaaggagcttctaaaatcaataatggaaaatatcataaagttgaaagttcctttagttgtagatatagggcaagggaaaaactggtatgatgcaaaataaaaggatcc

SEQ ID NO: 676 - DNA, 2678 bp, Artificial Sequence
  Description of Artificial Sequence: Synthetic Clostridium thermosulfurogenes DNA Polymerase I789F
atgaaatacctgctgccgaccgctgctgctggtctgctgctcctcgctgcccagccggcgatggccatggcgaaatttttgatcatagatggtaatagcttgatgtacagggcgtattttgccctgcctgatttgatgaacagcgaaggaatgcatacaaatgccatatacggtttttcaatgatgcttcttaaattgctggaggaggagaaaccagactacatagcaatagctttcgataaaaaggcttctacatttaggcacaaggagtacagtgcttataaaggaacccgccagtcgatgccagaagagctgatagaacaggtggatattttaaaagatgtgataaatgcatttaacataaagaccatcgagatagagggatttgaagcagatgatatcattggtacagtatcaaaaattgcttccgaaagtgggatggatgtgcttatcgtcacaggcgacagagatgcgcttcagcttgtgtcggcaaatgtaaaagtaaaaatatgtaaaaaaggcataacgcagatggatgagtacgatgaaaaggcggtctttgaaaagtatgaagtgacgccgcttcaattcatagacttgaaagggcttatgggagacaaatcagacaacattccaggagtgcccaatataggggagaagacggccataaagcttgttaaagaatttggatcaattgaaaatttactgatgaatacagataagttaaaagggaaaataaaagaaaatgtagaaaacaatgcagaattagctgttttaagcaaacggcttgctacgattgagagaaatgttcctattgatattgatttgaatgaatacgcggttaaaaattacgatgtcaataagcttacagagctatttgaaaaattggaattttcaagcctcatctcagatttaaaagatgatagtcgtgatacaaaggatattaaagaatggcctgtaagagattttacatacgttaaaaatgttttaggaaagtttgatgttttgtcattgtatccattcatatatgatggaaagataaaagcagtatcatttgcttgcggtgacggatcgttttttgtagagattgatgattatgacaattttaaattgcttaataatgataagcttacgttgataggacacgatctgaaagattttttagtaaacatttcatactgcggtattgaacttaattgtaagattttagatacggccataatgacttatcttttaaatccgtctgagtcgaattacgacataagtcgcgtattgaaaaaatacttgaaagaggatttgcaaaacatagatgatatagtaggcaagggcaggaataaaaagagctacgatgacattgacaaaaagcttttagtcgattatatgtgttcagccgcatcaaacttatctaagttaaaagataagctcatgtcatttataaaagagatggagatggaagatcttttaaaaaatgtggaaattccgcttattgaagtgctaaaatctatggaggtgtacggctttacattagataaagatgtacttagaagtatttctaaagaaatagatgaaaagacagataagattgtaaaagatatttacgatgctgctggatacgaatttaatattaactctacaaagcagttatcagaatttttgtttgataaactgaatttgccagcaataaaaaagactaaaacagggtattcgactgacatggaagtccttgcagaacttataccgtacaatgacatagtaggagaaataatagaatatagacagcttatgaagcttaaatctacgtacatagatggcttcattcccatcatggatgaaaataatagggtccactctacgtttaaacaaacagttgctgctacagggagaattagctcaacagagcctaatctgcagaacatacctgtaagagaagaatttggcaggaggataagaaaggcatttgtatcaagttatgaagatgggcttataatatctgctgattattctcagattgagctaagggttcttgcacatctttcagaggatgaaaaacttattgagtcatttttgaacaacgaagatatacatttaaggacggcatcggaggtttttaaggtttcgaaagaagaagtgacaagtgaaatgagaaggcgggcgaaagctgtcaactttggtattgtatatggtataagcgattacggcttatctaaagacttaaagatttcgcgaaaagaagcgaaagaatacatagacaattattttgacaggtacaagggcgtcaaaaattacatcgactcaattgtcaaatttgcaaaggaaaatgggtatgttacgactatcttaaataggagaagatacataccggaatttaattcaaaaaattttaaccaaagatcttttggcgagagaatggcaatgaatacacctattcaaggtagcgctgcggatataataaagatgtcgatggttaaagtatacaatgaattaaaggaaagaggattgaaatcaagacttattcttcaggtgcacgatgagcttataattgacacacatcctgatgaagttgaaatagtcaaggagcttctaaaatcaataatggaaaatatcataaagttgaaagttcctttagttgtagatatagggcaagggaaaaactggtatgatgcaaaataaaaggatcc

SEQ ID NO: 677 - DNA, 2678 bp, Artificial Sequence
  Description of Artificial Sequence: Synthetic Clostridium thermosulfurogenes DNA Polymerase I789P
atgaaatacctgctgccgaccgctgctgctggtctgctgctcctcgctgcccagccggcgatggccatggcgaaatttttgatcatagatggtaatagcttgatgtacagggcgtattttgccctgcctgatttgatgaacagcgaaggaatgcatacaaatgccatatacggtttttcaatgatgcttcttaaattgctggaggaggagaaaccagactacatagcaatagctttcgataaaaaggcttctacatttaggcacaaggagtacagtgcttataaaggaacccgccagtcgatgccagaagagctgatagaacaggtggatattttaaaagatgtgataaatgcatttaacataaagaccatcgagatagagggatttgaagcagatgatatcattggtacagtatcaaaaattgcttccgaaagtgggatggatgtgcttatcgtcacaggcgacagagatgcgcttcagcttgtgtcggcaaatgtaaaagtaaaaatatgtaaaaaaggcataacgcagatggatgagtacgatgaaaaggcggtctttgaaaagtatgaagtgacgccgcttcaattcatagacttgaaagggcttatgggagacaaatcagacaacattccaggagtgcccaatataggggagaagacggccataaagcttgttaaagaatttggatcaattgaaaatttactgatgaatacagataagttaaaagggaaaataaaagaaaatgtagaaaacaatgcagaattagctgttttaagcaaacggcttgctacgattgagagaaatgttcctattgatattgatttgaatgaatacgcggttaaaaattacgatgtcaataagcttacagagctatttgaaaaattggaattttcaagcctcatctcagatttaaaagatgatagtcgtgatacaaaggatattaaagaatggcctgtaagagattttacatacgttaaaaatgttttaggaaagtttgatgttttgtcattgtatccattcatatatgatggaaagataaaagcagtatcatttgcttgcggtgacggatcgttttttgtagagattgatgattatgacaattttaaattgcttaataatgataagcttacgttgataggacacgatctgaaagattttttagtaaacatttcatactgcggtattgaacttaattgtaagattttagatacggccataatgacttatcttttaaatccgtctgagtcgaattacgacataagtcgcgtattgaaaaaatacttgaaagaggatttgcaaaacatagatgatatagtaggcaagggcaggaataaaaagagctacgatgacattgacaaaaagcttttagtcgattatatgtgttcagccgcatcaaacttatctaagttaaaagataagctcatgtcatttataaaagagatggagatggaagatcttttaaaaaatgtggaaattccgcttattgaagtgctaaaatctatggaggtgtacggctttacattagataaagatgtacttagaagtatttctaaagaaatagatgaaaagacagataagattgtaaaagatatttacgatgctgctggatacgaatttaatattaactctacaaagcagttatcagaatttttgtttgataaactgaatttgccagcaataaaaaagactaaaacagggtattcgactgacatggaagtccttgcagaacttataccgtacaatgacatagtaggagaaataatagaatatagacagcttatgaagcttaaatctacgtacatagatggcttcattcccatcatggatgaaaataatagggtccactctacgtttaaacaaacagttgctgctacagggagaattagctcaacagagcctaatctgcagaacatacctgtaagagaagaatttggcaggaggataagaaaggcatttgtatcaagttatgaagatgggcttataatatctgctgattattctcagattgagctaagggttcttgcacatctttcagaggatgaaaaacttattgagtcatttttgaacaacgaagatatacatttaaggacggcatcggaggtttttaaggtttcgaaagaagaagtgacaagtgaaatgagaaggcgggcgaaagctgtcaactttggtattgtatatggtataagcgattacggcttatctaaagacttaaagatttcgcgaaaagaagcgaaagaatacatagacaattattttgacaggtacaagggcgtcaaaaattacatcgactcaattgtcaaatttgcaaaggaaaatgggtatgttacgactatcttaaataggagaagatacataccggaacctaattcaaaaaattttaaccaaagatcttttggcgagagaatggcaatgaatacacctattcaaggtagcgctgcggatataataaagatgtcgatggttaaagtatacaatgaattaaaggaaagaggattgaaatcaagacttattcttcaggtgcacgatgagcttataattgacacacatcctgatgaagttgaaatagtcaaggagcttctaaaatcaataatggaaaatatcataaagttgaaagttcctttagttgtagatatagggcaagggaaaaactggtatgatgcaaaataaaaggatcc

SEQ ID NO: 678 - DNA, 2678 bp, Artificial Sequence
  Description of Artificial Sequence: Synthetic Clostridium thermosulfurogenes DNA Polymerase I789S
atgaaatacctgctgccgaccgctgctgctggtctgctgctcctcgctgcccagccggcgatggccatggcgaaatttttgatcatagatggtaatagcttgatgtacagggcgtattttgccctgcctgatttgatgaacagcgaaggaatgcatacaaatgccatatacggtttttcaatgatgcttcttaaattgctggaggaggagaaaccagactacatagcaatagctttcgataaaaaggcttctacatttaggcacaaggagtacagtgcttataaaggaacccgccagtcgatgccagaagagctgatagaacaggtggatattttaaaagatgtgataaatgcatttaacataaagaccatcgagatagagggatttgaagcagatgatatcattggtacagtatcaaaaattgcttccgaaagtgggatggatgtgcttatcgtcacaggcgacagagatgcgcttcagcttgtgtcggcaaatgtaaaagtaaaaatatgtaaaaaaggcataacgcagatggatgagtacgatgaaaaggcggtctttgaaaagtatgaagtgacgccgcttcaattcatagacttgaaagggcttatgggagacaaatcagacaacattccaggagtgcccaatataggggagaagacggccataaagcttgttaaagaatttggatcaattgaaaatttactgatgaatacagataagttaaaagggaaaataaaagaaaatgtagaaaacaatgcagaattagctgttttaagcaaacggcttgctacgattgagagaaatgttcctattgatattgatttgaatgaatacgcggttaaaaattacgatgtcaataagcttacagagctatttgaaaaattggaattttcaagcctcatctcagatttaaaagatgatagtcgtgatacaaaggatattaaagaatggcctgtaagagattttacatacgttaaaaatgttttaggaaagtttgatgttttgtcattgtatccattcatatatgatggaaagataaaagcagtatcatttgcttgcggtgacggatcgttttttgtagagattgatgattatgacaattttaaattgcttaataatgataagcttacgttgataggacacgatctgaaagattttttagtaaacatttcatactgcggtattgaacttaattgtaagattttagatacggccataatgacttatcttttaaatccgtctgagtcgaattacgacataagtcgcgtattgaaaaaatacttgaaagaggatttgcaaaacatagatgatatagtaggcaagggcaggaataaaaagagctacgatgacattgacaaaaagcttttagtcgattatatgtgttcagccgcatcaaacttatctaagttaaaagataagctcatgtcatttataaaagagatggagatggaagatcttttaaaaaatgtggaaattccgcttattgaagtgctaaaatctatggaggtgtacggctttacattagataaagatgtacttagaagtatttctaaagaaatagatgaaaagacagataagattgtaaaagatatttacgatgctgctggatacgaatttaatattaactctacaaagcagttatcagaatttttgtttgataaactgaatttgccagcaataaaaaagactaaaacagggtattcgactgacatggaagtccttgcagaacttataccgtacaatgacatagtaggagaaataatagaatatagacagcttatgaagcttaaatctacgtacatagatggcttcattcccatcatggatgaaaataatagggtccactctacgtttaaacaaacagttgctgctacagggagaattagctcaacagagcctaatctgcagaacatacctgtaagagaagaatttggcaggaggataagaaaggcatttgtatcaagttatgaagatgggcttataatatctgctgattattctcagattgagctaagggttcttgcacatctttcagaggatgaaaaacttattgagtcatttttgaacaacgaagatatacatttaaggacggcatcggaggtttttaaggtttcgaaagaagaagtgacaagtgaaatgagaaggcgggcgaaagctgtcaactttggtattgtatatggtataagcgattacggcttatctaaagacttaaagatttcgcgaaaagaagcgaaagaatacatagacaattattttgacaggtacaagggcgtcaaaaattacatcgactcaattgtcaaatttgcaaaggaaaatgggtatgttacgactatcttaaataggagaagatacataccggaatctaattcaaaaaattttaaccaaagatcttttggcgagagaatggcaatgaatacacctattcaaggtagcgctgcggatataataaagatgtcgatggttaaagtatacaatgaattaaaggaaagaggattgaaatcaagacttattcttcaggtgcacgatgagcttataattgacacacatcctgatgaagttgaaatagtcaaggagcttctaaaatcaataatggaaaatatcataaagttgaaagttcctttagttgtagatatagggcaagggaaaaactggtatgatgcaaaataaaaggatcc

SEQ ID NO: 679 - DNA, 2678 bp, Artificial Sequence
  Description of Artificial Sequence: Synthetic Clostridium thermosulfurogenes DNA Polymerase I789T
atgaaatacctgctgccgaccgctgctgctggtctgctgctcctcgctgcccagccggcgatggccatggcgaaatttttgatcatagatggtaatagcttgatgtacagggcgtattttgccctgcctgatttgatgaacagcgaaggaatgcatacaaatgccatatacggtttttcaatgatgcttcttaaattgctggaggaggagaaaccagactacatagcaatagctttcgataaaaaggcttctacatttaggcacaaggagtacagtgcttataaaggaacccgccagtcgatgccagaagagctgatagaacaggtggatattttaaaagatgtgataaatgcatttaacataaagaccatcgagatagagggatttgaagcagatgatatcattggtacagtatcaaaaattgcttccgaaagtgggatggatgtgcttatcgtcacaggcgacagagatgcgcttcagcttgtgtcggcaaatgtaaaagtaaaaatatgtaaaaaaggcataacgcagatggatgagtacgatgaaaaggcggtctttgaaaagtatgaagtgacgccgcttcaattcatagacttgaaagggcttatgggagacaaatcagacaacattccaggagtgcccaatataggggagaagacggccataaagcttgttaaagaatttggatcaattgaaaatttactgatgaatacagataagttaaaagggaaaataaaagaaaatgtagaaaacaatgcagaattagctgttttaagcaaacggcttgctacgattgagagaaatgttcctattgatattgatttgaatgaatacgcggttaaaaattacgatgtcaataagcttacagagctatttgaaaaattggaattttcaagcctcatctcagatttaaaagatgatagtcgtgatacaaaggatattaaagaatggcctgtaagagattttacatacgttaaaaatgttttaggaaagtttgatgttttgtcattgtatccattcatatatgatggaaagataaaagcagtatcatttgcttgcggtgacggatcgttttttgtagagattgatgattatgacaattttaaattgcttaataatgataagcttacgttgataggacacgatctgaaagattttttagtaaacatttcatactgcggtattgaacttaattgtaagattttagatacggccataatgacttatcttttaaatccgtctgagtcgaattacgacataagtcgcgtattgaaaaaatacttgaaagaggatttgcaaaacatagatgatatagtaggcaagggcaggaataaaaagagctacgatgacattgacaaaaagcttttagtcgattatatgtgttcagccgcatcaaacttatctaagttaaaagataagctcatgtcatttataaaagagatggagatggaagatcttttaaaaaatgtggaaattccgcttattgaagtgctaaaatctatggaggtgtacggctttacattagataaagatgtacttagaagtatttctaaagaaatagatgaaaagacagataagattgtaaaagatatttacgatgctgctggatacgaatttaatattaactctacaaagcagttatcagaatttttgtttgataaactgaatttgccagcaataaaaaagactaaaacagggtattcgactgacatggaagtccttgcagaacttataccgtacaatgacatagtaggagaaataatagaatatagacagcttatgaagcttaaatctacgtacatagatggcttcattcccatcatggatgaaaataatagggtccactctacgtttaaacaaacagttgctgctacagggagaattagctcaacagagcctaatctgcagaacatacctgtaagagaagaatttggcaggaggataagaaaggcatttgtatcaagttatgaagatgggcttataatatctgctgattattctcagattgagctaagggttcttgcacatctttcagaggatgaaaaacttattgagtcatttttgaacaacgaagatatacatttaaggacggcatcggaggtttttaaggtttcgaaagaagaagtgacaagtgaaatgagaaggcgggcgaaagctgtcaactttggtattgtatatggtataagcgattacggcttatctaaagacttaaagatttcgcgaaaagaagcgaaagaatacatagacaattattttgacaggtacaagggcgtcaaaaattacatcgactcaattgtcaaatttgcaaaggaaaatgggtatgttacgactatcttaaataggagaagatacataccggaaactaattcaaaaaattttaaccaaagatcttttggcgagagaatggcaatgaatacacctattcaaggtagcgctgcggatataataaagatgtcgatggttaaagtatacaatgaattaaaggaaagaggattgaaatcaagacttattcttcaggtgcacgatgagcttataattgacacacatcctgatgaagttgaaatagtcaaggagcttctaaaatcaataatggaaaatatcataaagttgaaagttcctttagttgtagatatagggcaagggaaaaactggtatgatgcaaaataaaaggatcc

SEQ ID NO: 680 - DNA, 2678 bp, Artificial Sequence
  Description of Artificial Sequence: Synthetic Clostridium thermosulfurogenes DNA Polymerase I789W
atgaaatacctgctgccgaccgctgctgctggtctgctgctcctcgctgcccagccggcgatggccatggcgaaatttttgatcatagatggtaatagcttgatgtacagggcgtattttgccctgcctgatttgatgaacagcgaaggaatgcatacaaatgccatatacggtttttcaatgatgcttcttaaattgctggaggaggagaaaccagactacatagcaatagctttcgataaaaaggcttctacatttaggcacaaggagtacagtgcttataaaggaacccgccagtcgatgccagaagagctgatagaacaggtggatattttaaaagatgtgataaatgcatttaacataaagaccatcgagatagagggatttgaagcagatgatatcattggtacagtatcaaaaattgcttccgaaagtgggatggatgtgcttatcgtcacaggcgacagagatgcgcttcagcttgtgtcggcaaatgtaaaagtaaaaatatgtaaaaaaggcataacgcagatggatgagtacgatgaaaaggcggtctttgaaaagtatgaagtgacgccgcttcaattcatagacttgaaagggcttatgggagacaaatcagacaacattccaggagtgcccaatataggggagaagacggccataaagcttgttaaagaatttggatcaattgaaaatttactgatgaatacagataagttaaaagggaaaataaaagaaaatgtagaaaacaatgcagaattagctgttttaagcaaacggcttgctacgattgagagaaatgttcctattgatattgatttgaatgaatacgcggttaaaaattacgatgtcaataagcttacagagctatttgaaaaattggaattttcaagcctcatctcagatttaaaagatgatagtcgtgatacaaaggatattaaagaatggcctgtaagagattttacatacgttaaaaatgttttaggaaagtttgatgttttgtcattgtatccattcatatatgatggaaagataaaagcagtatcatttgcttgcggtgacggatcgttttttgtagagattgatgattatgacaattttaaattgcttaataatgataagcttacgttgataggacacgatctgaaagattttttagtaaacatttcatactgcggtattgaacttaattgtaagattttagatacggccataatgacttatcttttaaatccgtctgagtcgaattacgacataagtcgcgtattgaaaaaatacttgaaagaggatttgcaaaacatagatgatatagtaggcaagggcaggaataaaaagagctacgatgacattgacaaaaagcttttagtcgattatatgtgttcagccgcatcaaacttatctaagttaaaagataagctcatgtcatttataaaagagatggagatggaagatcttttaaaaaatgtggaaattccgcttattgaagtgctaaaatctatggaggtgtacggctttacattagataaagatgtacttagaagtatttctaaagaaatagatgaaaagacagataagattgtaaaagatatttacgatgctgctggatacgaatttaatattaactctacaaagcagttatcagaatttttgtttgataaactgaatttgccagcaataaaaaagactaaaacagggtattcgactgacatggaagtccttgcagaacttataccgtacaatgacatagtaggagaaataatagaatatagacagcttatgaagcttaaatctacgtacatagatggcttcattcccatcatggatgaaaataatagggtccactctacgtttaaacaaacagttgctgctacagggagaattagctcaacagagcctaatctgcagaacatacctgtaagagaagaatttggcaggaggataagaaaggcatttgtatcaagttatgaagatgggcttataatatctgctgattattctcagattgagctaagggttcttgcacatctttcagaggatgaaaaacttattgagtcatttttgaacaacgaagatatacatttaaggacggcatcggaggtttttaaggtttcgaaagaagaagtgacaagtgaaatgagaaggcgggcgaaagctgtcaactttggtattgtatatggtataagcgattacggcttatctaaagacttaaagatttcgcgaaaagaagcgaaagaatacatagacaattattttgacaggtacaagggcgtcaaaaattacatcgactcaattgtcaaatttgcaaaggaaaatgggtatgttacgactatcttaaataggagaagatacataccggaatggaattcaaaaaattttaaccaaagatcttttggcgagagaatggcaatgaatacacctattcaaggtagcgctgcggatataataaagatgtcgatggttaaagtatacaatgaattaaaggaaagaggattgaaatcaagacttattcttcaggtgcacgatgagcttataattgacacacatcctgatgaagttgaaatagtcaaggagcttctaaaatcaataatggaaaatatcataaagttgaaagttcctttagttgtagatatagggcaagggaaaaactggtatgatgcaaaataaaaggatcc

SEQ ID NO: 681 - DNA, 2678 bp, Artificial Sequence
  Description of Artificial Sequence: Synthetic Clostridium thermosulfurogenes DNA Polymerase I789Y
atgaaatacctgctgccgaccgctgctgctggtctgctgctcctcgctgcccagccggcgatggccatggcgaaatttttgatcatagatggtaatagcttgatgtacagggcgtattttgccctgcctgatttgatgaacagcgaaggaatgcatacaaatgccatatacggtttttcaatgatgcttcttaaattgctggaggaggagaaaccagactacatagcaatagctttcgataaaaaggcttctacatttaggcacaaggagtacagtgcttataaaggaacccgccagtcgatgccagaagagctgatagaacaggtggatattttaaaagatgtgataaatgcatttaacataaagaccatcgagatagagggatttgaagcagatgatatcattggtacagtatcaaaaattgcttccgaaagtgggatggatgtgcttatcgtcacaggcgacagagatgcgcttcagcttgtgtcggcaaatgtaaaagtaaaaatatgtaaaaaaggcataacgcagatggatgagtacgatgaaaaggcggtctttgaaaagtatgaagtgacgccgcttcaattcatagacttgaaagggcttatgggagacaaatcagacaacattccaggagtgcccaatataggggagaagacggccataaagcttgttaaagaatttggatcaattgaaaatttactgatgaatacagataagttaaaagggaaaataaaagaaaatgtagaaaacaatgcagaattagctgttttaagcaaacggcttgctacgattgagagaaatgttcctattgatattgatttgaatgaatacgcggttaaaaattacgatgtcaataagcttacagagctatttgaaaaattggaattttcaagcctcatctcagatttaaaagatgatagtcgtgatacaaaggatattaaagaatggcctgtaagagattttacatacgttaaaaatgttttaggaaagtttgatgttttgtcattgtatccattcatatatgatggaaagataaaagcagtatcatttgcttgcggtgacggatcgttttttgtagagattgatgattatgacaattttaaattgcttaataatgataagcttacgttgataggacacgatctgaaagattttttagtaaacatttcatactgcggtattgaacttaattgtaagattttagatacggccataatgacttatcttttaaatccgtctgagtcgaattacgacataagtcgcgtattgaaaaaatacttgaaagaggatttgcaaaacatagatgatatagtaggcaagggcaggaataaaaagagctacgatgacattgacaaaaagcttttagtcgattatatgtgttcagccgcatcaaacttatctaagttaaaagataagctcatgtcatttataaaagagatggagatggaagatcttttaaaaaatgtggaaattccgcttattgaagtgctaaaatctatggaggtgtacggctttacattagataaagatgtacttagaagtatttctaaagaaatagatgaaaagacagataagattgtaaaagatatttacgatgctgctggatacgaatttaatattaactctacaaagcagttatcagaatttttgtttgataaactgaatttgccagcaataaaaaagactaaaacagggtattcgactgacatggaagtccttgcagaacttataccgtacaatgacatagtaggagaaataatagaatatagacagcttatgaagcttaaatctacgtacatagatggcttcattcccatcatggatgaaaataatagggtccactctacgtttaaacaaacagttgctgctacagggagaattagctcaacagagcctaatctgcagaacatacctgtaagagaagaatttggcaggaggataagaaaggcatttgtatcaagttatgaagatgggcttataatatctgctgattattctcagattgagctaagggttcttgcacatctttcagaggatgaaaaacttattgagtcatttttgaacaacgaagatatacatttaaggacggcatcggaggtttttaaggtttcgaaagaagaagtgacaagtgaaatgagaaggcgggcgaaagctgtcaactttggtattgtatatggtataagcgattacggcttatctaaagacttaaagatttcgcgaaaagaagcgaaagaatacatagacaattattttgacaggtacaagggcgtcaaaaattacatcgactcaattgtcaaatttgcaaaggaaaatgggtatgttacgactatcttaaataggagaagatacataccggaatataattcaaaaaattttaaccaaagatcttttggcgagagaatggcaatgaatacacctattcaaggtagcgctgcggatataataaagatgtcgatggttaaagtatacaatgaattaaaggaaagaggattgaaatcaagacttattcttcaggtgcacgatgagcttataattgacacacatcctgatgaagttgaaatagtcaaggagcttctaaaatcaataatggaaaatatcataaagttgaaagttcctttagttgtagatatagggcaagggaaaaactggtatgatgcaaaataaaaggatcc

SEQ ID NO: 682 - DNA, 2678 bp, Artificial Sequence
  Description of Artificial Sequence: Synthetic Clostridium thermosulfurogenes DNA Polymerase I789V
atgaaatacctgctgccgaccgctgctgctggtctgctgctcctcgctgcccagccggcgatggccatggcgaaatttttgatcatagatggtaatagcttgatgtacagggcgtattttgccctgcctgatttgatgaacagcgaaggaatgcatacaaatgccatatacggtttttcaatgatgcttcttaaattgctggaggaggagaaaccagactacatagcaatagctttcgataaaaaggcttctacatttaggcacaaggagtacagtgcttataaaggaacccgccagtcgatgccagaagagctgatagaacaggtggatattttaaaagatgtgataaatgcatttaacataaagaccatcgagatagagggatttgaagcagatgatatcattggtacagtatcaaaaattgcttccgaaagtgggatggatgtgcttatcgtcacaggcgacagagatgcgcttcagcttgtgtcggcaaatgtaaaagtaaaaatatgtaaaaaaggcataacgcagatggatgagtacgatgaaaaggcggtctttgaaaagtatgaagtgacgccgcttcaattcatagacttgaaagggcttatgggagacaaatcagacaacattccaggagtgcccaatataggggagaagacggccataaagcttgttaaagaatttggatcaattgaaaatttactgatgaatacagataagttaaaagggaaaataaaagaaaatgtagaaaacaatgcagaattagctgttttaagcaaacggcttgctacgattgagagaaatgttcctattgatattgatttgaatgaatacgcggttaaaaattacgatgtcaataagcttacagagctatttgaaaaattggaattttcaagcctcatctcagatttaaaagatgatagtcgtgatacaaaggatattaaagaatggcctgtaagagattttacatacgttaaaaatgttttaggaaagtttgatgttttgtcattgtatccattcatatatgatggaaagataaaagcagtatcatttgcttgcggtgacggatcgttttttgtagagattgatgattatgacaattttaaattgcttaataatgataagcttacgttgataggacacgatctgaaagattttttagtaaacatttcatactgcggtattgaacttaattgtaagattttagatacggccataatgacttatcttttaaatccgtctgagtcgaattacgacataagtcgcgtattgaaaaaatacttgaaagaggatttgcaaaacatagatgatatagtaggcaagggcaggaataaaaagagctacgatgacattgacaaaaagcttttagtcgattatatgtgttcagccgcatcaaacttatctaagttaaaagataagctcatgtcatttataaaagagatggagatggaagatcttttaaaaaatgtggaaattccgcttattgaagtgctaaaatctatggaggtgtacggctttacattagataaagatgtacttagaagtatttctaaagaaatagatgaaaagacagataagattgtaaaagatatttacgatgctgctggatacgaatttaatattaactctacaaagcagttatcagaatttttgtttgataaactgaatttgccagcaataaaaaagactaaaacagggtattcgactgacatggaagtccttgcagaacttataccgtacaatgacatagtaggagaaataatagaatatagacagcttatgaagcttaaatctacgtacatagatggcttcattcccatcatggatgaaaataatagggtccactctacgtttaaacaaacagttgctgctacagggagaattagctcaacagagcctaatctgcagaacatacctgtaagagaagaatttggcaggaggataagaaaggcatttgtatcaagttatgaagatgggcttataatatctgctgattattctcagattgagctaagggttcttgcacatctttcagaggatgaaaaacttattgagtcatttttgaacaacgaagatatacatttaaggacggcatcggaggtttttaaggtttcgaaagaagaagtgacaagtgaaatgagaaggcgggcgaaagctgtcaactttggtattgtatatggtataagcgattacggcttatctaaagacttaaagatttcgcgaaaagaagcgaaagaatacatagacaattattttgacaggtacaagggcgtcaaaaattacatcgactcaattgtcaaatttgcaaaggaaaatgggtatgttacgactatcttaaataggagaagatacataccggaagttaattcaaaaaattttaaccaaagatcttttggcgagagaatggcaatgaatacacctattcaaggtagcgctgcggatataataaagatgtcgatggttaaagtatacaatgaattaaaggaaagaggattgaaatcaagacttattcttcaggtgcacgatgagcttataattgacacacatcctgatgaagttgaaatagtcaaggagcttctaaaatcaataatggaaaatatcataaagttgaaagttcctttagttgtagatatagggcaagggaaaaactggtatgatgcaaaataaaaggatcc

SEQ ID NO: 683 - DNA, 2678 bp, Artificial Sequence
  Description of Artificial Sequence: Synthetic Clostridium thermosulfurogenes DNA Polymerase N790A
atgaaatacctgctgccgaccgctgctgctggtctgctgctcctcgctgcccagccggcgatggccatggcgaaatttttgatcatagatggtaatagcttgatgtacagggcgtattttgccctgcctgatttgatgaacagcgaaggaatgcatacaaatgccatatacggtttttcaatgatgcttcttaaattgctggaggaggagaaaccagactacatagcaatagctttcgataaaaaggcttctacatttaggcacaaggagtacagtgcttataaaggaacccgccagtcgatgccagaagagctgatagaacaggtggatattttaaaagatgtgataaatgcatttaacataaagaccatcgagatagagggatttgaagcagatgatatcattggtacagtatcaaaaattgcttccgaaagtgggatggatgtgcttatcgtcacaggcgacagagatgcgcttcagcttgtgtcggcaaatgtaaaagtaaaaatatgtaaaaaaggcataacgcagatggatgagtacgatgaaaaggcggtctttgaaaagtatgaagtgacgccgcttcaattcatagacttgaaagggcttatgggagacaaatcagacaacattccaggagtgcccaatataggggagaagacggccataaagcttgttaaagaatttggatcaattgaaaatttactgatgaatacagataagttaaaagggaaaataaaagaaaatgtagaaaacaatgcagaattagctgttttaagcaaacggcttgctacgattgagagaaatgttcctattgatattgatttgaatgaatacgcggttaaaaattacgatgtcaataagcttacagagctatttgaaaaattggaattttcaagcctcatctcagatttaaaagatgatagtcgtgatacaaaggatattaaagaatggcctgtaagagattttacatacgttaaaaatgttttaggaaagtttgatgttttgtcattgtatccattcatatatgatggaaagataaaagcagtatcatttgcttgcggtgacggatcgttttttgtagagattgatgattatgacaattttaaattgcttaataatgataagcttacgttgataggacacgatctgaaagattttttagtaaacatttcatactgcggtattgaacttaattgtaagattttagatacggccataatgacttatcttttaaatccgtctgagtcgaattacgacataagtcgcgtattgaaaaaatacttgaaagaggatttgcaaaacatagatgatatagtaggcaagggcaggaataaaaagagctacgatgacattgacaaaaagcttttagtcgattatatgtgttcagccgcatcaaacttatctaagttaaaagataagctcatgtcatttataaaagagatggagatggaagatcttttaaaaaatgtggaaattccgcttattgaagtgctaaaatctatggaggtgtacggctttacattagataaagatgtacttagaagtatttctaaagaaatagatgaaaagacagataagattgtaaaagatatttacgatgctgctggatacgaatttaatattaactctacaaagcagttatcagaatttttgtttgataaactgaatttgccagcaataaaaaagactaaaacagggtattcgactgacatggaagtccttgcagaacttataccgtacaatgacatagtaggagaaataatagaatatagacagcttatgaagcttaaatctacgtacatagatggcttcattcccatcatggatgaaaataatagggtccactctacgtttaaacaaacagttgctgctacagggagaattagctcaacagagcctaatctgcagaacatacctgtaagagaagaatttggcaggaggataagaaaggcatttgtatcaagttatgaagatgggcttataatatctgctgattattctcagattgagctaagggttcttgcacatctttcagaggatgaaaaacttattgagtcatttttgaacaacgaagatatacatttaaggacggcatcggaggtttttaaggtttcgaaagaagaagtgacaagtgaaatgagaaggcgggcgaaagctgtcaactttggtattgtatatggtataagcgattacggcttatctaaagacttaaagatttcgcgaaaagaagcgaaagaatacatagacaattattttgacaggtacaagggcgtcaaaaattacatcgactcaattgtcaaatttgcaaaggaaaatgggtatgttacgactatcttaaataggagaagatacataccggaaatcgcttcaaaaaattttaaccaaagatcttttggcgagagaatggcaatgaatacacctattcaaggtagcgctgcggatataataaagatgtcgatggttaaagtatacaatgaattaaaggaaagaggattgaaatcaagacttattcttcaggtgcacgatgagcttataattgacacacatcctgatgaagttgaaatagtcaaggagcttctaaaatcaataatggaaaatatcataaagttgaaagttcctttagttgtagatatagggcaagggaaaaactggtatgatgcaaaataaaaggatcc

SEQ ID NO: 684 - DNA, 2678 bp, Artificial Sequence
  Description of Artificial Sequence: Synthetic Clostridium thermosulfurogenes DNA Polymerase N790R
atgaaatacctgctgccgaccgctgctgctggtctgctgctcctcgctgcccagccggcgatggccatggcgaaatttttgatcatagatggtaatagcttgatgtacagggcgtattttgccctgcctgatttgatgaacagcgaaggaatgcatacaaatgccatatacggtttttcaatgatgcttcttaaattgctggaggaggagaaaccagactacatagcaatagctttcgataaaaaggcttctacatttaggcacaaggagtacagtgcttataaaggaacccgccagtcgatgccagaagagctgatagaacaggtggatattttaaaagatgtgataaatgcatttaacataaagaccatcgagatagagggatttgaagcagatgatatcattggtacagtatcaaaaattgcttccgaaagtgggatggatgtgcttatcgtcacaggcgacagagatgcgcttcagcttgtgtcggcaaatgtaaaagtaaaaatatgtaaaaaaggcataacgcagatggatgagtacgatgaaaaggcggtctttgaaaagtatgaagtgacgccgcttcaattcatagacttgaaagggcttatgggagacaaatcagacaacattccaggagtgcccaatataggggagaagacggccataaagcttgttaaagaatttggatcaattgaaaatttactgatgaatacagataagttaaaagggaaaataaaagaaaatgtagaaaacaatgcagaattagctgttttaagcaaacggcttgctacgattgagagaaatgttcctattgatattgatttgaatgaatacgcggttaaaaattacgatgtcaataagcttacagagctatttgaaaaattggaattttcaagcctcatctcagatttaaaagatgatagtcgtgatacaaaggatattaaagaatggcctgtaagagattttacatacgttaaaaatgttttaggaaagtttgatgttttgtcattgtatccattcatatatgatggaaagataaaagcagtatcatttgcttgcggtgacggatcgttttttgtagagattgatgattatgacaattttaaattgcttaataatgataagcttacgttgataggacacgatctgaaagattttttagtaaacatttcatactgcggtattgaacttaattgtaagattttagatacggccataatgacttatcttttaaatccgtctgagtcgaattacgacataagtcgcgtattgaaaaaatacttgaaagaggatttgcaaaacatagatgatatagtaggcaagggcaggaataaaaagagctacgatgacattgacaaaaagcttttagtcgattatatgtgttcagccgcatcaaacttatctaagttaaaagataagctcatgtcatttataaaagagatggagatggaagatcttttaaaaaatgtggaaattccgcttattgaagtgctaaaatctatggaggtgtacggctttacattagataaagatgtacttagaagtatttctaaagaaatagatgaaaagacagataagattgtaaaagatatttacgatgctgctggatacgaatttaatattaactctacaaagcagttatcagaatttttgtttgataaactgaatttgccagcaataaaaaagactaaaacagggtattcgactgacatggaagtccttgcagaacttataccgtacaatgacatagtaggagaaataatagaatatagacagcttatgaagcttaaatctacgtacatagatggcttcattcccatcatggatgaaaataatagggtccactctacgtttaaacaaacagttgctgctacagggagaattagctcaacagagcctaatctgcagaacatacctgtaagagaagaatttggcaggaggataagaaaggcatttgtatcaagttatgaagatgggcttataatatctgctgattattctcagattgagctaagggttcttgcacatctttcagaggatgaaaaacttattgagtcatttttgaacaacgaagatatacatttaaggacggcatcggaggtttttaaggtttcgaaagaagaagtgacaagtgaaatgagaaggcgggcgaaagctgtcaactttggtattgtatatggtataagcgattacggcttatctaaagacttaaagatttcgcgaaaagaagcgaaagaatacatagacaattattttgacaggtacaagggcgtcaaaaattacatcgactcaattgtcaaatttgcaaaggaaaatgggtatgttacgactatcttaaataggagaagatacataccggaaatccgttcaaaaaattttaaccaaagatcttttggcgagagaatggcaatgaatacacctattcaaggtagcgctgcggatataataaagatgtcgatggttaaagtatacaatgaattaaaggaaagaggattgaaatcaagacttattcttcaggtgcacgatgagcttataattgacacacatcctgatgaagttgaaatagtcaaggagcttctaaaatcaataatggaaaatatcataaagttgaaagttcctttagttgtagatatagggcaagggaaaaactggtatgatgcaaaataaaaggatcc

SEQ ID NO: 685 - DNA, 2678 bp, Artificial Sequence
  Description of Artificial Sequence: Synthetic Clostridium thermosulfurogenes DNA Polymerase N790D
atgaaatacctgctgccgaccgctgctgctggtctgctgctcctcgctgcccagccggcgatggccatggcgaaatttttgatcatagatggtaatagcttgatgtacagggcgtattttgccctgcctgatttgatgaacagcgaaggaatgcatacaaatgccatatacggtttttcaatgatgcttcttaaattgctggaggaggagaaaccagactacatagcaatagctttcgataaaaaggcttctacatttaggcacaaggagtacagtgcttataaaggaacccgccagtcgatgccagaagagctgatagaacaggtggatattttaaaagatgtgataaatgcatttaacataaagaccatcgagatagagggatttgaagcagatgatatcattggtacagtatcaaaaattgcttccgaaagtgggatggatgtgcttatcgtcacaggcgacagagatgcgcttcagcttgtgtcggcaaatgtaaaagtaaaaatatgtaaaaaaggcataacgcagatggatgagtacgatgaaaaggcggtctttgaaaagtatgaagtgacgccgcttcaattcatagacttgaaagggcttatgggagacaaatcagacaacattccaggagtgcccaatataggggagaagacggccataaagcttgttaaagaatttggatcaattgaaaatttactgatgaatacagataagttaaaagggaaaataaaagaaaatgtagaaaacaatgcagaattagctgttttaagcaaacggcttgctacgattgagagaaatgttcctattgatattgatttgaatgaatacgcggttaaaaattacgatgtcaataagcttacagagctatttgaaaaattggaattttcaagcctcatctcagatttaaaagatgatagtcgtgatacaaaggatattaaagaatggcctgtaagagattttacatacgttaaaaatgttttaggaaagtttgatgttttgtcattgtatccattcatatatgatggaaagataaaagcagtatcatttgcttgcggtgacggatcgttttttgtagagattgatgattatgacaattttaaattgcttaataatgataagcttacgttgataggacacgatctgaaagattttttagtaaacatttcatactgcggtattgaacttaattgtaagattttagatacggccataatgacttatcttttaaatccgtctgagtcgaattacgacataagtcgcgtattgaaaaaatacttgaaagaggatttgcaaaacatagatgatatagtaggcaagggcaggaataaaaagagctacgatgacattgacaaaaagcttttagtcgattatatgtgttcagccgcatcaaacttatctaagttaaaagataagctcatgtcatttataaaagagatggagatggaagatcttttaaaaaatgtggaaattccgcttattgaagtgctaaaatctatggaggtgtacggctttacattagataaagatgtacttagaagtatttctaaagaaatagatgaaaagacagataagattgtaaaagatatttacgatgctgctggatacgaatttaatattaactctacaaagcagttatcagaatttttgtttgataaactgaatttgccagcaataaaaaagactaaaacagggtattcgactgacatggaagtccttgcagaacttataccgtacaatgacatagtaggagaaataatagaatatagacagcttatgaagcttaaatctacgtacatagatggcttcattcccatcatggatgaaaataatagggtccactctacgtttaaacaaacagttgctgctacagggagaattagctcaacagagcctaatctgcagaacatacctgtaagagaagaatttggcaggaggataagaaaggcatttgtatcaagttatgaagatgggcttataatatctgctgattattctcagattgagctaagggttcttgcacatctttcagaggatgaaaaacttattgagtcatttttgaacaacgaagatatacatttaaggacggcatcggaggtttttaaggtttcgaaagaagaagtgacaagtgaaatgagaaggcgggcgaaagctgtcaactttggtattgtatatggtataagcgattacggcttatctaaagacttaaagatttcgcgaaaagaagcgaaagaatacatagacaattattttgacaggtacaagggcgtcaaaaattacatcgactcaattgtcaaatttgcaaaggaaaatgggtatgttacgactatcttaaataggagaagatacataccggaaatcgattcaaaaaattttaaccaaagatcttttggcgagagaatggcaatgaatacacctattcaaggtagcgctgcggatataataaagatgtcgatggttaaagtatacaatgaattaaaggaaagaggattgaaatcaagacttattcttcaggtgcacgatgagcttataattgacacacatcctgatgaagttgaaatagtcaaggagcttctaaaatcaataatggaaaatatcataaagttgaaagttcctttagttgtagatatagggcaagggaaaaactggtatgatgcaaaataaaaggatcc

SEQ ID NO: 686 - DNA, 2678 bp, Artificial Sequence
  Description of Artificial Sequence: Synthetic Clostridium thermosulfurogenes DNA Polymerase N790C
atgaaatacctgctgccgaccgctgctgctggtctgctgctcctcgctgcccagccggcgatggccatggcgaaatttttgatcatagatggtaatagcttgatgtacagggcgtattttgccctgcctgatttgatgaacagcgaaggaatgcatacaaatgccatatacggtttttcaatgatgcttcttaaattgctggaggaggagaaaccagactacatagcaatagctttcgataaaaaggcttctacatttaggcacaaggagtacagtgcttataaaggaacccgccagtcgatgccagaagagctgatagaacaggtggatattttaaaagatgtgataaatgcatttaacataaagaccatcgagatagagggatttgaagcagatgatatcattggtacagtatcaaaaattgcttccgaaagtgggatggatgtgcttatcgtcacaggcgacagagatgcgcttcagcttgtgtcggcaaatgtaaaagtaaaaatatgtaaaaaaggcataacgcagatggatgagtacgatgaaaaggcggtctttgaaaagtatgaagtgacgccgcttcaattcatagacttgaaagggcttatgggagacaaatcagacaacattccaggagtgcccaatataggggagaagacggccataaagcttgttaaagaatttggatcaattgaaaatttactgatgaatacagataagttaaaagggaaaataaaagaaaatgtagaaaacaatgcagaattagctgttttaagcaaacggcttgctacgattgagagaaatgttcctattgatattgatttgaatgaatacgcggttaaaaattacgatgtcaataagcttacagagctatttgaaaaattggaattttcaagcctcatctcagatttaaaagatgatagtcgtgatacaaaggatattaaagaatggcctgtaagagattttacatacgttaaaaatgttttaggaaagtttgatgttttgtcattgtatccattcatatatgatggaaagataaaagcagtatcatttgcttgcggtgacggatcgttttttgtagagattgatgattatgacaattttaaattgcttaataatgataagcttacgttgataggacacgatctgaaagattttttagtaaacatttcatactgcggtattgaacttaattgtaagattttagatacggccataatgacttatcttttaaatccgtctgagtcgaattacgacataagtcgcgtattgaaaaaatacttgaaagaggatttgcaaaacatagatgatatagtaggcaagggcaggaataaaaagagctacgatgacattgacaaaaagcttttagtcgattatatgtgttcagccgcatcaaacttatctaagttaaaagataagctcatgtcatttataaaagagatggagatggaagatcttttaaaaaatgtggaaattccgcttattgaagtgctaaaatctatggaggtgtacggctttacattagataaagatgtacttagaagtatttctaaagaaatagatgaaaagacagataagattgtaaaagatatttacgatgctgctggatacgaatttaatattaactctacaaagcagttatcagaatttttgtttgataaactgaatttgccagcaataaaaaagactaaaacagggtattcgactgacatggaagtccttgcagaacttataccgtacaatgacatagtaggagaaataatagaatatagacagcttatgaagcttaaatctacgtacatagatggcttcattcccatcatggatgaaaataatagggtccactctacgtttaaacaaacagttgctgctacagggagaattagctcaacagagcctaatctgcagaacatacctgtaagagaagaatttggcaggaggataagaaaggcatttgtatcaagttatgaagatgggcttataatatctgctgattattctcagattgagctaagggttcttgcacatctttcagaggatgaaaaacttattgagtcatttttgaacaacgaagatatacatttaaggacggcatcggaggtttttaaggtttcgaaagaagaagtgacaagtgaaatgagaaggcgggcgaaagctgtcaactttggtattgtatatggtataagcgattacggcttatctaaagacttaaagatttcgcgaaaagaagcgaaagaatacatagacaattattttgacaggtacaagggcgtcaaaaattacatcgactcaattgtcaaatttgcaaaggaaaatgggtatgttacgactatcttaaataggagaagatacataccggaaatctgttcaaaaaattttaaccaaagatcttttggcgagagaatggcaatgaatacacctattcaaggtagcgctgcggatataataaagatgtcgatggttaaagtatacaatgaattaaaggaaagaggattgaaatcaagacttattcttcaggtgcacgatgagcttataattgacacacatcctgatgaagttgaaatagtcaaggagcttctaaaatcaataatggaaaatatcataaagttgaaagttcctttagttgtagatatagggcaagggaaaaactggtatgatgcaaaataaaaggatcc

SEQ ID NO: 687 - DNA, 2678 bp, Artificial Sequence
  Description of Artificial Sequence: Synthetic Clostridium thermosulfurogenes DNA Polymerase N790E
atgaaatacctgctgccgaccgctgctgctggtctgctgctcctcgctgcccagccggcgatggccatggcgaaatttttgatcatagatggtaatagcttgatgtacagggcgtattttgccctgcctgatttgatgaacagcgaaggaatgcatacaaatgccatatacggtttttcaatgatgcttcttaaattgctggaggaggagaaaccagactacatagcaatagctttcgataaaaaggcttctacatttaggcacaaggagtacagtgcttataaaggaacccgccagtcgatgccagaagagctgatagaacaggtggatattttaaaagatgtgataaatgcatttaacataaagaccatcgagatagagggatttgaagcagatgatatcattggtacagtatcaaaaattgcttccgaaagtgggatggatgtgcttatcgtcacaggcgacagagatgcgcttcagcttgtgtcggcaaatgtaaaagtaaaaatatgtaaaaaaggcataacgcagatggatgagtacgatgaaaaggcggtctttgaaaagtatgaagtgacgccgcttcaattcatagacttgaaagggcttatgggagacaaatcagacaacattccaggagtgcccaatataggggagaagacggccataaagcttgttaaagaatttggatcaattgaaaatttactgatgaatacagataagttaaaagggaaaataaaagaaaatgtagaaaacaatgcagaattagctgttttaagcaaacggcttgctacgattgagagaaatgttcctattgatattgatttgaatgaatacgcggttaaaaattacgatgtcaataagcttacagagctatttgaaaaattggaattttcaagcctcatctcagatttaaaagatgatagtcgtgatacaaaggatattaaagaatggcctgtaagagattttacatacgttaaaaatgttttaggaaagtttgatgttttgtcattgtatccattcatatatgatggaaagataaaagcagtatcatttgcttgcggtgacggatcgttttttgtagagattgatgattatgacaattttaaattgcttaataatgataagcttacgttgataggacacgatctgaaagattttttagtaaacatttcatactgcggtattgaacttaattgtaagattttagatacggccataatgacttatcttttaaatccgtctgagtcgaattacgacataagtcgcgtattgaaaaaatacttgaaagaggatttgcaaaacatagatgatatagtaggcaagggcaggaataaaaagagctacgatgacattgacaaaaagcttttagtcgattatatgtgttcagccgcatcaaacttatctaagttaaaagataagctcatgtcatttataaaagagatggagatggaagatcttttaaaaaatgtggaaattccgcttattgaagtgctaaaatctatggaggtgtacggctttacattagataaagatgtacttagaagtatttctaaagaaatagatgaaaagacagataagattgtaaaagatatttacgatgctgctggatacgaatttaatattaactctacaaagcagttatcagaatttttgtttgataaactgaatttgccagcaataaaaaagactaaaacagggtattcgactgacatggaagtccttgcagaacttataccgtacaatgacatagtaggagaaataatagaatatagacagcttatgaagcttaaatctacgtacatagatggcttcattcccatcatggatgaaaataatagggtccactctacgtttaaacaaacagttgctgctacagggagaattagctcaacagagcctaatctgcagaacatacctgtaagagaagaatttggcaggaggataagaaaggcatttgtatcaagttatgaagatgggcttataatatctgctgattattctcagattgagctaagggttcttgcacatctttcagaggatgaaaaacttattgagtcatttttgaacaacgaagatatacatttaaggacggcatcggaggtttttaaggtttcgaaagaagaagtgacaagtgaaatgagaaggcgggcgaaagctgtcaactttggtattgtatatggtataagcgattacggcttatctaaagacttaaagatttcgcgaaaagaagcgaaagaatacatagacaattattttgacaggtacaagggcgtcaaaaattacatcgactcaattgtcaaatttgcaaaggaaaatgggtatgttacgactatcttaaataggagaagatacataccggaaatcgaatcaaaaaattttaaccaaagatcttttggcgagagaatggcaatgaatacacctattcaaggtagcgctgcggatataataaagatgtcgatggttaaagtatacaatgaattaaaggaaagaggattgaaatcaagacttattcttcaggtgcacgatgagcttataattgacacacatcctgatgaagttgaaatagtcaaggagcttctaaaatcaataatggaaaatatcataaagttgaaagttcctttagttgtagatatagggcaagggaaaaactggtatgatgcaaaataaaaggatcc

SEQ ID NO: 688 - DNA, 2678 bp, Artificial Sequence
  Description of Artificial Sequence: Synthetic Clostridium thermosulfurogenes DNA Polymerase N790Q
atgaaatacctgctgccgaccgctgctgctggtctgctgctcctcgctgcccagccggcgatggccatggcgaaatttttgatcatagatggtaatagcttgatgtacagggcgtattttgccctgcctgatttgatgaacagcgaaggaatgcatacaaatgccatatacggtttttcaatgatgcttcttaaattgctggaggaggagaaaccagactacatagcaatagctttcgataaaaaggcttctacatttaggcacaaggagtacagtgcttataaaggaacccgccagtcgatgccagaagagctgatagaacaggtggatattttaaaagatgtgataaatgcatttaacataaagaccatcgagatagagggatttgaagcagatgatatcattggtacagtatcaaaaattgcttccgaaagtgggatggatgtgcttatcgtcacaggcgacagagatgcgcttcagcttgtgtcggcaaatgtaaaagtaaaaatatgtaaaaaaggcataacgcagatggatgagtacgatgaaaaggcggtctttgaaaagtatgaagtgacgccgcttcaattcatagacttgaaagggcttatgggagacaaatcagacaacattccaggagtgcccaatataggggagaagacggccataaagcttgttaaagaatttggatcaattgaaaatttactgatgaatacagataagttaaaagggaaaataaaagaaaatgtagaaaacaatgcagaattagctgttttaagcaaacggcttgctacgattgagagaaatgttcctattgatattgatttgaatgaatacgcggttaaaaattacgatgtcaataagcttacagagctatttgaaaaattggaattttcaagcctcatctcagatttaaaagatgatagtcgtgatacaaaggatattaaagaatggcctgtaagagattttacatacgttaaaaatgttttaggaaagtttgatgttttgtcattgtatccattcatatatgatggaaagataaaagcagtatcatttgcttgcggtgacggatcgttttttgtagagattgatgattatgacaattttaaattgcttaataatgataagcttacgttgataggacacgatctgaaagattttttagtaaacatttcatactgcggtattgaacttaattgtaagattttagatacggccataatgacttatcttttaaatccgtctgagtcgaattacgacataagtcgcgtattgaaaaaatacttgaaagaggatttgcaaaacatagatgatatagtaggcaagggcaggaataaaaagagctacgatgacattgacaaaaagcttttagtcgattatatgtgttcagccgcatcaaacttatctaagttaaaagataagctcatgtcatttataaaagagatggagatggaagatcttttaaaaaatgtggaaattccgcttattgaagtgctaaaatctatggaggtgtacggctttacattagataaagatgtacttagaagtatttctaaagaaatagatgaaaagacagataagattgtaaaagatatttacgatgctgctggatacgaatttaatattaactctacaaagcagttatcagaatttttgtttgataaactgaatttgccagcaataaaaaagactaaaacagggtattcgactgacatggaagtccttgcagaacttataccgtacaatgacatagtaggagaaataatagaatatagacagcttatgaagcttaaatctacgtacatagatggcttcattcccatcatggatgaaaataatagggtccactctacgtttaaacaaacagttgctgctacagggagaattagctcaacagagcctaatctgcagaacatacctgtaagagaagaatttggcaggaggataagaaaggcatttgtatcaagttatgaagatgggcttataatatctgctgattattctcagattgagctaagggttcttgcacatctttcagaggatgaaaaacttattgagtcatttttgaacaacgaagatatacatttaaggacggcatcggaggtttttaaggtttcgaaagaagaagtgacaagtgaaatgagaaggcgggcgaaagctgtcaactttggtattgtatatggtataagcgattacggcttatctaaagacttaaagatttcgcgaaaagaagcgaaagaatacatagacaattattttgacaggtacaagggcgtcaaaaattacatcgactcaattgtcaaatttgcaaaggaaaatgggtatgttacgactatcttaaataggagaagatacataccggaaatccaatcaaaaaattttaaccaaagatcttttggcgagagaatggcaatgaatacacctattcaaggtagcgctgcggatataataaagatgtcgatggttaaagtatacaatgaattaaaggaaagaggattgaaatcaagacttattcttcaggtgcacgatgagcttataattgacacacatcctgatgaagttgaaatagtcaaggagcttctaaaatcaataatggaaaatatcataaagttgaaagttcctttagttgtagatatagggcaagggaaaaactggtatgatgcaaaataaaaggatcc

SEQ ID NO: 689 - DNA, 2678 bp, Artificial Sequence
  Description of Artificial Sequence: Synthetic Clostridium thermosulfurogenes DNA Polymerase N790G
atgaaatacctgctgccgaccgctgctgctggtctgctgctcctcgctgcccagccggcgatggccatggcgaaatttttgatcatagatggtaatagcttgatgtacagggcgtattttgccctgcctgatttgatgaacagcgaaggaatgcatacaaatgccatatacggtttttcaatgatgcttcttaaattgctggaggaggagaaaccagactacatagcaatagctttcgataaaaaggcttctacatttaggcacaaggagtacagtgcttataaaggaacccgccagtcgatgccagaagagctgatagaacaggtggatattttaaaagatgtgataaatgcatttaacataaagaccatcgagatagagggatttgaagcagatgatatcattggtacagtatcaaaaattgcttccgaaagtgggatggatgtgcttatcgtcacaggcgacagagatgcgcttcagcttgtgtcggcaaatgtaaaagtaaaaatatgtaaaaaaggcataacgcagatggatgagtacgatgaaaaggcggtctttgaaaagtatgaagtgacgccgcttcaattcatagacttgaaagggcttatgggagacaaatcagacaacattccaggagtgcccaatataggggagaagacggccataaagcttgttaaagaatttggatcaattgaaaatttactgatgaatacagataagttaaaagggaaaataaaagaaaatgtagaaaacaatgcagaattagctgttttaagcaaacggcttgctacgattgagagaaatgttcctattgatattgatttgaatgaatacgcggttaaaaattacgatgtcaataagcttacagagctatttgaaaaattggaattttcaagcctcatctcagatttaaaagatgatagtcgtgatacaaaggatattaaagaatggcctgtaagagattttacatacgttaaaaatgttttaggaaagtttgatgttttgtcattgtatccattcatatatgatggaaagataaaagcagtatcatttgcttgcggtgacggatcgttttttgtagagattgatgattatgacaattttaaattgcttaataatgataagcttacgttgataggacacgatctgaaagattttttagtaaacatttcatactgcggtattgaacttaattgtaagattttagatacggccataatgacttatcttttaaatccgtctgagtcgaattacgacataagtcgcgtattgaaaaaatacttgaaagaggatttgcaaaacatagatgatatagtaggcaagggcaggaataaaaagagctacgatgacattgacaaaaagcttttagtcgattatatgtgttcagccgcatcaaacttatctaagttaaaagataagctcatgtcatttataaaagagatggagatggaagatcttttaaaaaatgtggaaattccgcttattgaagtgctaaaatctatggaggtgtacggctttacattagataaagatgtacttagaagtatttctaaagaaatagatgaaaagacagataagattgtaaaagatatttacgatgctgctggatacgaatttaatattaactctacaaagcagttatcagaatttttgtttgataaactgaatttgccagcaataaaaaagactaaaacagggtattcgactgacatggaagtccttgcagaacttataccgtacaatgacatagtaggagaaataatagaatatagacagcttatgaagcttaaatctacgtacatagatggcttcattcccatcatggatgaaaataatagggtccactctacgtttaaacaaacagttgctgctacagggagaattagctcaacagagcctaatctgcagaacatacctgtaagagaagaatttggcaggaggataagaaaggcatttgtatcaagttatgaagatgggcttataatatctgctgattattctcagattgagctaagggttcttgcacatctttcagaggatgaaaaacttattgagtcatttttgaacaacgaagatatacatttaaggacggcatcggaggtttttaaggtttcgaaagaagaagtgacaagtgaaatgagaaggcgggcgaaagctgtcaactttggtattgtatatggtataagcgattacggcttatctaaagacttaaagatttcgcgaaaagaagcgaaagaatacatagacaattattttgacaggtacaagggcgtcaaaaattacatcgactcaattgtcaaatttgcaaaggaaaatgggtatgttacgactatcttaaataggagaagatacataccggaaatcggttcaaaaaattttaaccaaagatcttttggcgagagaatggcaatgaatacacctattcaaggtagcgctgcggatataataaagatgtcgatggttaaagtatacaatgaattaaaggaaagaggattgaaatcaagacttattcttcaggtgcacgatgagcttataattgacacacatcctgatgaagttgaaatagtcaaggagcttctaaaatcaataatggaaaatatcataaagttgaaagttcctttagttgtagatatagggcaagggaaaaactggtatgatgcaaaataaaaggatcc

SEQ ID NO: 690 - DNA, 2678 bp, Artificial Sequence
  Description of Artificial Sequence: Synthetic Clostridium thermosulfurogenes DNA Polymerase N790H
atgaaatacctgctgccgaccgctgctgctggtctgctgctcctcgctgcccagccggcgatggccatggcgaaatttttgatcatagatggtaatagcttgatgtacagggcgtattttgccctgcctgatttgatgaacagcgaaggaatgcatacaaatgccatatacggtttttcaatgatgcttcttaaattgctggaggaggagaaaccagactacatagcaatagctttcgataaaaaggcttctacatttaggcacaaggagtacagtgcttataaaggaacccgccagtcgatgccagaagagctgatagaacaggtggatattttaaaagatgtgataaatgcatttaacataaagaccatcgagatagagggatttgaagcagatgatatcattggtacagtatcaaaaattgcttccgaaagtgggatggatgtgcttatcgtcacaggcgacagagatgcgcttcagcttgtgtcggcaaatgtaaaagtaaaaatatgtaaaaaaggcataacgcagatggatgagtacgatgaaaaggcggtctttgaaaagtatgaagtgacgccgcttcaattcatagacttgaaagggcttatgggagacaaatcagacaacattccaggagtgcccaatataggggagaagacggccataaagcttgttaaagaatttggatcaattgaaaatttactgatgaatacagataagttaaaagggaaaataaaagaaaatgtagaaaacaatgcagaattagctgttttaagcaaacggcttgctacgattgagagaaatgttcctattgatattgatttgaatgaatacgcggttaaaaattacgatgtcaataagcttacagagctatttgaaaaattggaattttcaagcctcatctcagatttaaaagatgatagtcgtgatacaaaggatattaaagaatggcctgtaagagattttacatacgttaaaaatgttttaggaaagtttgatgttttgtcattgtatccattcatatatgatggaaagataaaagcagtatcatttgcttgcggtgacggatcgttttttgtagagattgatgattatgacaattttaaattgcttaataatgataagcttacgttgataggacacgatctgaaagattttttagtaaacatttcatactgcggtattgaacttaattgtaagattttagatacggccataatgacttatcttttaaatccgtctgagtcgaattacgacataagtcgcgtattgaaaaaatacttgaaagaggatttgcaaaacatagatgatatagtaggcaagggcaggaataaaaagagctacgatgacattgacaaaaagcttttagtcgattatatgtgttcagccgcatcaaacttatctaagttaaaagataagctcatgtcatttataaaagagatggagatggaagatcttttaaaaaatgtggaaattccgcttattgaagtgctaaaatctatggaggtgtacggctttacattagataaagatgtacttagaagtatttctaaagaaatagatgaaaagacagataagattgtaaaagatatttacgatgctgctggatacgaatttaatattaactctacaaagcagttatcagaatttttgtttgataaactgaatttgccagcaataaaaaagactaaaacagggtattcgactgacatggaagtccttgcagaacttataccgtacaatgacatagtaggagaaataatagaatatagacagcttatgaagcttaaatctacgtacatagatggcttcattcccatcatggatgaaaataatagggtccactctacgtttaaacaaacagttgctgctacagggagaattagctcaacagagcctaatctgcagaacatacctgtaagagaagaatttggcaggaggataagaaaggcatttgtatcaagttatgaagatgggcttataatatctgctgattattctcagattgagctaagggttcttgcacatctttcagaggatgaaaaacttattgagtcatttttgaacaacgaagatatacatttaaggacggcatcggaggtttttaaggtttcgaaagaagaagtgacaagtgaaatgagaaggcgggcgaaagctgtcaactttggtattgtatatggtataagcgattacggcttatctaaagacttaaagatttcgcgaaaagaagcgaaagaatacatagacaattattttgacaggtacaagggcgtcaaaaattacatcgactcaattgtcaaatttgcaaaggaaaatgggtatgttacgactatcttaaataggagaagatacataccggaaatccattcaaaaaattttaaccaaagatcttttggcgagagaatggcaatgaatacacctattcaaggtagcgctgcggatataataaagatgtcgatggttaaagtatacaatgaattaaaggaaagaggattgaaatcaagacttattcttcaggtgcacgatgagcttataattgacacacatcctgatgaagttgaaatagtcaaggagcttctaaaatcaataatggaaaatatcataaagttgaaagttcctttagttgtagatatagggcaagggaaaaactggtatgatgcaaaataaaaggatcc

SEQ ID NO: 691 - DNA, 2678 bp, Artificial Sequence
  Description of Artificial Sequence: Synthetic Clostridium thermosulfurogenes DNA Polymerase N790I
atgaaatacctgctgccgaccgctgctgctggtctgctgctcctcgctgcccagccggcgatggccatggcgaaatttttgatcatagatggtaatagcttgatgtacagggcgtattttgccctgcctgatttgatgaacagcgaaggaatgcatacaaatgccatatacggtttttcaatgatgcttcttaaattgctggaggaggagaaaccagactacatagcaatagctttcgataaaaaggcttctacatttaggcacaaggagtacagtgcttataaaggaacccgccagtcgatgccagaagagctgatagaacaggtggatattttaaaagatgtgataaatgcatttaacataaagaccatcgagatagagggatttgaagcagatgatatcattggtacagtatcaaaaattgcttccgaaagtgggatggatgtgcttatcgtcacaggcgacagagatgcgcttcagcttgtgtcggcaaatgtaaaagtaaaaatatgtaaaaaaggcataacgcagatggatgagtacgatgaaaaggcggtctttgaaaagtatgaagtgacgccgcttcaattcatagacttgaaagggcttatgggagacaaatcagacaacattccaggagtgcccaatataggggagaagacggccataaagcttgttaaagaatttggatcaattgaaaatttactgatgaatacagataagttaaaagggaaaataaaagaaaatgtagaaaacaatgcagaattagctgttttaagcaaacggcttgctacgattgagagaaatgttcctattgatattgatttgaatgaatacgcggttaaaaattacgatgtcaataagcttacagagctatttgaaaaattggaattttcaagcctcatctcagatttaaaagatgatagtcgtgatacaaaggatattaaagaatggcctgtaagagattttacatacgttaaaaatgttttaggaaagtttgatgttttgtcattgtatccattcatatatgatggaaagataaaagcagtatcatttgcttgcggtgacggatcgttttttgtagagattgatgattatgacaattttaaattgcttaataatgataagcttacgttgataggacacgatctgaaagattttttagtaaacatttcatactgcggtattgaacttaattgtaagattttagatacggccataatgacttatcttttaaatccgtctgagtcgaattacgacataagtcgcgtattgaaaaaatacttgaaagaggatttgcaaaacatagatgatatagtaggcaagggcaggaataaaaagagctacgatgacattgacaaaaagcttttagtcgattatatgtgttcagccgcatcaaacttatctaagttaaaagataagctcatgtcatttataaaagagatggagatggaagatcttttaaaaaatgtggaaattccgcttattgaagtgctaaaatctatggaggtgtacggctttacattagataaagatgtacttagaagtatttctaaagaaatagatgaaaagacagataagattgtaaaagatatttacgatgctgctggatacgaatttaatattaactctacaaagcagttatcagaatttttgtttgataaactgaatttgccagcaataaaaaagactaaaacagggtattcgactgacatggaagtccttgcagaacttataccgtacaatgacatagtaggagaaataatagaatatagacagcttatgaagcttaaatctacgtacatagatggcttcattcccatcatggatgaaaataatagggtccactctacgtttaaacaaacagttgctgctacagggagaattagctcaacagagcctaatctgcagaacatacctgtaagagaagaatttggcaggaggataagaaaggcatttgtatcaagttatgaagatgggcttataatatctgctgattattctcagattgagctaagggttcttgcacatctttcagaggatgaaaaacttattgagtcatttttgaacaacgaagatatacatttaaggacggcatcggaggtttttaaggtttcgaaagaagaagtgacaagtgaaatgagaaggcgggcgaaagctgtcaactttggtattgtatatggtataagcgattacggcttatctaaagacttaaagatttcgcgaaaagaagcgaaagaatacatagacaattattttgacaggtacaagggcgtcaaaaattacatcgactcaattgtcaaatttgcaaaggaaaatgggtatgttacgactatcttaaataggagaagatacataccggaaatcatttcaaaaaattttaaccaaagatcttttggcgagagaatggcaatgaatacacctattcaaggtagcgctgcggatataataaagatgtcgatggttaaagtatacaatgaattaaaggaaagaggattgaaatcaagacttattcttcaggtgcacgatgagcttataattgacacacatcctgatgaagttgaaatagtcaaggagcttctaaaatcaataatggaaaatatcataaagttgaaagttcctttagttgtagatatagggcaagggaaaaactggtatgatgcaaaataaaaggatcc

SEQ ID NO: 692 - DNA, 2678 bp, Artificial Sequence
  Description of Artificial Sequence: Synthetic Clostridium thermosulfurogenes DNA Polymerase N790L
atgaaatacctgctgccgaccgctgctgctggtctgctgctcctcgctgcccagccggcgatggccatggcgaaatttttgatcatagatggtaatagcttgatgtacagggcgtattttgccctgcctgatttgatgaacagcgaaggaatgcatacaaatgccatatacggtttttcaatgatgcttcttaaattgctggaggaggagaaaccagactacatagcaatagctttcgataaaaaggcttctacatttaggcacaaggagtacagtgcttataaaggaacccgccagtcgatgccagaagagctgatagaacaggtggatattttaaaagatgtgataaatgcatttaacataaagaccatcgagatagagggatttgaagcagatgatatcattggtacagtatcaaaaattgcttccgaaagtgggatggatgtgcttatcgtcacaggcgacagagatgcgcttcagcttgtgtcggcaaatgtaaaagtaaaaatatgtaaaaaaggcataacgcagatggatgagtacgatgaaaaggcggtctttgaaaagtatgaagtgacgccgcttcaattcatagacttgaaagggcttatgggagacaaatcagacaacattccaggagtgcccaatataggggagaagacggccataaagcttgttaaagaatttggatcaattgaaaatttactgatgaatacagataagttaaaagggaaaataaaagaaaatgtagaaaacaatgcagaattagctgttttaagcaaacggcttgctacgattgagagaaatgttcctattgatattgatttgaatgaatacgcggttaaaaattacgatgtcaataagcttacagagctatttgaaaaattggaattttcaagcctcatctcagatttaaaagatgatagtcgtgatacaaaggatattaaagaatggcctgtaagagattttacatacgttaaaaatgttttaggaaagtttgatgttttgtcattgtatccattcatatatgatggaaagataaaagcagtatcatttgcttgcggtgacggatcgttttttgtagagattgatgattatgacaattttaaattgcttaataatgataagcttacgttgataggacacgatctgaaagattttttagtaaacatttcatactgcggtattgaacttaattgtaagattttagatacggccataatgacttatcttttaaatccgtctgagtcgaattacgacataagtcgcgtattgaaaaaatacttgaaagaggatttgcaaaacatagatgatatagtaggcaagggcaggaataaaaagagctacgatgacattgacaaaaagcttttagtcgattatatgtgttcagccgcatcaaacttatctaagttaaaagataagctcatgtcatttataaaagagatggagatggaagatcttttaaaaaatgtggaaattccgcttattgaagtgctaaaatctatggaggtgtacggctttacattagataaagatgtacttagaagtatttctaaagaaatagatgaaaagacagataagattgtaaaagatatttacgatgctgctggatacgaatttaatattaactctacaaagcagttatcagaatttttgtttgataaactgaatttgccagcaataaaaaagactaaaacagggtattcgactgacatggaagtccttgcagaacttataccgtacaatgacatagtaggagaaataatagaatatagacagcttatgaagcttaaatctacgtacatagatggcttcattcccatcatggatgaaaataatagggtccactctacgtttaaacaaacagttgctgctacagggagaattagctcaacagagcctaatctgcagaacatacctgtaagagaagaatttggcaggaggataagaaaggcatttgtatcaagttatgaagatgggcttataatatctgctgattattctcagattgagctaagggttcttgcacatctttcagaggatgaaaaacttattgagtcatttttgaacaacgaagatatacatttaaggacggcatcggaggtttttaaggtttcgaaagaagaagtgacaagtgaaatgagaaggcgggcgaaagctgtcaactttggtattgtatatggtataagcgattacggcttatctaaagacttaaagatttcgcgaaaagaagcgaaagaatacatagacaattattttgacaggtacaagggcgtcaaaaattacatcgactcaattgtcaaatttgcaaaggaaaatgggtatgttacgactatcttaaataggagaagatacataccggaaatcctttcaaaaaattttaaccaaagatcttttggcgagagaatggcaatgaatacacctattcaaggtagcgctgcggatataataaagatgtcgatggttaaagtatacaatgaattaaaggaaagaggattgaaatcaagacttattcttcaggtgcacgatgagcttataattgacacacatcctgatgaagttgaaatagtcaaggagcttctaaaatcaataatggaaaatatcataaagttgaaagttcctttagttgtagatatagggcaagggaaaaactggtatgatgcaaaataaaaggatcc

SEQ ID NO: 693 - DNA, 2678 bp, Artificial Sequence
  Description of Artificial Sequence: Synthetic Clostridium thermosulfurogenes DNA Polymerase N790K
atgaaatacctgctgccgaccgctgctgctggtctgctgctcctcgctgcccagccggcgatggccatggcgaaatttttgatcatagatggtaatagcttgatgtacagggcgtattttgccctgcctgatttgatgaacagcgaaggaatgcatacaaatgccatatacggtttttcaatgatgcttcttaaattgctggaggaggagaaaccagactacatagcaatagctttcgataaaaaggcttctacatttaggcacaaggagtacagtgcttataaaggaacccgccagtcgatgccagaagagctgatagaacaggtggatattttaaaagatgtgataaatgcatttaacataaagaccatcgagatagagggatttgaagcagatgatatcattggtacagtatcaaaaattgcttccgaaagtgggatggatgtgcttatcgtcacaggcgacagagatgcgcttcagcttgtgtcggcaaatgtaaaagtaaaaatatgtaaaaaaggcataacgcagatggatgagtacgatgaaaaggcggtctttgaaaagtatgaagtgacgccgcttcaattcatagacttgaaagggcttatgggagacaaatcagacaacattccaggagtgcccaatataggggagaagacggccataaagcttgttaaagaatttggatcaattgaaaatttactgatgaatacagataagttaaaagggaaaataaaagaaaatgtagaaaacaatgcagaattagctgttttaagcaaacggcttgctacgattgagagaaatgttcctattgatattgatttgaatgaatacgcggttaaaaattacgatgtcaataagcttacagagctatttgaaaaattggaattttcaagcctcatctcagatttaaaagatgatagtcgtgatacaaaggatattaaagaatggcctgtaagagattttacatacgttaaaaatgttttaggaaagtttgatgttttgtcattgtatccattcatatatgatggaaagataaaagcagtatcatttgcttgcggtgacggatcgttttttgtagagattgatgattatgacaattttaaattgcttaataatgataagcttacgttgataggacacgatctgaaagattttttagtaaacatttcatactgcggtattgaacttaattgtaagattttagatacggccataatgacttatcttttaaatccgtctgagtcgaattacgacataagtcgcgtattgaaaaaatacttgaaagaggatttgcaaaacatagatgatatagtaggcaagggcaggaataaaaagagctacgatgacattgacaaaaagcttttagtcgattatatgtgttcagccgcatcaaacttatctaagttaaaagataagctcatgtcatttataaaagagatggagatggaagatcttttaaaaaatgtggaaattccgcttattgaagtgctaaaatctatggaggtgtacggctttacattagataaagatgtacttagaagtatttctaaagaaatagatgaaaagacagataagattgtaaaagatatttacgatgctgctggatacgaatttaatattaactctacaaagcagttatcagaatttttgtttgataaactgaatttgccagcaataaaaaagactaaaacagggtattcgactgacatggaagtccttgcagaacttataccgtacaatgacatagtaggagaaataatagaatatagacagcttatgaagcttaaatctacgtacatagatggcttcattcccatcatggatgaaaataatagggtccactctacgtttaaacaaacagttgctgctacagggagaattagctcaacagagcctaatctgcagaacatacctgtaagagaagaatttggcaggaggataagaaaggcatttgtatcaagttatgaagatgggcttataatatctgctgattattctcagattgagctaagggttcttgcacatctttcagaggatgaaaaacttattgagtcatttttgaacaacgaagatatacatttaaggacggcatcggaggtttttaaggtttcgaaagaagaagtgacaagtgaaatgagaaggcgggcgaaagctgtcaactttggtattgtatatggtataagcgattacggcttatctaaagacttaaagatttcgcgaaaagaagcgaaagaatacatagacaattattttgacaggtacaagggcgtcaaaaattacatcgactcaattgtcaaatttgcaaaggaaaatgggtatgttacgactatcttaaataggagaagatacataccggaaatcaaatcaaaaaattttaaccaaagatcttttggcgagagaatggcaatgaatacacctattcaaggtagcgctgcggatataataaagatgtcgatggttaaagtatacaatgaattaaaggaaagaggattgaaatcaagacttattcttcaggtgcacgatgagcttataattgacacacatcctgatgaagttgaaatagtcaaggagcttctaaaatcaataatggaaaatatcataaagttgaaagttcctttagttgtagatatagggcaagggaaaaactggtatgatgcaaaataaaaggatcc

SEQ ID NO: 694 - DNA, 2678 bp, Artificial Sequence
  Description of Artificial Sequence: Synthetic Clostridium thermosulfurogenes DNA Polymerase N790M
atgaaatacctgctgccgaccgctgctgctggtctgctgctcctcgctgcccagccggcgatggccatggcgaaatttttgatcatagatggtaatagcttgatgtacagggcgtattttgccctgcctgatttgatgaacagcgaaggaatgcatacaaatgccatatacggtttttcaatgatgcttcttaaattgctggaggaggagaaaccagactacatagcaatagctttcgataaaaaggcttctacatttaggcacaaggagtacagtgcttataaaggaacccgccagtcgatgccagaagagctgatagaacaggtggatattttaaaagatgtgataaatgcatttaacataaagaccatcgagatagagggatttgaagcagatgatatcattggtacagtatcaaaaattgcttccgaaagtgggatggatgtgcttatcgtcacaggcgacagagatgcgcttcagcttgtgtcggcaaatgtaaaagtaaaaatatgtaaaaaaggcataacgcagatggatgagtacgatgaaaaggcggtctttgaaaagtatgaagtgacgccgcttcaattcatagacttgaaagggcttatgggagacaaatcagacaacattccaggagtgcccaatataggggagaagacggccataaagcttgttaaagaatttggatcaattgaaaatttactgatgaatacagataagttaaaagggaaaataaaagaaaatgtagaaaacaatgcagaattagctgttttaagcaaacggcttgctacgattgagagaaatgttcctattgatattgatttgaatgaatacgcggttaaaaattacgatgtcaataagcttacagagctatttgaaaaattggaattttcaagcctcatctcagatttaaaagatgatagtcgtgatacaaaggatattaaagaatggcctgtaagagattttacatacgttaaaaatgttttaggaaagtttgatgttttgtcattgtatccattcatatatgatggaaagataaaagcagtatcatttgcttgcggtgacggatcgttttttgtagagattgatgattatgacaattttaaattgcttaataatgataagcttacgttgataggacacgatctgaaagattttttagtaaacatttcatactgcggtattgaacttaattgtaagattttagatacggccataatgacttatcttttaaatccgtctgagtcgaattacgacataagtcgcgtattgaaaaaatacttgaaagaggatttgcaaaacatagatgatatagtaggcaagggcaggaataaaaagagctacgatgacattgacaaaaagcttttagtcgattatatgtgttcagccgcatcaaacttatctaagttaaaagataagctcatgtcatttataaaagagatggagatggaagatcttttaaaaaatgtggaaattccgcttattgaagtgctaaaatctatggaggtgtacggctttacattagataaagatgtacttagaagtatttctaaagaaatagatgaaaagacagataagattgtaaaagatatttacgatgctgctggatacgaatttaatattaactctacaaagcagttatcagaatttttgtttgataaactgaatttgccagcaataaaaaagactaaaacagggtattcgactgacatggaagtccttgcagaacttataccgtacaatgacatagtaggagaaataatagaatatagacagcttatgaagcttaaatctacgtacatagatggcttcattcccatcatggatgaaaataatagggtccactctacgtttaaacaaacagttgctgctacagggagaattagctcaacagagcctaatctgcagaacatacctgtaagagaagaatttggcaggaggataagaaaggcatttgtatcaagttatgaagatgggcttataatatctgctgattattctcagattgagctaagggttcttgcacatctttcagaggatgaaaaacttattgagtcatttttgaacaacgaagatatacatttaaggacggcatcggaggtttttaaggtttcgaaagaagaagtgacaagtgaaatgagaaggcgggcgaaagctgtcaactttggtattgtatatggtataagcgattacggcttatctaaagacttaaagatttcgcgaaaagaagcgaaagaatacatagacaattattttgacaggtacaagggcgtcaaaaattacatcgactcaattgtcaaatttgcaaaggaaaatgggtatgttacgactatcttaaataggagaagatacataccggaaatcatgtcaaaaaattttaaccaaagatcttttggcgagagaatggcaatgaatacacctattcaaggtagcgctgcggatataataaagatgtcgatggttaaagtatacaatgaattaaaggaaagaggattgaaatcaagacttattcttcaggtgcacgatgagcttataattgacacacatcctgatgaagttgaaatagtcaaggagcttctaaaatcaataatggaaaatatcataaagttgaaagttcctttagttgtagatatagggcaagggaaaaactggtatgatgcaaaataaaaggatcc

SEQ ID NO: 695 - DNA, 2678 bp, Artificial Sequence
  Description of Artificial Sequence: Synthetic Clostridium thermosulfurogenes DNA Polymerase N790F
atgaaatacctgctgccgaccgctgctgctggtctgctgctcctcgctgcccagccggcgatggccatggcgaaatttttgatcatagatggtaatagcttgatgtacagggcgtattttgccctgcctgatttgatgaacagcgaaggaatgcatacaaatgccatatacggtttttcaatgatgcttcttaaattgctggaggaggagaaaccagactacatagcaatagctttcgataaaaaggcttctacatttaggcacaaggagtacagtgcttataaaggaacccgccagtcgatgccagaagagctgatagaacaggtggatattttaaaagatgtgataaatgcatttaacataaagaccatcgagatagagggatttgaagcagatgatatcattggtacagtatcaaaaattgcttccgaaagtgggatggatgtgcttatcgtcacaggcgacagagatgcgcttcagcttgtgtcggcaaatgtaaaagtaaaaatatgtaaaaaaggcataacgcagatggatgagtacgatgaaaaggcggtctttgaaaagtatgaagtgacgccgcttcaattcatagacttgaaagggcttatgggagacaaatcagacaacattccaggagtgcccaatataggggagaagacggccataaagcttgttaaagaatttggatcaattgaaaatttactgatgaatacagataagttaaaagggaaaataaaagaaaatgtagaaaacaatgcagaattagctgttttaagcaaacggcttgctacgattgagagaaatgttcctattgatattgatttgaatgaatacgcggttaaaaattacgatgtcaataagcttacagagctatttgaaaaattggaattttcaagcctcatctcagatttaaaagatgatagtcgtgatacaaaggatattaaagaatggcctgtaagagattttacatacgttaaaaatgttttaggaaagtttgatgttttgtcattgtatccattcatatatgatggaaagataaaagcagtatcatttgcttgcggtgacggatcgttttttgtagagattgatgattatgacaattttaaattgcttaataatgataagcttacgttgataggacacgatctgaaagattttttagtaaacatttcatactgcggtattgaacttaattgtaagattttagatacggccataatgacttatcttttaaatccgtctgagtcgaattacgacataagtcgcgtattgaaaaaatacttgaaagaggatttgcaaaacatagatgatatagtaggcaagggcaggaataaaaagagctacgatgacattgacaaaaagcttttagtcgattatatgtgttcagccgcatcaaacttatctaagttaaaagataagctcatgtcatttataaaagagatggagatggaagatcttttaaaaaatgtggaaattccgcttattgaagtgctaaaatctatggaggtgtacggctttacattagataaagatgtacttagaagtatttctaaagaaatagatgaaaagacagataagattgtaaaagatatttacgatgctgctggatacgaatttaatattaactctacaaagcagttatcagaatttttgtttgataaactgaatttgccagcaataaaaaagactaaaacagggtattcgactgacatggaagtccttgcagaacttataccgtacaatgacatagtaggagaaataatagaatatagacagcttatgaagcttaaatctacgtacatagatggcttcattcccatcatggatgaaaataatagggtccactctacgtttaaacaaacagttgctgctacagggagaattagctcaacagagcctaatctgcagaacatacctgtaagagaagaatttggcaggaggataagaaaggcatttgtatcaagttatgaagatgggcttataatatctgctgattattctcagattgagctaagggttcttgcacatctttcagaggatgaaaaacttattgagtcatttttgaacaacgaagatatacatttaaggacggcatcggaggtttttaaggtttcgaaagaagaagtgacaagtgaaatgagaaggcgggcgaaagctgtcaactttggtattgtatatggtataagcgattacggcttatctaaagacttaaagatttcgcgaaaagaagcgaaagaatacatagacaattattttgacaggtacaagggcgtcaaaaattacatcgactcaattgtcaaatttgcaaaggaaaatgggtatgttacgactatcttaaataggagaagatacataccggaaatcttttcaaaaaattttaaccaaagatcttttggcgagagaatggcaatgaatacacctattcaaggtagcgctgcggatataataaagatgtcgatggttaaagtatacaatgaattaaaggaaagaggattgaaatcaagacttattcttcaggtgcacgatgagcttataattgacacacatcctgatgaagttgaaatagtcaaggagcttctaaaatcaataatggaaaatatcataaagttgaaagttcctttagttgtagatatagggcaagggaaaaactggtatgatgcaaaataaaaggatcc

SEQ ID NO: 696 - DNA, 2678 bp, Artificial Sequence
  Description of Artificial Sequence: Synthetic Clostridium thermosulfurogenes DNA Polymerase N790P
atgaaatacctgctgccgaccgctgctgctggtctgctgctcctcgctgcccagccggcgatggccatggcgaaatttttgatcatagatggtaatagcttgatgtacagggcgtattttgccctgcctgatttgatgaacagcgaaggaatgcatacaaatgccatatacggtttttcaatgatgcttcttaaattgctggaggaggagaaaccagactacatagcaatagctttcgataaaaaggcttctacatttaggcacaaggagtacagtgcttataaaggaacccgccagtcgatgccagaagagctgatagaacaggtggatattttaaaagatgtgataaatgcatttaacataaagaccatcgagatagagggatttgaagcagatgatatcattggtacagtatcaaaaattgcttccgaaagtgggatggatgtgcttatcgtcacaggcgacagagatgcgcttcagcttgtgtcggcaaatgtaaaagtaaaaatatgtaaaaaaggcataacgcagatggatgagtacgatgaaaaggcggtctttgaaaagtatgaagtgacgccgcttcaattcatagacttgaaagggcttatgggagacaaatcagacaacattccaggagtgcccaatataggggagaagacggccataaagcttgttaaagaatttggatcaattgaaaatttactgatgaatacagataagttaaaagggaaaataaaagaaaatgtagaaaacaatgcagaattagctgttttaagcaaacggcttgctacgattgagagaaatgttcctattgatattgatttgaatgaatacgcggttaaaaattacgatgtcaataagcttacagagctatttgaaaaattggaattttcaagcctcatctcagatttaaaagatgatagtcgtgatacaaaggatattaaagaatggcctgtaagagattttacatacgttaaaaatgttttaggaaagtttgatgttttgtcattgtatccattcatatatgatggaaagataaaagcagtatcatttgcttgcggtgacggatcgttttttgtagagattgatgattatgacaattttaaattgcttaataatgataagcttacgttgataggacacgatctgaaagattttttagtaaacatttcatactgcggtattgaacttaattgtaagattttagatacggccataatgacttatcttttaaatccgtctgagtcgaattacgacataagtcgcgtattgaaaaaatacttgaaagaggatttgcaaaacatagatgatatagtaggcaagggcaggaataaaaagagctacgatgacattgacaaaaagcttttagtcgattatatgtgttcagccgcatcaaacttatctaagttaaaagataagctcatgtcatttataaaagagatggagatggaagatcttttaaaaaatgtggaaattccgcttattgaagtgctaaaatctatggaggtgtacggctttacattagataaagatgtacttagaagtatttctaaagaaatagatgaaaagacagataagattgtaaaagatatttacgatgctgctggatacgaatttaatattaactctacaaagcagttatcagaatttttgtttgataaactgaatttgccagcaataaaaaagactaaaacagggtattcgactgacatggaagtccttgcagaacttataccgtacaatgacatagtaggagaaataatagaatatagacagcttatgaagcttaaatctacgtacatagatggcttcattcccatcatggatgaaaataatagggtccactctacgtttaaacaaacagttgctgctacagggagaattagctcaacagagcctaatctgcagaacatacctgtaagagaagaatttggcaggaggataagaaaggcatttgtatcaagttatgaagatgggcttataatatctgctgattattctcagattgagctaagggttcttgcacatctttcagaggatgaaaaacttattgagtcatttttgaacaacgaagatatacatttaaggacggcatcggaggtttttaaggtttcgaaagaagaagtgacaagtgaaatgagaaggcgggcgaaagctgtcaactttggtattgtatatggtataagcgattacggcttatctaaagacttaaagatttcgcgaaaagaagcgaaagaatacatagacaattattttgacaggtacaagggcgtcaaaaattacatcgactcaattgtcaaatttgcaaaggaaaatgggtatgttacgactatcttaaataggagaagatacataccggaaatcccttcaaaaaattttaaccaaagatcttttggcgagagaatggcaatgaatacacctattcaaggtagcgctgcggatataataaagatgtcgatggttaaagtatacaatgaattaaaggaaagaggattgaaatcaagacttattcttcaggtgcacgatgagcttataattgacacacatcctgatgaagttgaaatagtcaaggagcttctaaaatcaataatggaaaatatcataaagttgaaagttcctttagttgtagatatagggcaagggaaaaactggtatgatgcaaaataaaaggatcc

SEQ ID NO: 697 - DNA, 2678 bp, Artificial Sequence
  Description of Artificial Sequence: Synthetic Clostridium thermosulfurogenes DNA Polymerase N790S
atgaaatacctgctgccgaccgctgctgctggtctgctgctcctcgctgcccagccggcgatggccatggcgaaatttttgatcatagatggtaatagcttgatgtacagggcgtattttgccctgcctgatttgatgaacagcgaaggaatgcatacaaatgccatatacggtttttcaatgatgcttcttaaattgctggaggaggagaaaccagactacatagcaatagctttcgataaaaaggcttctacatttaggcacaaggagtacagtgcttataaaggaacccgccagtcgatgccagaagagctgatagaacaggtggatattttaaaagatgtgataaatgcatttaacataaagaccatcgagatagagggatttgaagcagatgatatcattggtacagtatcaaaaattgcttccgaaagtgggatggatgtgcttatcgtcacaggcgacagagatgcgcttcagcttgtgtcggcaaatgtaaaagtaaaaatatgtaaaaaaggcataacgcagatggatgagtacgatgaaaaggcggtctttgaaaagtatgaagtgacgccgcttcaattcatagacttgaaagggcttatgggagacaaatcagacaacattccaggagtgcccaatataggggagaagacggccataaagcttgttaaagaatttggatcaattgaaaatttactgatgaatacagataagttaaaagggaaaataaaagaaaatgtagaaaacaatgcagaattagctgttttaagcaaacggcttgctacgattgagagaaatgttcctattgatattgatttgaatgaatacgcggttaaaaattacgatgtcaataagcttacagagctatttgaaaaattggaattttcaagcctcatctcagatttaaaagatgatagtcgtgatacaaaggatattaaagaatggcctgtaagagattttacatacgttaaaaatgttttaggaaagtttgatgttttgtcattgtatccattcatatatgatggaaagataaaagcagtatcatttgcttgcggtgacggatcgttttttgtagagattgatgattatgacaattttaaattgcttaataatgataagcttacgttgataggacacgatctgaaagattttttagtaaacatttcatactgcggtattgaacttaattgtaagattttagatacggccataatgacttatcttttaaatccgtctgagtcgaattacgacataagtcgcgtattgaaaaaatacttgaaagaggatttgcaaaacatagatgatatagtaggcaagggcaggaataaaaagagctacgatgacattgacaaaaagcttttagtcgattatatgtgttcagccgcatcaaacttatctaagttaaaagataagctcatgtcatttataaaagagatggagatggaagatcttttaaaaaatgtggaaattccgcttattgaagtgctaaaatctatggaggtgtacggctttacattagataaagatgtacttagaagtatttctaaagaaatagatgaaaagacagataagattgtaaaagatatttacgatgctgctggatacgaatttaatattaactctacaaagcagttatcagaatttttgtttgataaactgaatttgccagcaataaaaaagactaaaacagggtattcgactgacatggaagtccttgcagaacttataccgtacaatgacatagtaggagaaataatagaatatagacagcttatgaagcttaaatctacgtacatagatggcttcattcccatcatggatgaaaataatagggtccactctacgtttaaacaaacagttgctgctacagggagaattagctcaacagagcctaatctgcagaacatacctgtaagagaagaatttggcaggaggataagaaaggcatttgtatcaagttatgaagatgggcttataatatctgctgattattctcagattgagctaagggttcttgcacatctttcagaggatgaaaaacttattgagtcatttttgaacaacgaagatatacatttaaggacggcatcggaggtttttaaggtttcgaaagaagaagtgacaagtgaaatgagaaggcgggcgaaagctgtcaactttggtattgtatatggtataagcgattacggcttatctaaagacttaaagatttcgcgaaaagaagcgaaagaatacatagacaattattttgacaggtacaagggcgtcaaaaattacatcgactcaattgtcaaatttgcaaaggaaaatgggtatgttacgactatcttaaataggagaagatacataccggaaatctcttcaaaaaattttaaccaaagatcttttggcgagagaatggcaatgaatacacctattcaaggtagcgctgcggatataataaagatgtcgatggttaaagtatacaatgaattaaaggaaagaggattgaaatcaagacttattcttcaggtgcacgatgagcttataattgacacacatcctgatgaagttgaaatagtcaaggagcttctaaaatcaataatggaaaatatcataaagttgaaagttcctttagttgtagatatagggcaagggaaaaactggtatgatgcaaaataaaaggatcc

SEQ ID NO: 698 - DNA, 2678 bp, Artificial Sequence
  Description of Artificial Sequence: Synthetic Clostridium thermosulfurogenes DNA Polymerase N790T
atgaaatacctgctgccgaccgctgctgctggtctgctgctcctcgctgcccagccggcgatggccatggcgaaatttttgatcatagatggtaatagcttgatgtacagggcgtattttgccctgcctgatttgatgaacagcgaaggaatgcatacaaatgccatatacggtttttcaatgatgcttcttaaattgctggaggaggagaaaccagactacatagcaatagctttcgataaaaaggcttctacatttaggcacaaggagtacagtgcttataaaggaacccgccagtcgatgccagaagagctgatagaacaggtggatattttaaaagatgtgataaatgcatttaacataaagaccatcgagatagagggatttgaagcagatgatatcattggtacagtatcaaaaattgcttccgaaagtgggatggatgtgcttatcgtcacaggcgacagagatgcgcttcagcttgtgtcggcaaatgtaaaagtaaaaatatgtaaaaaaggcataacgcagatggatgagtacgatgaaaaggcggtctttgaaaagtatgaagtgacgccgcttcaattcatagacttgaaagggcttatgggagacaaatcagacaacattccaggagtgcccaatataggggagaagacggccataaagcttgttaaagaatttggatcaattgaaaatttactgatgaatacagataagttaaaagggaaaataaaagaaaatgtagaaaacaatgcagaattagctgttttaagcaaacggcttgctacgattgagagaaatgttcctattgatattgatttgaatgaatacgcggttaaaaattacgatgtcaataagcttacagagctatttgaaaaattggaattttcaagcctcatctcagatttaaaagatgatagtcgtgatacaaaggatattaaagaatggcctgtaagagattttacatacgttaaaaatgttttaggaaagtttgatgttttgtcattgtatccattcatatatgatggaaagataaaagcagtatcatttgcttgcggtgacggatcgttttttgtagagattgatgattatgacaattttaaattgcttaataatgataagcttacgttgataggacacgatctgaaagattttttagtaaacatttcatactgcggtattgaacttaattgtaagattttagatacggccataatgacttatcttttaaatccgtctgagtcgaattacgacataagtcgcgtattgaaaaaatacttgaaagaggatttgcaaaacatagatgatatagtaggcaagggcaggaataaaaagagctacgatgacattgacaaaaagcttttagtcgattatatgtgttcagccgcatcaaacttatctaagttaaaagataagctcatgtcatttataaaagagatggagatggaagatcttttaaaaaatgtggaaattccgcttattgaagtgctaaaatctatggaggtgtacggctttacattagataaagatgtacttagaagtatttctaaagaaatagatgaaaagacagataagattgtaaaagatatttacgatgctgctggatacgaatttaatattaactctacaaagcagttatcagaatttttgtttgataaactgaatttgccagcaataaaaaagactaaaacagggtattcgactgacatggaagtccttgcagaacttataccgtacaatgacatagtaggagaaataatagaatatagacagcttatgaagcttaaatctacgtacatagatggcttcattcccatcatggatgaaaataatagggtccactctacgtttaaacaaacagttgctgctacagggagaattagctcaacagagcctaatctgcagaacatacctgtaagagaagaatttggcaggaggataagaaaggcatttgtatcaagttatgaagatgggcttataatatctgctgattattctcagattgagctaagggttcttgcacatctttcagaggatgaaaaacttattgagtcatttttgaacaacgaagatatacatttaaggacggcatcggaggtttttaaggtttcgaaagaagaagtgacaagtgaaatgagaaggcgggcgaaagctgtcaactttggtattgtatatggtataagcgattacggcttatctaaagacttaaagatttcgcgaaaagaagcgaaagaatacatagacaattattttgacaggtacaagggcgtcaaaaattacatcgactcaattgtcaaatttgcaaaggaaaatgggtatgttacgactatcttaaataggagaagatacataccggaaatcacttcaaaaaattttaaccaaagatcttttggcgagagaatggcaatgaatacacctattcaaggtagcgctgcggatataataaagatgtcgatggttaaagtatacaatgaattaaaggaaagaggattgaaatcaagacttattcttcaggtgcacgatgagcttataattgacacacatcctgatgaagttgaaatagtcaaggagcttctaaaatcaataatggaaaatatcataaagttgaaagttcctttagttgtagatatagggcaagggaaaaactggtatgatgcaaaataaaaggatcc

SEQ ID NO: 699 - DNA, 2678 bp, Artificial Sequence
  Description of Artificial Sequence: Synthetic Clostridium thermosulfurogenes DNA Polymerase N790W
atgaaatacctgctgccgaccgctgctgctggtctgctgctcctcgctgcccagccggcgatggccatggcgaaatttttgatcatagatggtaatagcttgatgtacagggcgtattttgccctgcctgatttgatgaacagcgaaggaatgcatacaaatgccatatacggtttttcaatgatgcttcttaaattgctggaggaggagaaaccagactacatagcaatagctttcgataaaaaggcttctacatttaggcacaaggagtacagtgcttataaaggaacccgccagtcgatgccagaagagctgatagaacaggtggatattttaaaagatgtgataaatgcatttaacataaagaccatcgagatagagggatttgaagcagatgatatcattggtacagtatcaaaaattgcttccgaaagtgggatggatgtgcttatcgtcacaggcgacagagatgcgcttcagcttgtgtcggcaaatgtaaaagtaaaaatatgtaaaaaaggcataacgcagatggatgagtacgatgaaaaggcggtctttgaaaagtatgaagtgacgccgcttcaattcatagacttgaaagggcttatgggagacaaatcagacaacattccaggagtgcccaatataggggagaagacggccataaagcttgttaaagaatttggatcaattgaaaatttactgatgaatacagataagttaaaagggaaaataaaagaaaatgtagaaaacaatgcagaattagctgttttaagcaaacggcttgctacgattgagagaaatgttcctattgatattgatttgaatgaatacgcggttaaaaattacgatgtcaataagcttacagagctatttgaaaaattggaattttcaagcctcatctcagatttaaaagatgatagtcgtgatacaaaggatattaaagaatggcctgtaagagattttacatacgttaaaaatgttttaggaaagtttgatgttttgtcattgtatccattcatatatgatggaaagataaaagcagtatcatttgcttgcggtgacggatcgttttttgtagagattgatgattatgacaattttaaattgcttaataatgataagcttacgttgataggacacgatctgaaagattttttagtaaacatttcatactgcggtattgaacttaattgtaagattttagatacggccataatgacttatcttttaaatccgtctgagtcgaattacgacataagtcgcgtattgaaaaaatacttgaaagaggatttgcaaaacatagatgatatagtaggcaagggcaggaataaaaagagctacgatgacattgacaaaaagcttttagtcgattatatgtgttcagccgcatcaaacttatctaagttaaaagataagctcatgtcatttataaaagagatggagatggaagatcttttaaaaaatgtggaaattccgcttattgaagtgctaaaatctatggaggtgtacggctttacattagataaagatgtacttagaagtatttctaaagaaatagatgaaaagacagataagattgtaaaagatatttacgatgctgctggatacgaatttaatattaactctacaaagcagttatcagaatttttgtttgataaactgaatttgccagcaataaaaaagactaaaacagggtattcgactgacatggaagtccttgcagaacttataccgtacaatgacatagtaggagaaataatagaatatagacagcttatgaagcttaaatctacgtacatagatggcttcattcccatcatggatgaaaataatagggtccactctacgtttaaacaaacagttgctgctacagggagaattagctcaacagagcctaatctgcagaacatacctgtaagagaagaatttggcaggaggataagaaaggcatttgtatcaagttatgaagatgggcttataatatctgctgattattctcagattgagctaagggttcttgcacatctttcagaggatgaaaaacttattgagtcatttttgaacaacgaagatatacatttaaggacggcatcggaggtttttaaggtttcgaaagaagaagtgacaagtgaaatgagaaggcgggcgaaagctgtcaactttggtattgtatatggtataagcgattacggcttatctaaagacttaaagatttcgcgaaaagaagcgaaagaatacatagacaattattttgacaggtacaagggcgtcaaaaattacatcgactcaattgtcaaatttgcaaaggaaaatgggtatgttacgactatcttaaataggagaagatacataccggaaatctggtcaaaaaattttaaccaaagatcttttggcgagagaatggcaatgaatacacctattcaaggtagcgctgcggatataataaagatgtcgatggttaaagtatacaatgaattaaaggaaagaggattgaaatcaagacttattcttcaggtgcacgatgagcttataattgacacacatcctgatgaagttgaaatagtcaaggagcttctaaaatcaataatggaaaatatcataaagttgaaagttcctttagttgtagatatagggcaagggaaaaactggtatgatgcaaaataaaaggatcc

SEQ ID NO: 700 - DNA, 2678 bp, Artificial Sequence
  Description of Artificial Sequence: Synthetic Clostridium thermosulfurogenes DNA Polymerase N790Y
atgaaatacctgctgccgaccgctgctgctggtctgctgctcctcgctgcccagccggcgatggccatggcgaaatttttgatcatagatggtaatagcttgatgtacagggcgtattttgccctgcctgatttgatgaacagcgaaggaatgcatacaaatgccatatacggtttttcaatgatgcttcttaaattgctggaggaggagaaaccagactacatagcaatagctttcgataaaaaggcttctacatttaggcacaaggagtacagtgcttataaaggaacccgccagtcgatgccagaagagctgatagaacaggtggatattttaaaagatgtgataaatgcatttaacataaagaccatcgagatagagggatttgaagcagatgatatcattggtacagtatcaaaaattgcttccgaaagtgggatggatgtgcttatcgtcacaggcgacagagatgcgcttcagcttgtgtcggcaaatgtaaaagtaaaaatatgtaaaaaaggcataacgcagatggatgagtacgatgaaaaggcggtctttgaaaagtatgaagtgacgccgcttcaattcatagacttgaaagggcttatgggagacaaatcagacaacattccaggagtgcccaatataggggagaagacggccataaagcttgttaaagaatttggatcaattgaaaatttactgatgaatacagataagttaaaagggaaaataaaagaaaatgtagaaaacaatgcagaattagctgttttaagcaaacggcttgctacgattgagagaaatgttcctattgatattgatttgaatgaatacgcggttaaaaattacgatgtcaataagcttacagagctatttgaaaaattggaattttcaagcctcatctcagatttaaaagatgatagtcgtgatacaaaggatattaaagaatggcctgtaagagattttacatacgttaaaaatgttttaggaaagtttgatgttttgtcattgtatccattcatatatgatggaaagataaaagcagtatcatttgcttgcggtgacggatcgttttttgtagagattgatgattatgacaattttaaattgcttaataatgataagcttacgttgataggacacgatctgaaagattttttagtaaacatttcatactgcggtattgaacttaattgtaagattttagatacggccataatgacttatcttttaaatccgtctgagtcgaattacgacataagtcgcgtattgaaaaaatacttgaaagaggatttgcaaaacatagatgatatagtaggcaagggcaggaataaaaagagctacgatgacattgacaaaaagcttttagtcgattatatgtgttcagccgcatcaaacttatctaagttaaaagataagctcatgtcatttataaaagagatggagatggaagatcttttaaaaaatgtggaaattccgcttattgaagtgctaaaatctatggaggtgtacggctttacattagataaagatgtacttagaagtatttctaaagaaatagatgaaaagacagataagattgtaaaagatatttacgatgctgctggatacgaatttaatattaactctacaaagcagttatcagaatttttgtttgataaactgaatttgccagcaataaaaaagactaaaacagggtattcgactgacatggaagtccttgcagaacttataccgtacaatgacatagtaggagaaataatagaatatagacagcttatgaagcttaaatctacgtacatagatggcttcattcccatcatggatgaaaataatagggtccactctacgtttaaacaaacagttgctgctacagggagaattagctcaacagagcctaatctgcagaacatacctgtaagagaagaatttggcaggaggataagaaaggcatttgtatcaagttatgaagatgggcttataatatctgctgattattctcagattgagctaagggttcttgcacatctttcagaggatgaaaaacttattgagtcatttttgaacaacgaagatatacatttaaggacggcatcggaggtttttaaggtttcgaaagaagaagtgacaagtgaaatgagaaggcgggcgaaagctgtcaactttggtattgtatatggtataagcgattacggcttatctaaagacttaaagatttcgcgaaaagaagcgaaagaatacatagacaattattttgacaggtacaagggcgtcaaaaattacatcgactcaattgtcaaatttgcaaaggaaaatgggtatgttacgactatcttaaataggagaagatacataccggaaatctattcaaaaaattttaaccaaagatcttttggcgagagaatggcaatgaatacacctattcaaggtagcgctgcggatataataaagatgtcgatggttaaagtatacaatgaattaaaggaaagaggattgaaatcaagacttattcttcaggtgcacgatgagcttataattgacacacatcctgatgaagttgaaatagtcaaggagcttctaaaatcaataatggaaaatatcataaagttgaaagttcctttagttgtagatatagggcaagggaaaaactggtatgatgcaaaataaaaggatcc

SEQ ID NO: 701 - DNA, 2678 bp, Artificial Sequence
  Description of Artificial Sequence: Synthetic Clostridium thermosulfurogenes DNA Polymerase N790V
atgaaatacctgctgccgaccgctgctgctggtctgctgctcctcgctgcccagccggcgatggccatggcgaaatttttgatcatagatggtaatagcttgatgtacagggcgtattttgccctgcctgatttgatgaacagcgaaggaatgcatacaaatgccatatacggtttttcaatgatgcttcttaaattgctggaggaggagaaaccagactacatagcaatagctttcgataaaaaggcttctacatttaggcacaaggagtacagtgcttataaaggaacccgccagtcgatgccagaagagctgatagaacaggtggatattttaaaagatgtgataaatgcatttaacataaagaccatcgagatagagggatttgaagcagatgatatcattggtacagtatcaaaaattgcttccgaaagtgggatggatgtgcttatcgtcacaggcgacagagatgcgcttcagcttgtgtcggcaaatgtaaaagtaaaaatatgtaaaaaaggcataacgcagatggatgagtacgatgaaaaggcggtctttgaaaagtatgaagtgacgccgcttcaattcatagacttgaaagggcttatgggagacaaatcagacaacattccaggagtgcccaatataggggagaagacggccataaagcttgttaaagaatttggatcaattgaaaatttactgatgaatacagataagttaaaagggaaaataaaagaaaatgtagaaaacaatgcagaattagctgttttaagcaaacggcttgctacgattgagagaaatgttcctattgatattgatttgaatgaatacgcggttaaaaattacgatgtcaataagcttacagagctatttgaaaaattggaattttcaagcctcatctcagatttaaaagatgatagtcgtgatacaaaggatattaaagaatggcctgtaagagattttacatacgttaaaaatgttttaggaaagtttgatgttttgtcattgtatccattcatatatgatggaaagataaaagcagtatcatttgcttgcggtgacggatcgttttttgtagagattgatgattatgacaattttaaattgcttaataatgataagcttacgttgataggacacgatctgaaagattttttagtaaacatttcatactgcggtattgaacttaattgtaagattttagatacggccataatgacttatcttttaaatccgtctgagtcgaattacgacataagtcgcgtattgaaaaaatacttgaaagaggatttgcaaaacatagatgatatagtaggcaagggcaggaataaaaagagctacgatgacattgacaaaaagcttttagtcgattatatgtgttcagccgcatcaaacttatctaagttaaaagataagctcatgtcatttataaaagagatggagatggaagatcttttaaaaaatgtggaaattccgcttattgaagtgctaaaatctatggaggtgtacggctttacattagataaagatgtacttagaagtatttctaaagaaatagatgaaaagacagataagattgtaaaagatatttacgatgctgctggatacgaatttaatattaactctacaaagcagttatcagaatttttgtttgataaactgaatttgccagcaataaaaaagactaaaacagggtattcgactgacatggaagtccttgcagaacttataccgtacaatgacatagtaggagaaataatagaatatagacagcttatgaagcttaaatctacgtacatagatggcttcattcccatcatggatgaaaataatagggtccactctacgtttaaacaaacagttgctgctacagggagaattagctcaacagagcctaatctgcagaacatacctgtaagagaagaatttggcaggaggataagaaaggcatttgtatcaagttatgaagatgggcttataatatctgctgattattctcagattgagctaagggttcttgcacatctttcagaggatgaaaaacttattgagtcatttttgaacaacgaagatatacatttaaggacggcatcggaggtttttaaggtttcgaaagaagaagtgacaagtgaaatgagaaggcgggcgaaagctgtcaactttggtattgtatatggtataagcgattacggcttatctaaagacttaaagatttcgcgaaaagaagcgaaagaatacatagacaattattttgacaggtacaagggcgtcaaaaattacatcgactcaattgtcaaatttgcaaaggaaaatgggtatgttacgactatcttaaataggagaagatacataccggaaatcgtttcaaaaaattttaaccaaagatcttttggcgagagaatggcaatgaatacacctattcaaggtagcgctgcggatataataaagatgtcgatggttaaagtatacaatgaattaaaggaaagaggattgaaatcaagacttattcttcaggtgcacgatgagcttataattgacacacatcctgatgaagttgaaatagtcaaggagcttctaaaatcaataatggaaaatatcataaagttgaaagttcctttagttgtagatatagggcaagggaaaaactggtatgatgcaaaataaaaggatcc

SEQ ID NO: 702 - DNA, 2678 bp, Artificial Sequence
  Description of Artificial Sequence: Synthetic Clostridium thermosulfurogenes DNA Polymerase S791A
atgaaatacctgctgccgaccgctgctgctggtctgctgctcctcgctgcccagccggcgatggccatggcgaaatttttgatcatagatggtaatagcttgatgtacagggcgtattttgccctgcctgatttgatgaacagcgaaggaatgcatacaaatgccatatacggtttttcaatgatgcttcttaaattgctggaggaggagaaaccagactacatagcaatagctttcgataaaaaggcttctacatttaggcacaaggagtacagtgcttataaaggaacccgccagtcgatgccagaagagctgatagaacaggtggatattttaaaagatgtgataaatgcatttaacataaagaccatcgagatagagggatttgaagcagatgatatcattggtacagtatcaaaaattgcttccgaaagtgggatggatgtgcttatcgtcacaggcgacagagatgcgcttcagcttgtgtcggcaaatgtaaaagtaaaaatatgtaaaaaaggcataacgcagatggatgagtacgatgaaaaggcggtctttgaaaagtatgaagtgacgccgcttcaattcatagacttgaaagggcttatgggagacaaatcagacaacattccaggagtgcccaatataggggagaagacggccataaagcttgttaaagaatttggatcaattgaaaatttactgatgaatacagataagttaaaagggaaaataaaagaaaatgtagaaaacaatgcagaattagctgttttaagcaaacggcttgctacgattgagagaaatgttcctattgatattgatttgaatgaatacgcggttaaaaattacgatgtcaataagcttacagagctatttgaaaaattggaattttcaagcctcatctcagatttaaaagatgatagtcgtgatacaaaggatattaaagaatggcctgtaagagattttacatacgttaaaaatgttttaggaaagtttgatgttttgtcattgtatccattcatatatgatggaaagataaaagcagtatcatttgcttgcggtgacggatcgttttttgtagagattgatgattatgacaattttaaattgcttaataatgataagcttacgttgataggacacgatctgaaagattttttagtaaacatttcatactgcggtattgaacttaattgtaagattttagatacggccataatgacttatcttttaaatccgtctgagtcgaattacgacataagtcgcgtattgaaaaaatacttgaaagaggatttgcaaaacatagatgatatagtaggcaagggcaggaataaaaagagctacgatgacattgacaaaaagcttttagtcgattatatgtgttcagccgcatcaaacttatctaagttaaaagataagctcatgtcatttataaaagagatggagatggaagatcttttaaaaaatgtggaaattccgcttattgaagtgctaaaatctatggaggtgtacggctttacattagataaagatgtacttagaagtatttctaaagaaatagatgaaaagacagataagattgtaaaagatatttacgatgctgctggatacgaatttaatattaactctacaaagcagttatcagaatttttgtttgataaactgaatttgccagcaataaaaaagactaaaacagggtattcgactgacatggaagtccttgcagaacttataccgtacaatgacatagtaggagaaataatagaatatagacagcttatgaagcttaaatctacgtacatagatggcttcattcccatcatggatgaaaataatagggtccactctacgtttaaacaaacagttgctgctacagggagaattagctcaacagagcctaatctgcagaacatacctgtaagagaagaatttggcaggaggataagaaaggcatttgtatcaagttatgaagatgggcttataatatctgctgattattctcagattgagctaagggttcttgcacatctttcagaggatgaaaaacttattgagtcatttttgaacaacgaagatatacatttaaggacggcatcggaggtttttaaggtttcgaaagaagaagtgacaagtgaaatgagaaggcgggcgaaagctgtcaactttggtattgtatatggtataagcgattacggcttatctaaagacttaaagatttcgcgaaaagaagcgaaagaatacatagacaattattttgacaggtacaagggcgtcaaaaattacatcgactcaattgtcaaatttgcaaaggaaaatgggtatgttacgactatcttaaataggagaagatacataccggaaatcaatgctaaaaattttaaccaaagatcttttggcgagagaatggcaatgaatacacctattcaaggtagcgctgcggatataataaagatgtcgatggttaaagtatacaatgaattaaaggaaagaggattgaaatcaagacttattcttcaggtgcacgatgagcttataattgacacacatcctgatgaagttgaaatagtcaaggagcttctaaaatcaataatggaaaatatcataaagttgaaagttcctttagttgtagatatagggcaagggaaaaactggtatgatgcaaaataaaaggatcc

SEQ ID NO: 703 - DNA, 2678 bp, Artificial Sequence
  Description of Artificial Sequence: Synthetic Clostridium thermosulfurogenes DNA Polymerase S791R
atgaaatacctgctgccgaccgctgctgctggtctgctgctcctcgctgcccagccggcgatggccatggcgaaatttttgatcatagatggtaatagcttgatgtacagggcgtattttgccctgcctgatttgatgaacagcgaaggaatgcatacaaatgccatatacggtttttcaatgatgcttcttaaattgctggaggaggagaaaccagactacatagcaatagctttcgataaaaaggcttctacatttaggcacaaggagtacagtgcttataaaggaacccgccagtcgatgccagaagagctgatagaacaggtggatattttaaaagatgtgataaatgcatttaacataaagaccatcgagatagagggatttgaagcagatgatatcattggtacagtatcaaaaattgcttccgaaagtgggatggatgtgcttatcgtcacaggcgacagagatgcgcttcagcttgtgtcggcaaatgtaaaagtaaaaatatgtaaaaaaggcataacgcagatggatgagtacgatgaaaaggcggtctttgaaaagtatgaagtgacgccgcttcaattcatagacttgaaagggcttatgggagacaaatcagacaacattccaggagtgcccaatataggggagaagacggccataaagcttgttaaagaatttggatcaattgaaaatttactgatgaatacagataagttaaaagggaaaataaaagaaaatgtagaaaacaatgcagaattagctgttttaagcaaacggcttgctacgattgagagaaatgttcctattgatattgatttgaatgaatacgcggttaaaaattacgatgtcaataagcttacagagctatttgaaaaattggaattttcaagcctcatctcagatttaaaagatgatagtcgtgatacaaaggatattaaagaatggcctgtaagagattttacatacgttaaaaatgttttaggaaagtttgatgttttgtcattgtatccattcatatatgatggaaagataaaagcagtatcatttgcttgcggtgacggatcgttttttgtagagattgatgattatgacaattttaaattgcttaataatgataagcttacgttgataggacacgatctgaaagattttttagtaaacatttcatactgcggtattgaacttaattgtaagattttagatacggccataatgacttatcttttaaatccgtctgagtcgaattacgacataagtcgcgtattgaaaaaatacttgaaagaggatttgcaaaacatagatgatatagtaggcaagggcaggaataaaaagagctacgatgacattgacaaaaagcttttagtcgattatatgtgttcagccgcatcaaacttatctaagttaaaagataagctcatgtcatttataaaagagatggagatggaagatcttttaaaaaatgtggaaattccgcttattgaagtgctaaaatctatggaggtgtacggctttacattagataaagatgtacttagaagtatttctaaagaaatagatgaaaagacagataagattgtaaaagatatttacgatgctgctggatacgaatttaatattaactctacaaagcagttatcagaatttttgtttgataaactgaatttgccagcaataaaaaagactaaaacagggtattcgactgacatggaagtccttgcagaacttataccgtacaatgacatagtaggagaaataatagaatatagacagcttatgaagcttaaatctacgtacatagatggcttcattcccatcatggatgaaaataatagggtccactctacgtttaaacaaacagttgctgctacagggagaattagctcaacagagcctaatctgcagaacatacctgtaagagaagaatttggcaggaggataagaaaggcatttgtatcaagttatgaagatgggcttataatatctgctgattattctcagattgagctaagggttcttgcacatctttcagaggatgaaaaacttattgagtcatttttgaacaacgaagatatacatttaaggacggcatcggaggtttttaaggtttcgaaagaagaagtgacaagtgaaatgagaaggcgggcgaaagctgtcaactttggtattgtatatggtataagcgattacggcttatctaaagacttaaagatttcgcgaaaagaagcgaaagaatacatagacaattattttgacaggtacaagggcgtcaaaaattacatcgactcaattgtcaaatttgcaaaggaaaatgggtatgttacgactatcttaaataggagaagatacataccggaaatcaatcgtaaaaattttaaccaaagatcttttggcgagagaatggcaatgaatacacctattcaaggtagcgctgcggatataataaagatgtcgatggttaaagtatacaatgaattaaaggaaagaggattgaaatcaagacttattcttcaggtgcacgatgagcttataattgacacacatcctgatgaagttgaaatagtcaaggagcttctaaaatcaataatggaaaatatcataaagttgaaagttcctttagttgtagatatagggcaagggaaaaactggtatgatgcaaaataaaaggatcc

SEQ ID NO: 704 - DNA, 2678 bp, Artificial Sequence
  Description of Artificial Sequence: Synthetic Clostridium thermosulfurogenes DNA Polymerase S791N
atgaaatacctgctgccgaccgctgctgctggtctgctgctcctcgctgcccagccggcgatggccatggcgaaatttttgatcatagatggtaatagcttgatgtacagggcgtattttgccctgcctgatttgatgaacagcgaaggaatgcatacaaatgccatatacggtttttcaatgatgcttcttaaattgctggaggaggagaaaccagactacatagcaatagctttcgataaaaaggcttctacatttaggcacaaggagtacagtgcttataaaggaacccgccagtcgatgccagaagagctgatagaacaggtggatattttaaaagatgtgataaatgcatttaacataaagaccatcgagatagagggatttgaagcagatgatatcattggtacagtatcaaaaattgcttccgaaagtgggatggatgtgcttatcgtcacaggcgacagagatgcgcttcagcttgtgtcggcaaatgtaaaagtaaaaatatgtaaaaaaggcataacgcagatggatgagtacgatgaaaaggcggtctttgaaaagtatgaagtgacgccgcttcaattcatagacttgaaagggcttatgggagacaaatcagacaacattccaggagtgcccaatataggggagaagacggccataaagcttgttaaagaatttggatcaattgaaaatttactgatgaatacagataagttaaaagggaaaataaaagaaaatgtagaaaacaatgcagaattagctgttttaagcaaacggcttgctacgattgagagaaatgttcctattgatattgatttgaatgaatacgcggttaaaaattacgatgtcaataagcttacagagctatttgaaaaattggaattttcaagcctcatctcagatttaaaagatgatagtcgtgatacaaaggatattaaagaatggcctgtaagagattttacatacgttaaaaatgttttaggaaagtttgatgttttgtcattgtatccattcatatatgatggaaagataaaagcagtatcatttgcttgcggtgacggatcgttttttgtagagattgatgattatgacaattttaaattgcttaataatgataagcttacgttgataggacacgatctgaaagattttttagtaaacatttcatactgcggtattgaacttaattgtaagattttagatacggccataatgacttatcttttaaatccgtctgagtcgaattacgacataagtcgcgtattgaaaaaatacttgaaagaggatttgcaaaacatagatgatatagtaggcaagggcaggaataaaaagagctacgatgacattgacaaaaagcttttagtcgattatatgtgttcagccgcatcaaacttatctaagttaaaagataagctcatgtcatttataaaagagatggagatggaagatcttttaaaaaatgtggaaattccgcttattgaagtgctaaaatctatggaggtgtacggctttacattagataaagatgtacttagaagtatttctaaagaaatagatgaaaagacagataagattgtaaaagatatttacgatgctgctggatacgaatttaatattaactctacaaagcagttatcagaatttttgtttgataaactgaatttgccagcaataaaaaagactaaaacagggtattcgactgacatggaagtccttgcagaacttataccgtacaatgacatagtaggagaaataatagaatatagacagcttatgaagcttaaatctacgtacatagatggcttcattcccatcatggatgaaaataatagggtccactctacgtttaaacaaacagttgctgctacagggagaattagctcaacagagcctaatctgcagaacatacctgtaagagaagaatttggcaggaggataagaaaggcatttgtatcaagttatgaagatgggcttataatatctgctgattattctcagattgagctaagggttcttgcacatctttcagaggatgaaaaacttattgagtcatttttgaacaacgaagatatacatttaaggacggcatcggaggtttttaaggtttcgaaagaagaagtgacaagtgaaatgagaaggcgggcgaaagctgtcaactttggtattgtatatggtataagcgattacggcttatctaaagacttaaagatttcgcgaaaagaagcgaaagaatacatagacaattattttgacaggtacaagggcgtcaaaaattacatcgactcaattgtcaaatttgcaaaggaaaatgggtatgttacgactatcttaaataggagaagatacataccggaaatcaataataaaaattttaaccaaagatcttttggcgagagaatggcaatgaatacacctattcaaggtagcgctgcggatataataaagatgtcgatggttaaagtatacaatgaattaaaggaaagaggattgaaatcaagacttattcttcaggtgcacgatgagcttataattgacacacatcctgatgaagttgaaatagtcaaggagcttctaaaatcaataatggaaaatatcataaagttgaaagttcctttagttgtagatatagggcaagggaaaaactggtatgatgcaaaataaaaggatcc

SEQ ID NO: 705 - DNA, 2678 bp, Artificial Sequence
  Description of Artificial Sequence: Synthetic Clostridium thermosulfurogenes DNA Polymerase S791D
atgaaatacctgctgccgaccgctgctgctggtctgctgctcctcgctgcccagccggcgatggccatggcgaaatttttgatcatagatggtaatagcttgatgtacagggcgtattttgccctgcctgatttgatgaacagcgaaggaatgcatacaaatgccatatacggtttttcaatgatgcttcttaaattgctggaggaggagaaaccagactacatagcaatagctttcgataaaaaggcttctacatttaggcacaaggagtacagtgcttataaaggaacccgccagtcgatgccagaagagctgatagaacaggtggatattttaaaagatgtgataaatgcatttaacataaagaccatcgagatagagggatttgaagcagatgatatcattggtacagtatcaaaaattgcttccgaaagtgggatggatgtgcttatcgtcacaggcgacagagatgcgcttcagcttgtgtcggcaaatgtaaaagtaaaaatatgtaaaaaaggcataacgcagatggatgagtacgatgaaaaggcggtctttgaaaagtatgaagtgacgccgcttcaattcatagacttgaaagggcttatgggagacaaatcagacaacattccaggagtgcccaatataggggagaagacggccataaagcttgttaaagaatttggatcaattgaaaatttactgatgaatacagataagttaaaagggaaaataaaagaaaatgtagaaaacaatgcagaattagctgttttaagcaaacggcttgctacgattgagagaaatgttcctattgatattgatttgaatgaatacgcggttaaaaattacgatgtcaataagcttacagagctatttgaaaaattggaattttcaagcctcatctcagatttaaaagatgatagtcgtgatacaaaggatattaaagaatggcctgtaagagattttacatacgttaaaaatgttttaggaaagtttgatgttttgtcattgtatccattcatatatgatggaaagataaaagcagtatcatttgcttgcggtgacggatcgttttttgtagagattgatgattatgacaattttaaattgcttaataatgataagcttacgttgataggacacgatctgaaagattttttagtaaacatttcatactgcggtattgaacttaattgtaagattttagatacggccataatgacttatcttttaaatccgtctgagtcgaattacgacataagtcgcgtattgaaaaaatacttgaaagaggatttgcaaaacatagatgatatagtaggcaagggcaggaataaaaagagctacgatgacattgacaaaaagcttttagtcgattatatgtgttcagccgcatcaaacttatctaagttaaaagataagctcatgtcatttataaaagagatggagatggaagatcttttaaaaaatgtggaaattccgcttattgaagtgctaaaatctatggaggtgtacggctttacattagataaagatgtacttagaagtatttctaaagaaatagatgaaaagacagataagattgtaaaagatatttacgatgctgctggatacgaatttaatattaactctacaaagcagttatcagaatttttgtttgataaactgaatttgccagcaataaaaaagactaaaacagggtattcgactgacatggaagtccttgcagaacttataccgtacaatgacatagtaggagaaataatagaatatagacagcttatgaagcttaaatctacgtacatagatggcttcattcccatcatggatgaaaataatagggtccactctacgtttaaacaaacagttgctgctacagggagaattagctcaacagagcctaatctgcagaacatacctgtaagagaagaatttggcaggaggataagaaaggcatttgtatcaagttatgaagatgggcttataatatctgctgattattctcagattgagctaagggttcttgcacatctttcagaggatgaaaaacttattgagtcatttttgaacaacgaagatatacatttaaggacggcatcggaggtttttaaggtttcgaaagaagaagtgacaagtgaaatgagaaggcgggcgaaagctgtcaactttggtattgtatatggtataagcgattacggcttatctaaagacttaaagatttcgcgaaaagaagcgaaagaatacatagacaattattttgacaggtacaagggcgtcaaaaattacatcgactcaattgtcaaatttgcaaaggaaaatgggtatgttacgactatcttaaataggagaagatacataccggaaatcaatgataaaaattttaaccaaagatcttttggcgagagaatggcaatgaatacacctattcaaggtagcgctgcggatataataaagatgtcgatggttaaagtatacaatgaattaaaggaaagaggattgaaatcaagacttattcttcaggtgcacgatgagcttataattgacacacatcctgatgaagttgaaatagtcaaggagcttctaaaatcaataatggaaaatatcataaagttgaaagttcctttagttgtagatatagggcaagggaaaaactggtatgatgcaaaataaaaggatcc

SEQ ID NO: 706 - DNA, 2678 bp, Artificial Sequence
  Description of Artificial Sequence: Synthetic Clostridium thermosulfurogenes DNA Polymerase S791C
atgaaatacctgctgccgaccgctgctgctggtctgctgctcctcgctgcccagccggcgatggccatggcgaaatttttgatcatagatggtaatagcttgatgtacagggcgtattttgccctgcctgatttgatgaacagcgaaggaatgcatacaaatgccatatacggtttttcaatgatgcttcttaaattgctggaggaggagaaaccagactacatagcaatagctttcgataaaaaggcttctacatttaggcacaaggagtacagtgcttataaaggaacccgccagtcgatgccagaagagctgatagaacaggtggatattttaaaagatgtgataaatgcatttaacataaagaccatcgagatagagggatttgaagcagatgatatcattggtacagtatcaaaaattgcttccgaaagtgggatggatgtgcttatcgtcacaggcgacagagatgcgcttcagcttgtgtcggcaaatgtaaaagtaaaaatatgtaaaaaaggcataacgcagatggatgagtacgatgaaaaggcggtctttgaaaagtatgaagtgacgccgcttcaattcatagacttgaaagggcttatgggagacaaatcagacaacattccaggagtgcccaatataggggagaagacggccataaagcttgttaaagaatttggatcaattgaaaatttactgatgaatacagataagttaaaagggaaaataaaagaaaatgtagaaaacaatgcagaattagctgttttaagcaaacggcttgctacgattgagagaaatgttcctattgatattgatttgaatgaatacgcggttaaaaattacgatgtcaataagcttacagagctatttgaaaaattggaattttcaagcctcatctcagatttaaaagatgatagtcgtgatacaaaggatattaaagaatggcctgtaagagattttacatacgttaaaaatgttttaggaaagtttgatgttttgtcattgtatccattcatatatgatggaaagataaaagcagtatcatttgcttgcggtgacggatcgttttttgtagagattgatgattatgacaattttaaattgcttaataatgataagcttacgttgataggacacgatctgaaagattttttagtaaacatttcatactgcggtattgaacttaattgtaagattttagatacggccataatgacttatcttttaaatccgtctgagtcgaattacgacataagtcgcgtattgaaaaaatacttgaaagaggatttgcaaaacatagatgatatagtaggcaagggcaggaataaaaagagctacgatgacattgacaaaaagcttttagtcgattatatgtgttcagccgcatcaaacttatctaagttaaaagataagctcatgtcatttataaaagagatggagatggaagatcttttaaaaaatgtggaaattccgcttattgaagtgctaaaatctatggaggtgtacggctttacattagataaagatgtacttagaagtatttctaaagaaatagatgaaaagacagataagattgtaaaagatatttacgatgctgctggatacgaatttaatattaactctacaaagcagttatcagaatttttgtttgataaactgaatttgccagcaataaaaaagactaaaacagggtattcgactgacatggaagtccttgcagaacttataccgtacaatgacatagtaggagaaataatagaatatagacagcttatgaagcttaaatctacgtacatagatggcttcattcccatcatggatgaaaataatagggtccactctacgtttaaacaaacagttgctgctacagggagaattagctcaacagagcctaatctgcagaacatacctgtaagagaagaatttggcaggaggataagaaaggcatttgtatcaagttatgaagatgggcttataatatctgctgattattctcagattgagctaagggttcttgcacatctttcagaggatgaaaaacttattgagtcatttttgaacaacgaagatatacatttaaggacggcatcggaggtttttaaggtttcgaaagaagaagtgacaagtgaaatgagaaggcgggcgaaagctgtcaactttggtattgtatatggtataagcgattacggcttatctaaagacttaaagatttcgcgaaaagaagcgaaagaatacatagacaattattttgacaggtacaagggcgtcaaaaattacatcgactcaattgtcaaatttgcaaaggaaaatgggtatgttacgactatcttaaataggagaagatacataccggaaatcaattgtaaaaattttaaccaaagatcttttggcgagagaatggcaatgaatacacctattcaaggtagcgctgcggatataataaagatgtcgatggttaaagtatacaatgaattaaaggaaagaggattgaaatcaagacttattcttcaggtgcacgatgagcttataattgacacacatcctgatgaagttgaaatagtcaaggagcttctaaaatcaataatggaaaatatcataaagttgaaagttcctttagttgtagatatagggcaagggaaaaactggtatgatgcaaaataaaaggatcc

SEQ ID NO: 707 - DNA, 2678 bp, Artificial Sequence
  Description of Artificial Sequence: Synthetic Clostridium thermosulfurogenes DNA Polymerase S791E
atgaaatacctgctgccgaccgctgctgctggtctgctgctcctcgctgcccagccggcgatggccatggcgaaatttttgatcatagatggtaatagcttgatgtacagggcgtattttgccctgcctgatttgatgaacagcgaaggaatgcatacaaatgccatatacggtttttcaatgatgcttcttaaattgctggaggaggagaaaccagactacatagcaatagctttcgataaaaaggcttctacatttaggcacaaggagtacagtgcttataaaggaacccgccagtcgatgccagaagagctgatagaacaggtggatattttaaaagatgtgataaatgcatttaacataaagaccatcgagatagagggatttgaagcagatgatatcattggtacagtatcaaaaattgcttccgaaagtgggatggatgtgcttatcgtcacaggcgacagagatgcgcttcagcttgtgtcggcaaatgtaaaagtaaaaatatgtaaaaaaggcataacgcagatggatgagtacgatgaaaaggcggtctttgaaaagtatgaagtgacgccgcttcaattcatagacttgaaagggcttatgggagacaaatcagacaacattccaggagtgcccaatataggggagaagacggccataaagcttgttaaagaatttggatcaattgaaaatttactgatgaatacagataagttaaaagggaaaataaaagaaaatgtagaaaacaatgcagaattagctgttttaagcaaacggcttgctacgattgagagaaatgttcctattgatattgatttgaatgaatacgcggttaaaaattacgatgtcaataagcttacagagctatttgaaaaattggaattttcaagcctcatctcagatttaaaagatgatagtcgtgatacaaaggatattaaagaatggcctgtaagagattttacatacgttaaaaatgttttaggaaagtttgatgttttgtcattgtatccattcatatatgatggaaagataaaagcagtatcatttgcttgcggtgacggatcgttttttgtagagattgatgattatgacaattttaaattgcttaataatgataagcttacgttgataggacacgatctgaaagattttttagtaaacatttcatactgcggtattgaacttaattgtaagattttagatacggccataatgacttatcttttaaatccgtctgagtcgaattacgacataagtcgcgtattgaaaaaatacttgaaagaggatttgcaaaacatagatgatatagtaggcaagggcaggaataaaaagagctacgatgacattgacaaaaagcttttagtcgattatatgtgttcagccgcatcaaacttatctaagttaaaagataagctcatgtcatttataaaagagatggagatggaagatcttttaaaaaatgtggaaattccgcttattgaagtgctaaaatctatggaggtgtacggctttacattagataaagatgtacttagaagtatttctaaagaaatagatgaaaagacagataagattgtaaaagatatttacgatgctgctggatacgaatttaatattaactctacaaagcagttatcagaatttttgtttgataaactgaatttgccagcaataaaaaagactaaaacagggtattcgactgacatggaagtccttgcagaacttataccgtacaatgacatagtaggagaaataatagaatatagacagcttatgaagcttaaatctacgtacatagatggcttcattcccatcatggatgaaaataatagggtccactctacgtttaaacaaacagttgctgctacagggagaattagctcaacagagcctaatctgcagaacatacctgtaagagaagaatttggcaggaggataagaaaggcatttgtatcaagttatgaagatgggcttataatatctgctgattattctcagattgagctaagggttcttgcacatctttcagaggatgaaaaacttattgagtcatttttgaacaacgaagatatacatttaaggacggcatcggaggtttttaaggtttcgaaagaagaagtgacaagtgaaatgagaaggcgggcgaaagctgtcaactttggtattgtatatggtataagcgattacggcttatctaaagacttaaagatttcgcgaaaagaagcgaaagaatacatagacaattattttgacaggtacaagggcgtcaaaaattacatcgactcaattgtcaaatttgcaaaggaaaatgggtatgttacgactatcttaaataggagaagatacataccggaaatcaatgaaaaaaattttaaccaaagatcttttggcgagagaatggcaatgaatacacctattcaaggtagcgctgcggatataataaagatgtcgatggttaaagtatacaatgaattaaaggaaagaggattgaaatcaagacttattcttcaggtgcacgatgagcttataattgacacacatcctgatgaagttgaaatagtcaaggagcttctaaaatcaataatggaaaatatcataaagttgaaagttcctttagttgtagatatagggcaagggaaaaactggtatgatgcaaaataaaaggatcc

SEQ ID NO: 708 - DNA, 2678 bp, Artificial Sequence
  Description of Artificial Sequence: Synthetic Clostridium thermosulfurogenes DNA Polymerase S791Q
atgaaatacctgctgccgaccgctgctgctggtctgctgctcctcgctgcccagccggcgatggccatggcgaaatttttgatcatagatggtaatagcttgatgtacagggcgtattttgccctgcctgatttgatgaacagcgaaggaatgcatacaaatgccatatacggtttttcaatgatgcttcttaaattgctggaggaggagaaaccagactacatagcaatagctttcgataaaaaggcttctacatttaggcacaaggagtacagtgcttataaaggaacccgccagtcgatgccagaagagctgatagaacaggtggatattttaaaagatgtgataaatgcatttaacataaagaccatcgagatagagggatttgaagcagatgatatcattggtacagtatcaaaaattgcttccgaaagtgggatggatgtgcttatcgtcacaggcgacagagatgcgcttcagcttgtgtcggcaaatgtaaaagtaaaaatatgtaaaaaaggcataacgcagatggatgagtacgatgaaaaggcggtctttgaaaagtatgaagtgacgccgcttcaattcatagacttgaaagggcttatgggagacaaatcagacaacattccaggagtgcccaatataggggagaagacggccataaagcttgttaaagaatttggatcaattgaaaatttactgatgaatacagataagttaaaagggaaaataaaagaaaatgtagaaaacaatgcagaattagctgttttaagcaaacggcttgctacgattgagagaaatgttcctattgatattgatttgaatgaatacgcggttaaaaattacgatgtcaataagcttacagagctatttgaaaaattggaattttcaagcctcatctcagatttaaaagatgatagtcgtgatacaaaggatattaaagaatggcctgtaagagattttacatacgttaaaaatgttttaggaaagtttgatgttttgtcattgtatccattcatatatgatggaaagataaaagcagtatcatttgcttgcggtgacggatcgttttttgtagagattgatgattatgacaattttaaattgcttaataatgataagcttacgttgataggacacgatctgaaagattttttagtaaacatttcatactgcggtattgaacttaattgtaagattttagatacggccataatgacttatcttttaaatccgtctgagtcgaattacgacataagtcgcgtattgaaaaaatacttgaaagaggatttgcaaaacatagatgatatagtaggcaagggcaggaataaaaagagctacgatgacattgacaaaaagcttttagtcgattatatgtgttcagccgcatcaaacttatctaagttaaaagataagctcatgtcatttataaaagagatggagatggaagatcttttaaaaaatgtggaaattccgcttattgaagtgctaaaatctatggaggtgtacggctttacattagataaagatgtacttagaagtatttctaaagaaatagatgaaaagacagataagattgtaaaagatatttacgatgctgctggatacgaatttaatattaactctacaaagcagttatcagaatttttgtttgataaactgaatttgccagcaataaaaaagactaaaacagggtattcgactgacatggaagtccttgcagaacttataccgtacaatgacatagtaggagaaataatagaatatagacagcttatgaagcttaaatctacgtacatagatggcttcattcccatcatggatgaaaataatagggtccactctacgtttaaacaaacagttgctgctacagggagaattagctcaacagagcctaatctgcagaacatacctgtaagagaagaatttggcaggaggataagaaaggcatttgtatcaagttatgaagatgggcttataatatctgctgattattctcagattgagctaagggttcttgcacatctttcagaggatgaaaaacttattgagtcatttttgaacaacgaagatatacatttaaggacggcatcggaggtttttaaggtttcgaaagaagaagtgacaagtgaaatgagaaggcgggcgaaagctgtcaactttggtattgtatatggtataagcgattacggcttatctaaagacttaaagatttcgcgaaaagaagcgaaagaatacatagacaattattttgacaggtacaagggcgtcaaaaattacatcgactcaattgtcaaatttgcaaaggaaaatgggtatgttacgactatcttaaataggagaagatacataccggaaatcaatcaaaaaaattttaaccaaagatcttttggcgagagaatggcaatgaatacacctattcaaggtagcgctgcggatataataaagatgtcgatggttaaagtatacaatgaattaaaggaaagaggattgaaatcaagacttattcttcaggtgcacgatgagcttataattgacacacatcctgatgaagttgaaatagtcaaggagcttctaaaatcaataatggaaaatatcataaagttgaaagttcctttagttgtagatatagggcaagggaaaaactggtatgatgcaaaataaaaggatcc

SEQ ID NO: 709 - DNA, 2678 bp, Artificial Sequence
  Description of Artificial Sequence: Synthetic Clostridium thermosulfurogenes DNA Polymerase S791G
atgaaatacctgctgccgaccgctgctgctggtctgctgctcctcgctgcccagccggcgatggccatggcgaaatttttgatcatagatggtaatagcttgatgtacagggcgtattttgccctgcctgatttgatgaacagcgaaggaatgcatacaaatgccatatacggtttttcaatgatgcttcttaaattgctggaggaggagaaaccagactacatagcaatagctttcgataaaaaggcttctacatttaggcacaaggagtacagtgcttataaaggaacccgccagtcgatgccagaagagctgatagaacaggtggatattttaaaagatgtgataaatgcatttaacataaagaccatcgagatagagggatttgaagcagatgatatcattggtacagtatcaaaaattgcttccgaaagtgggatggatgtgcttatcgtcacaggcgacagagatgcgcttcagcttgtgtcggcaaatgtaaaagtaaaaatatgtaaaaaaggcataacgcagatggatgagtacgatgaaaaggcggtctttgaaaagtatgaagtgacgccgcttcaattcatagacttgaaagggcttatgggagacaaatcagacaacattccaggagtgcccaatataggggagaagacggccataaagcttgttaaagaatttggatcaattgaaaatttactgatgaatacagataagttaaaagggaaaataaaagaaaatgtagaaaacaatgcagaattagctgttttaagcaaacggcttgctacgattgagagaaatgttcctattgatattgatttgaatgaatacgcggttaaaaattacgatgtcaataagcttacagagctatttgaaaaattggaattttcaagcctcatctcagatttaaaagatgatagtcgtgatacaaaggatattaaagaatggcctgtaagagattttacatacgttaaaaatgttttaggaaagtttgatgttttgtcattgtatccattcatatatgatggaaagataaaagcagtatcatttgcttgcggtgacggatcgttttttgtagagattgatgattatgacaattttaaattgcttaataatgataagcttacgttgataggacacgatctgaaagattttttagtaaacatttcatactgcggtattgaacttaattgtaagattttagatacggccataatgacttatcttttaaatccgtctgagtcgaattacgacataagtcgcgtattgaaaaaatacttgaaagaggatttgcaaaacatagatgatatagtaggcaagggcaggaataaaaagagctacgatgacattgacaaaaagcttttagtcgattatatgtgttcagccgcatcaaacttatctaagttaaaagataagctcatgtcatttataaaagagatggagatggaagatcttttaaaaaatgtggaaattccgcttattgaagtgctaaaatctatggaggtgtacggctttacattagataaagatgtacttagaagtatttctaaagaaatagatgaaaagacagataagattgtaaaagatatttacgatgctgctggatacgaatttaatattaactctacaaagcagttatcagaatttttgtttgataaactgaatttgccagcaataaaaaagactaaaacagggtattcgactgacatggaagtccttgcagaacttataccgtacaatgacatagtaggagaaataatagaatatagacagcttatgaagcttaaatctacgtacatagatggcttcattcccatcatggatgaaaataatagggtccactctacgtttaaacaaacagttgctgctacagggagaattagctcaacagagcctaatctgcagaacatacctgtaagagaagaatttggcaggaggataagaaaggcatttgtatcaagttatgaagatgggcttataatatctgctgattattctcagattgagctaagggttcttgcacatctttcagaggatgaaaaacttattgagtcatttttgaacaacgaagatatacatttaaggacggcatcggaggtttttaaggtttcgaaagaagaagtgacaagtgaaatgagaaggcgggcgaaagctgtcaactttggtattgtatatggtataagcgattacggcttatctaaagacttaaagatttcgcgaaaagaagcgaaagaatacatagacaattattttgacaggtacaagggcgtcaaaaattacatcgactcaattgtcaaatttgcaaaggaaaatgggtatgttacgactatcttaaataggagaagatacataccggaaatcaatggtaaaaattttaaccaaagatcttttggcgagagaatggcaatgaatacacctattcaaggtagcgctgcggatataataaagatgtcgatggttaaagtatacaatgaattaaaggaaagaggattgaaatcaagacttattcttcaggtgcacgatgagcttataattgacacacatcctgatgaagttgaaatagtcaaggagcttctaaaatcaataatggaaaatatcataaagttgaaagttcctttagttgtagatatagggcaagggaaaaactggtatgatgcaaaataaaaggatcc

SEQ ID NO: 710 - DNA, 2678 bp, Artificial Sequence
  Description of Artificial Sequence: Synthetic Clostridium thermosulfurogenes DNA Polymerase S791H
atgaaatacctgctgccgaccgctgctgctggtctgctgctcctcgctgcccagccggcgatggccatggcgaaatttttgatcatagatggtaatagcttgatgtacagggcgtattttgccctgcctgatttgatgaacagcgaaggaatgcatacaaatgccatatacggtttttcaatgatgcttcttaaattgctggaggaggagaaaccagactacatagcaatagctttcgataaaaaggcttctacatttaggcacaaggagtacagtgcttataaaggaacccgccagtcgatgccagaagagctgatagaacaggtggatattttaaaagatgtgataaatgcatttaacataaagaccatcgagatagagggatttgaagcagatgatatcattggtacagtatcaaaaattgcttccgaaagtgggatggatgtgcttatcgtcacaggcgacagagatgcgcttcagcttgtgtcggcaaatgtaaaagtaaaaatatgtaaaaaaggcataacgcagatggatgagtacgatgaaaaggcggtctttgaaaagtatgaagtgacgccgcttcaattcatagacttgaaagggcttatgggagacaaatcagacaacattccaggagtgcccaatataggggagaagacggccataaagcttgttaaagaatttggatcaattgaaaatttactgatgaatacagataagttaaaagggaaaataaaagaaaatgtagaaaacaatgcagaattagctgttttaagcaaacggcttgctacgattgagagaaatgttcctattgatattgatttgaatgaatacgcggttaaaaattacgatgtcaataagcttacagagctatttgaaaaattggaattttcaagcctcatctcagatttaaaagatgatagtcgtgatacaaaggatattaaagaatggcctgtaagagattttacatacgttaaaaatgttttaggaaagtttgatgttttgtcattgtatccattcatatatgatggaaagataaaagcagtatcatttgcttgcggtgacggatcgttttttgtagagattgatgattatgacaattttaaattgcttaataatgataagcttacgttgataggacacgatctgaaagattttttagtaaacatttcatactgcggtattgaacttaattgtaagattttagatacggccataatgacttatcttttaaatccgtctgagtcgaattacgacataagtcgcgtattgaaaaaatacttgaaagaggatttgcaaaacatagatgatatagtaggcaagggcaggaataaaaagagctacgatgacattgacaaaaagcttttagtcgattatatgtgttcagccgcatcaaacttatctaagttaaaagataagctcatgtcatttataaaagagatggagatggaagatcttttaaaaaatgtggaaattccgcttattgaagtgctaaaatctatggaggtgtacggctttacattagataaagatgtacttagaagtatttctaaagaaatagatgaaaagacagataagattgtaaaagatatttacgatgctgctggatacgaatttaatattaactctacaaagcagttatcagaatttttgtttgataaactgaatttgccagcaataaaaaagactaaaacagggtattcgactgacatggaagtccttgcagaacttataccgtacaatgacatagtaggagaaataatagaatatagacagcttatgaagcttaaatctacgtacatagatggcttcattcccatcatggatgaaaataatagggtccactctacgtttaaacaaacagttgctgctacagggagaattagctcaacagagcctaatctgcagaacatacctgtaagagaagaatttggcaggaggataagaaaggcatttgtatcaagttatgaagatgggcttataatatctgctgattattctcagattgagctaagggttcttgcacatctttcagaggatgaaaaacttattgagtcatttttgaacaacgaagatatacatttaaggacggcatcggaggtttttaaggtttcgaaagaagaagtgacaagtgaaatgagaaggcgggcgaaagctgtcaactttggtattgtatatggtataagcgattacggcttatctaaagacttaaagatttcgcgaaaagaagcgaaagaatacatagacaattattttgacaggtacaagggcgtcaaaaattacatcgactcaattgtcaaatttgcaaaggaaaatgggtatgttacgactatcttaaataggagaagatacataccggaaatcaatcataaaaattttaaccaaagatcttttggcgagagaatggcaatgaatacacctattcaaggtagcgctgcggatataataaagatgtcgatggttaaagtatacaatgaattaaaggaaagaggattgaaatcaagacttattcttcaggtgcacgatgagcttataattgacacacatcctgatgaagttgaaatagtcaaggagcttctaaaatcaataatggaaaatatcataaagttgaaagttcctttagttgtagatatagggcaagggaaaaactggtatgatgcaaaataaaaggatcc

SEQ ID NO: 711 - DNA, 2678 bp, Artificial Sequence
  Description of Artificial Sequence: Synthetic Clostridium thermosulfurogenes DNA Polymerase S791I
atgaaatacctgctgccgaccgctgctgctggtctgctgctcctcgctgcccagccggcgatggccatggcgaaatttttgatcatagatggtaatagcttgatgtacagggcgtattttgccctgcctgatttgatgaacagcgaaggaatgcatacaaatgccatatacggtttttcaatgatgcttcttaaattgctggaggaggagaaaccagactacatagcaatagctttcgataaaaaggcttctacatttaggcacaaggagtacagtgcttataaaggaacccgccagtcgatgccagaagagctgatagaacaggtggatattttaaaagatgtgataaatgcatttaacataaagaccatcgagatagagggatttgaagcagatgatatcattggtacagtatcaaaaattgcttccgaaagtgggatggatgtgcttatcgtcacaggcgacagagatgcgcttcagcttgtgtcggcaaatgtaaaagtaaaaatatgtaaaaaaggcataacgcagatggatgagtacgatgaaaaggcggtctttgaaaagtatgaagtgacgccgcttcaattcatagacttgaaagggcttatgggagacaaatcagacaacattccaggagtgcccaatataggggagaagacggccataaagcttgttaaagaatttggatcaattgaaaatttactgatgaatacagataagttaaaagggaaaataaaagaaaatgtagaaaacaatgcagaattagctgttttaagcaaacggcttgctacgattgagagaaatgttcctattgatattgatttgaatgaatacgcggttaaaaattacgatgtcaataagcttacagagctatttgaaaaattggaattttcaagcctcatctcagatttaaaagatgatagtcgtgatacaaaggatattaaagaatggcctgtaagagattttacatacgttaaaaatgttttaggaaagtttgatgttttgtcattgtatccattcatatatgatggaaagataaaagcagtatcatttgcttgcggtgacggatcgttttttgtagagattgatgattatgacaattttaaattgcttaataatgataagcttacgttgataggacacgatctgaaagattttttagtaaacatttcatactgcggtattgaacttaattgtaagattttagatacggccataatgacttatcttttaaatccgtctgagtcgaattacgacataagtcgcgtattgaaaaaatacttgaaagaggatttgcaaaacatagatgatatagtaggcaagggcaggaataaaaagagctacgatgacattgacaaaaagcttttagtcgattatatgtgttcagccgcatcaaacttatctaagttaaaagataagctcatgtcatttataaaagagatggagatggaagatcttttaaaaaatgtggaaattccgcttattgaagtgctaaaatctatggaggtgtacggctttacattagataaagatgtacttagaagtatttctaaagaaatagatgaaaagacagataagattgtaaaagatatttacgatgctgctggatacgaatttaatattaactctacaaagcagttatcagaatttttgtttgataaactgaatttgccagcaataaaaaagactaaaacagggtattcgactgacatggaagtccttgcagaacttataccgtacaatgacatagtaggagaaataatagaatatagacagcttatgaagcttaaatctacgtacatagatggcttcattcccatcatggatgaaaataatagggtccactctacgtttaaacaaacagttgctgctacagggagaattagctcaacagagcctaatctgcagaacatacctgtaagagaagaatttggcaggaggataagaaaggcatttgtatcaagttatgaagatgggcttataatatctgctgattattctcagattgagctaagggttcttgcacatctttcagaggatgaaaaacttattgagtcatttttgaacaacgaagatatacatttaaggacggcatcggaggtttttaaggtttcgaaagaagaagtgacaagtgaaatgagaaggcgggcgaaagctgtcaactttggtattgtatatggtataagcgattacggcttatctaaagacttaaagatttcgcgaaaagaagcgaaagaatacatagacaattattttgacaggtacaagggcgtcaaaaattacatcgactcaattgtcaaatttgcaaaggaaaatgggtatgttacgactatcttaaataggagaagatacataccggaaatcaatattaaaaattttaaccaaagatcttttggcgagagaatggcaatgaatacacctattcaaggtagcgctgcggatataataaagatgtcgatggttaaagtatacaatgaattaaaggaaagaggattgaaatcaagacttattcttcaggtgcacgatgagcttataattgacacacatcctgatgaagttgaaatagtcaaggagcttctaaaatcaataatggaaaatatcataaagttgaaagttcctttagttgtagatatagggcaagggaaaaactggtatgatgcaaaataaaaggatcc

SEQ ID NO: 712 - DNA, 2678 bp, Artificial Sequence
  Description of Artificial Sequence: Synthetic Clostridium thermosulfurogenes DNA Polymerase S791L
atgaaatacctgctgccgaccgctgctgctggtctgctgctcctcgctgcccagccggcgatggccatggcgaaatttttgatcatagatggtaatagcttgatgtacagggcgtattttgccctgcctgatttgatgaacagcgaaggaatgcatacaaatgccatatacggtttttcaatgatgcttcttaaattgctggaggaggagaaaccagactacatagcaatagctttcgataaaaaggcttctacatttaggcacaaggagtacagtgcttataaaggaacccgccagtcgatgccagaagagctgatagaacaggtggatattttaaaagatgtgataaatgcatttaacataaagaccatcgagatagagggatttgaagcagatgatatcattggtacagtatcaaaaattgcttccgaaagtgggatggatgtgcttatcgtcacaggcgacagagatgcgcttcagcttgtgtcggcaaatgtaaaagtaaaaatatgtaaaaaaggcataacgcagatggatgagtacgatgaaaaggcggtctttgaaaagtatgaagtgacgccgcttcaattcatagacttgaaagggcttatgggagacaaatcagacaacattccaggagtgcccaatataggggagaagacggccataaagcttgttaaagaatttggatcaattgaaaatttactgatgaatacagataagttaaaagggaaaataaaagaaaatgtagaaaacaatgcagaattagctgttttaagcaaacggcttgctacgattgagagaaatgttcctattgatattgatttgaatgaatacgcggttaaaaattacgatgtcaataagcttacagagctatttgaaaaattggaattttcaagcctcatctcagatttaaaagatgatagtcgtgatacaaaggatattaaagaatggcctgtaagagattttacatacgttaaaaatgttttaggaaagtttgatgttttgtcattgtatccattcatatatgatggaaagataaaagcagtatcatttgcttgcggtgacggatcgttttttgtagagattgatgattatgacaattttaaattgcttaataatgataagcttacgttgataggacacgatctgaaagattttttagtaaacatttcatactgcggtattgaacttaattgtaagattttagatacggccataatgacttatcttttaaatccgtctgagtcgaattacgacataagtcgcgtattgaaaaaatacttgaaagaggatttgcaaaacatagatgatatagtaggcaagggcaggaataaaaagagctacgatgacattgacaaaaagcttttagtcgattatatgtgttcagccgcatcaaacttatctaagttaaaagataagctcatgtcatttataaaagagatggagatggaagatcttttaaaaaatgtggaaattccgcttattgaagtgctaaaatctatggaggtgtacggctttacattagataaagatgtacttagaagtatttctaaagaaatagatgaaaagacagataagattgtaaaagatatttacgatgctgctggatacgaatttaatattaactctacaaagcagttatcagaatttttgtttgataaactgaatttgccagcaataaaaaagactaaaacagggtattcgactgacatggaagtccttgcagaacttataccgtacaatgacatagtaggagaaataatagaatatagacagcttatgaagcttaaatctacgtacatagatggcttcattcccatcatggatgaaaataatagggtccactctacgtttaaacaaacagttgctgctacagggagaattagctcaacagagcctaatctgcagaacatacctgtaagagaagaatttggcaggaggataagaaaggcatttgtatcaagttatgaagatgggcttataatatctgctgattattctcagattgagctaagggttcttgcacatctttcagaggatgaaaaacttattgagtcatttttgaacaacgaagatatacatttaaggacggcatcggaggtttttaaggtttcgaaagaagaagtgacaagtgaaatgagaaggcgggcgaaagctgtcaactttggtattgtatatggtataagcgattacggcttatctaaagacttaaagatttcgcgaaaagaagcgaaagaatacatagacaattattttgacaggtacaagggcgtcaaaaattacatcgactcaattgtcaaatttgcaaaggaaaatgggtatgttacgactatcttaaataggagaagatacataccggaaatcaatcttaaaaattttaaccaaagatcttttggcgagagaatggcaatgaatacacctattcaaggtagcgctgcggatataataaagatgtcgatggttaaagtatacaatgaattaaaggaaagaggattgaaatcaagacttattcttcaggtgcacgatgagcttataattgacacacatcctgatgaagttgaaatagtcaaggagcttctaaaatcaataatggaaaatatcataaagttgaaagttcctttagttgtagatatagggcaagggaaaaactggtatgatgcaaaataaaaggatcc

SEQ ID NO: 713 - DNA, 2678 bp, Artificial Sequence
  Description of Artificial Sequence: Synthetic Clostridium thermosulfurogenes DNA Polymerase S791K
atgaaatacctgctgccgaccgctgctgctggtctgctgctcctcgctgcccagccggcgatggccatggcgaaatttttgatcatagatggtaatagcttgatgtacagggcgtattttgccctgcctgatttgatgaacagcgaaggaatgcatacaaatgccatatacggtttttcaatgatgcttcttaaattgctggaggaggagaaaccagactacatagcaatagctttcgataaaaaggcttctacatttaggcacaaggagtacagtgcttataaaggaacccgccagtcgatgccagaagagctgatagaacaggtggatattttaaaagatgtgataaatgcatttaacataaagaccatcgagatagagggatttgaagcagatgatatcattggtacagtatcaaaaattgcttccgaaagtgggatggatgtgcttatcgtcacaggcgacagagatgcgcttcagcttgtgtcggcaaatgtaaaagtaaaaatatgtaaaaaaggcataacgcagatggatgagtacgatgaaaaggcggtctttgaaaagtatgaagtgacgccgcttcaattcatagacttgaaagggcttatgggagacaaatcagacaacattccaggagtgcccaatataggggagaagacggccataaagcttgttaaagaatttggatcaattgaaaatttactgatgaatacagataagttaaaagggaaaataaaagaaaatgtagaaaacaatgcagaattagctgttttaagcaaacggcttgctacgattgagagaaatgttcctattgatattgatttgaatgaatacgcggttaaaaattacgatgtcaataagcttacagagctatttgaaaaattggaattttcaagcctcatctcagatttaaaagatgatagtcgtgatacaaaggatattaaagaatggcctgtaagagattttacatacgttaaaaatgttttaggaaagtttgatgttttgtcattgtatccattcatatatgatggaaagataaaagcagtatcatttgcttgcggtgacggatcgttttttgtagagattgatgattatgacaattttaaattgcttaataatgataagcttacgttgataggacacgatctgaaagattttttagtaaacatttcatactgcggtattgaacttaattgtaagattttagatacggccataatgacttatcttttaaatccgtctgagtcgaattacgacataagtcgcgtattgaaaaaatacttgaaagaggatttgcaaaacatagatgatatagtaggcaagggcaggaataaaaagagctacgatgacattgacaaaaagcttttagtcgattatatgtgttcagccgcatcaaacttatctaagttaaaagataagctcatgtcatttataaaagagatggagatggaagatcttttaaaaaatgtggaaattccgcttattgaagtgctaaaatctatggaggtgtacggctttacattagataaagatgtacttagaagtatttctaaagaaatagatgaaaagacagataagattgtaaaagatatttacgatgctgctggatacgaatttaatattaactctacaaagcagttatcagaatttttgtttgataaactgaatttgccagcaataaaaaagactaaaacagggtattcgactgacatggaagtccttgcagaacttataccgtacaatgacatagtaggagaaataatagaatatagacagcttatgaagcttaaatctacgtacatagatggcttcattcccatcatggatgaaaataatagggtccactctacgtttaaacaaacagttgctgctacagggagaattagctcaacagagcctaatctgcagaacatacctgtaagagaagaatttggcaggaggataagaaaggcatttgtatcaagttatgaagatgggcttataatatctgctgattattctcagattgagctaagggttcttgcacatctttcagaggatgaaaaacttattgagtcatttttgaacaacgaagatatacatttaaggacggcatcggaggtttttaaggtttcgaaagaagaagtgacaagtgaaatgagaaggcgggcgaaagctgtcaactttggtattgtatatggtataagcgattacggcttatctaaagacttaaagatttcgcgaaaagaagcgaaagaatacatagacaattattttgacaggtacaagggcgtcaaaaattacatcgactcaattgtcaaatttgcaaaggaaaatgggtatgttacgactatcttaaataggagaagatacataccggaaatcaataaaaaaaattttaaccaaagatcttttggcgagagaatggcaatgaatacacctattcaaggtagcgctgcggatataataaagatgtcgatggttaaagtatacaatgaattaaaggaaagaggattgaaatcaagacttattcttcaggtgcacgatgagcttataattgacacacatcctgatgaagttgaaatagtcaaggagcttctaaaatcaataatggaaaatatcataaagttgaaagttcctttagttgtagatatagggcaagggaaaaactggtatgatgcaaaataaaaggatcc

SEQ ID NO: 714 - DNA, 2678 bp, Artificial Sequence
  Description of Artificial Sequence: Synthetic Clostridium thermosulfurogenes DNA Polymerase S791M
atgaaatacctgctgccgaccgctgctgctggtctgctgctcctcgctgcccagccggcgatggccatggcgaaatttttgatcatagatggtaatagcttgatgtacagggcgtattttgccctgcctgatttgatgaacagcgaaggaatgcatacaaatgccatatacggtttttcaatgatgcttcttaaattgctggaggaggagaaaccagactacatagcaatagctttcgataaaaaggcttctacatttaggcacaaggagtacagtgcttataaaggaacccgccagtcgatgccagaagagctgatagaacaggtggatattttaaaagatgtgataaatgcatttaacataaagaccatcgagatagagggatttgaagcagatgatatcattggtacagtatcaaaaattgcttccgaaagtgggatggatgtgcttatcgtcacaggcgacagagatgcgcttcagcttgtgtcggcaaatgtaaaagtaaaaatatgtaaaaaaggcataacgcagatggatgagtacgatgaaaaggcggtctttgaaaagtatgaagtgacgccgcttcaattcatagacttgaaagggcttatgggagacaaatcagacaacattccaggagtgcccaatataggggagaagacggccataaagcttgttaaagaatttggatcaattgaaaatttactgatgaatacagataagttaaaagggaaaataaaagaaaatgtagaaaacaatgcagaattagctgttttaagcaaacggcttgctacgattgagagaaatgttcctattgatattgatttgaatgaatacgcggttaaaaattacgatgtcaataagcttacagagctatttgaaaaattggaattttcaagcctcatctcagatttaaaagatgatagtcgtgatacaaaggatattaaagaatggcctgtaagagattttacatacgttaaaaatgttttaggaaagtttgatgttttgtcattgtatccattcatatatgatggaaagataaaagcagtatcatttgcttgcggtgacggatcgttttttgtagagattgatgattatgacaattttaaattgcttaataatgataagcttacgttgataggacacgatctgaaagattttttagtaaacatttcatactgcggtattgaacttaattgtaagattttagatacggccataatgacttatcttttaaatccgtctgagtcgaattacgacataagtcgcgtattgaaaaaatacttgaaagaggatttgcaaaacatagatgatatagtaggcaagggcaggaataaaaagagctacgatgacattgacaaaaagcttttagtcgattatatgtgttcagccgcatcaaacttatctaagttaaaagataagctcatgtcatttataaaagagatggagatggaagatcttttaaaaaatgtggaaattccgcttattgaagtgctaaaatctatggaggtgtacggctttacattagataaagatgtacttagaagtatttctaaagaaatagatgaaaagacagataagattgtaaaagatatttacgatgctgctggatacgaatttaatattaactctacaaagcagttatcagaatttttgtttgataaactgaatttgccagcaataaaaaagactaaaacagggtattcgactgacatggaagtccttgcagaacttataccgtacaatgacatagtaggagaaataatagaatatagacagcttatgaagcttaaatctacgtacatagatggcttcattcccatcatggatgaaaataatagggtccactctacgtttaaacaaacagttgctgctacagggagaattagctcaacagagcctaatctgcagaacatacctgtaagagaagaatttggcaggaggataagaaaggcatttgtatcaagttatgaagatgggcttataatatctgctgattattctcagattgagctaagggttcttgcacatctttcagaggatgaaaaacttattgagtcatttttgaacaacgaagatatacatttaaggacggcatcggaggtttttaaggtttcgaaagaagaagtgacaagtgaaatgagaaggcgggcgaaagctgtcaactttggtattgtatatggtataagcgattacggcttatctaaagacttaaagatttcgcgaaaagaagcgaaagaatacatagacaattattttgacaggtacaagggcgtcaaaaattacatcgactcaattgtcaaatttgcaaaggaaaatgggtatgttacgactatcttaaataggagaagatacataccggaaatcaatatgaaaaattttaaccaaagatcttttggcgagagaatggcaatgaatacacctattcaaggtagcgctgcggatataataaagatgtcgatggttaaagtatacaatgaattaaaggaaagaggattgaaatcaagacttattcttcaggtgcacgatgagcttataattgacacacatcctgatgaagttgaaatagtcaaggagcttctaaaatcaataatggaaaatatcataaagttgaaagttcctttagttgtagatatagggcaagggaaaaactggtatgatgcaaaataaaaggatcc

SEQ ID NO: 715 - DNA, 2678 bp, Artificial Sequence
  Description of Artificial Sequence: Synthetic Clostridium thermosulfurogenes DNA Polymerase S791F
atgaaatacctgctgccgaccgctgctgctggtctgctgctcctcgctgcccagccggcgatggccatggcgaaatttttgatcatagatggtaatagcttgatgtacagggcgtattttgccctgcctgatttgatgaacagcgaaggaatgcatacaaatgccatatacggtttttcaatgatgcttcttaaattgctggaggaggagaaaccagactacatagcaatagctttcgataaaaaggcttctacatttaggcacaaggagtacagtgcttataaaggaacccgccagtcgatgccagaagagctgatagaacaggtggatattttaaaagatgtgataaatgcatttaacataaagaccatcgagatagagggatttgaagcagatgatatcattggtacagtatcaaaaattgcttccgaaagtgggatggatgtgcttatcgtcacaggcgacagagatgcgcttcagcttgtgtcggcaaatgtaaaagtaaaaatatgtaaaaaaggcataacgcagatggatgagtacgatgaaaaggcggtctttgaaaagtatgaagtgacgccgcttcaattcatagacttgaaagggcttatgggagacaaatcagacaacattccaggagtgcccaatataggggagaagacggccataaagcttgttaaagaatttggatcaattgaaaatttactgatgaatacagataagttaaaagggaaaataaaagaaaatgtagaaaacaatgcagaattagctgttttaagcaaacggcttgctacgattgagagaaatgttcctattgatattgatttgaatgaatacgcggttaaaaattacgatgtcaataagcttacagagctatttgaaaaattggaattttcaagcctcatctcagatttaaaagatgatagtcgtgatacaaaggatattaaagaatggcctgtaagagattttacatacgttaaaaatgttttaggaaagtttgatgttttgtcattgtatccattcatatatgatggaaagataaaagcagtatcatttgcttgcggtgacggatcgttttttgtagagattgatgattatgacaattttaaattgcttaataatgataagcttacgttgataggacacgatctgaaagattttttagtaaacatttcatactgcggtattgaacttaattgtaagattttagatacggccataatgacttatcttttaaatccgtctgagtcgaattacgacataagtcgcgtattgaaaaaatacttgaaagaggatttgcaaaacatagatgatatagtaggcaagggcaggaataaaaagagctacgatgacattgacaaaaagcttttagtcgattatatgtgttcagccgcatcaaacttatctaagttaaaagataagctcatgtcatttataaaagagatggagatggaagatcttttaaaaaatgtggaaattccgcttattgaagtgctaaaatctatggaggtgtacggctttacattagataaagatgtacttagaagtatttctaaagaaatagatgaaaagacagataagattgtaaaagatatttacgatgctgctggatacgaatttaatattaactctacaaagcagttatcagaatttttgtttgataaactgaatttgccagcaataaaaaagactaaaacagggtattcgactgacatggaagtccttgcagaacttataccgtacaatgacatagtaggagaaataatagaatatagacagcttatgaagcttaaatctacgtacatagatggcttcattcccatcatggatgaaaataatagggtccactctacgtttaaacaaacagttgctgctacagggagaattagctcaacagagcctaatctgcagaacatacctgtaagagaagaatttggcaggaggataagaaaggcatttgtatcaagttatgaagatgggcttataatatctgctgattattctcagattgagctaagggttcttgcacatctttcagaggatgaaaaacttattgagtcatttttgaacaacgaagatatacatttaaggacggcatcggaggtttttaaggtttcgaaagaagaagtgacaagtgaaatgagaaggcgggcgaaagctgtcaactttggtattgtatatggtataagcgattacggcttatctaaagacttaaagatttcgcgaaaagaagcgaaagaatacatagacaattattttgacaggtacaagggcgtcaaaaattacatcgactcaattgtcaaatttgcaaaggaaaatgggtatgttacgactatcttaaataggagaagatacataccggaaatcaattttaaaaattttaaccaaagatcttttggcgagagaatggcaatgaatacacctattcaaggtagcgctgcggatataataaagatgtcgatggttaaagtatacaatgaattaaaggaaagaggattgaaatcaagacttattcttcaggtgcacgatgagcttataattgacacacatcctgatgaagttgaaatagtcaaggagcttctaaaatcaataatggaaaatatcataaagttgaaagttcctttagttgtagatatagggcaagggaaaaactggtatgatgcaaaataaaaggatcc

SEQ ID NO: 716 - DNA, 2678 bp, Artificial Sequence
  Description of Artificial Sequence: Synthetic Clostridium thermosulfurogenes DNA Polymerase S791P
atgaaatacctgctgccgaccgctgctgctggtctgctgctcctcgctgcccagccggcgatggccatggcgaaatttttgatcatagatggtaatagcttgatgtacagggcgtattttgccctgcctgatttgatgaacagcgaaggaatgcatacaaatgccatatacggtttttcaatgatgcttcttaaattgctggaggaggagaaaccagactacatagcaatagctttcgataaaaaggcttctacatttaggcacaaggagtacagtgcttataaaggaacccgccagtcgatgccagaagagctgatagaacaggtggatattttaaaagatgtgataaatgcatttaacataaagaccatcgagatagagggatttgaagcagatgatatcattggtacagtatcaaaaattgcttccgaaagtgggatggatgtgcttatcgtcacaggcgacagagatgcgcttcagcttgtgtcggcaaatgtaaaagtaaaaatatgtaaaaaaggcataacgcagatggatgagtacgatgaaaaggcggtctttgaaaagtatgaagtgacgccgcttcaattcatagacttgaaagggcttatgggagacaaatcagacaacattccaggagtgcccaatataggggagaagacggccataaagcttgttaaagaatttggatcaattgaaaatttactgatgaatacagataagttaaaagggaaaataaaagaaaatgtagaaaacaatgcagaattagctgttttaagcaaacggcttgctacgattgagagaaatgttcctattgatattgatttgaatgaatacgcggttaaaaattacgatgtcaataagcttacagagctatttgaaaaattggaattttcaagcctcatctcagatttaaaagatgatagtcgtgatacaaaggatattaaagaatggcctgtaagagattttacatacgttaaaaatgttttaggaaagtttgatgttttgtcattgtatccattcatatatgatggaaagataaaagcagtatcatttgcttgcggtgacggatcgttttttgtagagattgatgattatgacaattttaaattgcttaataatgataagcttacgttgataggacacgatctgaaagattttttagtaaacatttcatactgcggtattgaacttaattgtaagattttagatacggccataatgacttatcttttaaatccgtctgagtcgaattacgacataagtcgcgtattgaaaaaatacttgaaagaggatttgcaaaacatagatgatatagtaggcaagggcaggaataaaaagagctacgatgacattgacaaaaagcttttagtcgattatatgtgttcagccgcatcaaacttatctaagttaaaagataagctcatgtcatttataaaagagatggagatggaagatcttttaaaaaatgtggaaattccgcttattgaagtgctaaaatctatggaggtgtacggctttacattagataaagatgtacttagaagtatttctaaagaaatagatgaaaagacagataagattgtaaaagatatttacgatgctgctggatacgaatttaatattaactctacaaagcagttatcagaatttttgtttgataaactgaatttgccagcaataaaaaagactaaaacagggtattcgactgacatggaagtccttgcagaacttataccgtacaatgacatagtaggagaaataatagaatatagacagcttatgaagcttaaatctacgtacatagatggcttcattcccatcatggatgaaaataatagggtccactctacgtttaaacaaacagttgctgctacagggagaattagctcaacagagcctaatctgcagaacatacctgtaagagaagaatttggcaggaggataagaaaggcatttgtatcaagttatgaagatgggcttataatatctgctgattattctcagattgagctaagggttcttgcacatctttcagaggatgaaaaacttattgagtcatttttgaacaacgaagatatacatttaaggacggcatcggaggtttttaaggtttcgaaagaagaagtgacaagtgaaatgagaaggcgggcgaaagctgtcaactttggtattgtatatggtataagcgattacggcttatctaaagacttaaagatttcgcgaaaagaagcgaaagaatacatagacaattattttgacaggtacaagggcgtcaaaaattacatcgactcaattgtcaaatttgcaaaggaaaatgggtatgttacgactatcttaaataggagaagatacataccggaaatcaatcctaaaaattttaaccaaagatcttttggcgagagaatggcaatgaatacacctattcaaggtagcgctgcggatataataaagatgtcgatggttaaagtatacaatgaattaaaggaaagaggattgaaatcaagacttattcttcaggtgcacgatgagcttataattgacacacatcctgatgaagttgaaatagtcaaggagcttctaaaatcaataatggaaaatatcataaagttgaaagttcctttagttgtagatatagggcaagggaaaaactggtatgatgcaaaataaaaggatcc

SEQ ID NO: 717 - DNA, 2678 bp, Artificial Sequence
  Description of Artificial Sequence: Synthetic Clostridium thermosulfurogenes DNA Polymerase S791T
atgaaatacctgctgccgaccgctgctgctggtctgctgctcctcgctgcccagccggcgatggccatggcgaaatttttgatcatagatggtaatagcttgatgtacagggcgtattttgccctgcctgatttgatgaacagcgaaggaatgcatacaaatgccatatacggtttttcaatgatgcttcttaaattgctggaggaggagaaaccagactacatagcaatagctttcgataaaaaggcttctacatttaggcacaaggagtacagtgcttataaaggaacccgccagtcgatgccagaagagctgatagaacaggtggatattttaaaagatgtgataaatgcatttaacataaagaccatcgagatagagggatttgaagcagatgatatcattggtacagtatcaaaaattgcttccgaaagtgggatggatgtgcttatcgtcacaggcgacagagatgcgcttcagcttgtgtcggcaaatgtaaaagtaaaaatatgtaaaaaaggcataacgcagatggatgagtacgatgaaaaggcggtctttgaaaagtatgaagtgacgccgcttcaattcatagacttgaaagggcttatgggagacaaatcagacaacattccaggagtgcccaatataggggagaagacggccataaagcttgttaaagaatttggatcaattgaaaatttactgatgaatacagataagttaaaagggaaaataaaagaaaatgtagaaaacaatgcagaattagctgttttaagcaaacggcttgctacgattgagagaaatgttcctattgatattgatttgaatgaatacgcggttaaaaattacgatgtcaataagcttacagagctatttgaaaaattggaattttcaagcctcatctcagatttaaaagatgatagtcgtgatacaaaggatattaaagaatggcctgtaagagattttacatacgttaaaaatgttttaggaaagtttgatgttttgtcattgtatccattcatatatgatggaaagataaaagcagtatcatttgcttgcggtgacggatcgttttttgtagagattgatgattatgacaattttaaattgcttaataatgataagcttacgttgataggacacgatctgaaagattttttagtaaacatttcatactgcggtattgaacttaattgtaagattttagatacggccataatgacttatcttttaaatccgtctgagtcgaattacgacataagtcgcgtattgaaaaaatacttgaaagaggatttgcaaaacatagatgatatagtaggcaagggcaggaataaaaagagctacgatgacattgacaaaaagcttttagtcgattatatgtgttcagccgcatcaaacttatctaagttaaaagataagctcatgtcatttataaaagagatggagatggaagatcttttaaaaaatgtggaaattccgcttattgaagtgctaaaatctatggaggtgtacggctttacattagataaagatgtacttagaagtatttctaaagaaatagatgaaaagacagataagattgtaaaagatatttacgatgctgctggatacgaatttaatattaactctacaaagcagttatcagaatttttgtttgataaactgaatttgccagcaataaaaaagactaaaacagggtattcgactgacatggaagtccttgcagaacttataccgtacaatgacatagtaggagaaataatagaatatagacagcttatgaagcttaaatctacgtacatagatggcttcattcccatcatggatgaaaataatagggtccactctacgtttaaacaaacagttgctgctacagggagaattagctcaacagagcctaatctgcagaacatacctgtaagagaagaatttggcaggaggataagaaaggcatttgtatcaagttatgaagatgggcttataatatctgctgattattctcagattgagctaagggttcttgcacatctttcagaggatgaaaaacttattgagtcatttttgaacaacgaagatatacatttaaggacggcatcggaggtttttaaggtttcgaaagaagaagtgacaagtgaaatgagaaggcgggcgaaagctgtcaactttggtattgtatatggtataagcgattacggcttatctaaagacttaaagatttcgcgaaaagaagcgaaagaatacatagacaattattttgacaggtacaagggcgtcaaaaattacatcgactcaattgtcaaatttgcaaaggaaaatgggtatgttacgactatcttaaataggagaagatacataccggaaatcaatactaaaaattttaaccaaagatcttttggcgagagaatggcaatgaatacacctattcaaggtagcgctgcggatataataaagatgtcgatggttaaagtatacaatgaattaaaggaaagaggattgaaatcaagacttattcttcaggtgcacgatgagcttataattgacacacatcctgatgaagttgaaatagtcaaggagcttctaaaatcaataatggaaaatatcataaagttgaaagttcctttagttgtagatatagggcaagggaaaaactggtatgatgcaaaataaaaggatcc

SEQ ID NO: 718 - DNA, 2678 bp, Artificial Sequence
  Description of Artificial Sequence: Synthetic Clostridium thermosulfurogenes DNA Polymerase S791W
atgaaatacctgctgccgaccgctgctgctggtctgctgctcctcgctgcccagccggcgatggccatggcgaaatttttgatcatagatggtaatagcttgatgtacagggcgtattttgccctgcctgatttgatgaacagcgaaggaatgcatacaaatgccatatacggtttttcaatgatgcttcttaaattgctggaggaggagaaaccagactacatagcaatagctttcgataaaaaggcttctacatttaggcacaaggagtacagtgcttataaaggaacccgccagtcgatgccagaagagctgatagaacaggtggatattttaaaagatgtgataaatgcatttaacataaagaccatcgagatagagggatttgaagcagatgatatcattggtacagtatcaaaaattgcttccgaaagtgggatggatgtgcttatcgtcacaggcgacagagatgcgcttcagcttgtgtcggcaaatgtaaaagtaaaaatatgtaaaaaaggcataacgcagatggatgagtacgatgaaaaggcggtctttgaaaagtatgaagtgacgccgcttcaattcatagacttgaaagggcttatgggagacaaatcagacaacattccaggagtgcccaatataggggagaagacggccataaagcttgttaaagaatttggatcaattgaaaatttactgatgaatacagataagttaaaagggaaaataaaagaaaatgtagaaaacaatgcagaattagctgttttaagcaaacggcttgctacgattgagagaaatgttcctattgatattgatttgaatgaatacgcggttaaaaattacgatgtcaataagcttacagagctatttgaaaaattggaattttcaagcctcatctcagatttaaaagatgatagtcgtgatacaaaggatattaaagaatggcctgtaagagattttacatacgttaaaaatgttttaggaaagtttgatgttttgtcattgtatccattcatatatgatggaaagataaaagcagtatcatttgcttgcggtgacggatcgttttttgtagagattgatgattatgacaattttaaattgcttaataatgataagcttacgttgataggacacgatctgaaagattttttagtaaacatttcatactgcggtattgaacttaattgtaagattttagatacggccataatgacttatcttttaaatccgtctgagtcgaattacgacataagtcgcgtattgaaaaaatacttgaaagaggatttgcaaaacatagatgatatagtaggcaagggcaggaataaaaagagctacgatgacattgacaaaaagcttttagtcgattatatgtgttcagccgcatcaaacttatctaagttaaaagataagctcatgtcatttataaaagagatggagatggaagatcttttaaaaaatgtggaaattccgcttattgaagtgctaaaatctatggaggtgtacggctttacattagataaagatgtacttagaagtatttctaaagaaatagatgaaaagacagataagattgtaaaagatatttacgatgctgctggatacgaatttaatattaactctacaaagcagttatcagaatttttgtttgataaactgaatttgccagcaataaaaaagactaaaacagggtattcgactgacatggaagtccttgcagaacttataccgtacaatgacatagtaggagaaataatagaatatagacagcttatgaagcttaaatctacgtacatagatggcttcattcccatcatggatgaaaataatagggtccactctacgtttaaacaaacagttgctgctacagggagaattagctcaacagagcctaatctgcagaacatacctgtaagagaagaatttggcaggaggataagaaaggcatttgtatcaagttatgaagatgggcttataatatctgctgattattctcagattgagctaagggttcttgcacatctttcagaggatgaaaaacttattgagtcatttttgaacaacgaagatatacatttaaggacggcatcggaggtttttaaggtttcgaaagaagaagtgacaagtgaaatgagaaggcgggcgaaagctgtcaactttggtattgtatatggtataagcgattacggcttatctaaagacttaaagatttcgcgaaaagaagcgaaagaatacatagacaattattttgacaggtacaagggcgtcaaaaattacatcgactcaattgtcaaatttgcaaaggaaaatgggtatgttacgactatcttaaataggagaagatacataccggaaatcaattggaaaaattttaaccaaagatcttttggcgagagaatggcaatgaatacacctattcaaggtagcgctgcggatataataaagatgtcgatggttaaagtatacaatgaattaaaggaaagaggattgaaatcaagacttattcttcaggtgcacgatgagcttataattgacacacatcctgatgaagttgaaatagtcaaggagcttctaaaatcaataatggaaaatatcataaagttgaaagttcctttagttgtagatatagggcaagggaaaaactggtatgatgcaaaataaaaggatcc

SEQ ID NO: 719 - DNA, 2678 bp, Artificial Sequence
  Description of Artificial Sequence: Synthetic Clostridium thermosulfurogenes DNA Polymerase S791Y
atgaaatacctgctgccgaccgctgctgctggtctgctgctcctcgctgcccagccggcgatggccatggcgaaatttttgatcatagatggtaatagcttgatgtacagggcgtattttgccctgcctgatttgatgaacagcgaaggaatgcatacaaatgccatatacggtttttcaatgatgcttcttaaattgctggaggaggagaaaccagactacatagcaatagctttcgataaaaaggcttctacatttaggcacaaggagtacagtgcttataaaggaacccgccagtcgatgccagaagagctgatagaacaggtggatattttaaaagatgtgataaatgcatttaacataaagaccatcgagatagagggatttgaagcagatgatatcattggtacagtatcaaaaattgcttccgaaagtgggatggatgtgcttatcgtcacaggcgacagagatgcgcttcagcttgtgtcggcaaatgtaaaagtaaaaatatgtaaaaaaggcataacgcagatggatgagtacgatgaaaaggcggtctttgaaaagtatgaagtgacgccgcttcaattcatagacttgaaagggcttatgggagacaaatcagacaacattccaggagtgcccaatataggggagaagacggccataaagcttgttaaagaatttggatcaattgaaaatttactgatgaatacagataagttaaaagggaaaataaaagaaaatgtagaaaacaatgcagaattagctgttttaagcaaacggcttgctacgattgagagaaatgttcctattgatattgatttgaatgaatacgcggttaaaaattacgatgtcaataagcttacagagctatttgaaaaattggaattttcaagcctcatctcagatttaaaagatgatagtcgtgatacaaaggatattaaagaatggcctgtaagagattttacatacgttaaaaatgttttaggaaagtttgatgttttgtcattgtatccattcatatatgatggaaagataaaagcagtatcatttgcttgcggtgacggatcgttttttgtagagattgatgattatgacaattttaaattgcttaataatgataagcttacgttgataggacacgatctgaaagattttttagtaaacatttcatactgcggtattgaacttaattgtaagattttagatacggccataatgacttatcttttaaatccgtctgagtcgaattacgacataagtcgcgtattgaaaaaatacttgaaagaggatttgcaaaacatagatgatatagtaggcaagggcaggaataaaaagagctacgatgacattgacaaaaagcttttagtcgattatatgtgttcagccgcatcaaacttatctaagttaaaagataagctcatgtcatttataaaagagatggagatggaagatcttttaaaaaatgtggaaattccgcttattgaagtgctaaaatctatggaggtgtacggctttacattagataaagatgtacttagaagtatttctaaagaaatagatgaaaagacagataagattgtaaaagatatttacgatgctgctggatacgaatttaatattaactctacaaagcagttatcagaatttttgtttgataaactgaatttgccagcaataaaaaagactaaaacagggtattcgactgacatggaagtccttgcagaacttataccgtacaatgacatagtaggagaaataatagaatatagacagcttatgaagcttaaatctacgtacatagatggcttcattcccatcatggatgaaaataatagggtccactctacgtttaaacaaacagttgctgctacagggagaattagctcaacagagcctaatctgcagaacatacctgtaagagaagaatttggcaggaggataagaaaggcatttgtatcaagttatgaagatgggcttataatatctgctgattattctcagattgagctaagggttcttgcacatctttcagaggatgaaaaacttattgagtcatttttgaacaacgaagatatacatttaaggacggcatcggaggtttttaaggtttcgaaagaagaagtgacaagtgaaatgagaaggcgggcgaaagctgtcaactttggtattgtatatggtataagcgattacggcttatctaaagacttaaagatttcgcgaaaagaagcgaaagaatacatagacaattattttgacaggtacaagggcgtcaaaaattacatcgactcaattgtcaaatttgcaaaggaaaatgggtatgttacgactatcttaaataggagaagatacataccggaaatcaattataaaaattttaaccaaagatcttttggcgagagaatggcaatgaatacacctattcaaggtagcgctgcggatataataaagatgtcgatggttaaagtatacaatgaattaaaggaaagaggattgaaatcaagacttattcttcaggtgcacgatgagcttataattgacacacatcctgatgaagttgaaatagtcaaggagcttctaaaatcaataatggaaaatatcataaagttgaaagttcctttagttgtagatatagggcaagggaaaaactggtatgatgcaaaataaaaggatcc

SEQ ID NO: 720 - DNA, 2678 bp, Artificial Sequence
  Description of Artificial Sequence: Synthetic Clostridium thermosulfurogenes DNA Polymerase S791V
atgaaatacctgctgccgaccgctgctgctggtctgctgctcctcgctgcccagccggcgatggccatggcgaaatttttgatcatagatggtaatagcttgatgtacagggcgtattttgccctgcctgatttgatgaacagcgaaggaatgcatacaaatgccatatacggtttttcaatgatgcttcttaaattgctggaggaggagaaaccagactacatagcaatagctttcgataaaaaggcttctacatttaggcacaaggagtacagtgcttataaaggaacccgccagtcgatgccagaagagctgatagaacaggtggatattttaaaagatgtgataaatgcatttaacataaagaccatcgagatagagggatttgaagcagatgatatcattggtacagtatcaaaaattgcttccgaaagtgggatggatgtgcttatcgtcacaggcgacagagatgcgcttcagcttgtgtcggcaaatgtaaaagtaaaaatatgtaaaaaaggcataacgcagatggatgagtacgatgaaaaggcggtctttgaaaagtatgaagtgacgccgcttcaattcatagacttgaaagggcttatgggagacaaatcagacaacattccaggagtgcccaatataggggagaagacggccataaagcttgttaaagaatttggatcaattgaaaatttactgatgaatacagataagttaaaagggaaaataaaagaaaatgtagaaaacaatgcagaattagctgttttaagcaaacggcttgctacgattgagagaaatgttcctattgatattgatttgaatgaatacgcggttaaaaattacgatgtcaataagcttacagagctatttgaaaaattggaattttcaagcctcatctcagatttaaaagatgatagtcgtgatacaaaggatattaaagaatggcctgtaagagattttacatacgttaaaaatgttttaggaaagtttgatgttttgtcattgtatccattcatatatgatggaaagataaaagcagtatcatttgcttgcggtgacggatcgttttttgtagagattgatgattatgacaattttaaattgcttaataatgataagcttacgttgataggacacgatctgaaagattttttagtaaacatttcatactgcggtattgaacttaattgtaagattttagatacggccataatgacttatcttttaaatccgtctgagtcgaattacgacataagtcgcgtattgaaaaaatacttgaaagaggatttgcaaaacatagatgatatagtaggcaagggcaggaataaaaagagctacgatgacattgacaaaaagcttttagtcgattatatgtgttcagccgcatcaaacttatctaagttaaaagataagctcatgtcatttataaaagagatggagatggaagatcttttaaaaaatgtggaaattccgcttattgaagtgctaaaatctatggaggtgtacggctttacattagataaagatgtacttagaagtatttctaaagaaatagatgaaaagacagataagattgtaaaagatatttacgatgctgctggatacgaatttaatattaactctacaaagcagttatcagaatttttgtttgataaactgaatttgccagcaataaaaaagactaaaacagggtattcgactgacatggaagtccttgcagaacttataccgtacaatgacatagtaggagaaataatagaatatagacagcttatgaagcttaaatctacgtacatagatggcttcattcccatcatggatgaaaataatagggtccactctacgtttaaacaaacagttgctgctacagggagaattagctcaacagagcctaatctgcagaacatacctgtaagagaagaatttggcaggaggataagaaaggcatttgtatcaagttatgaagatgggcttataatatctgctgattattctcagattgagctaagggttcttgcacatctttcagaggatgaaaaacttattgagtcatttttgaacaacgaagatatacatttaaggacggcatcggaggtttttaaggtttcgaaagaagaagtgacaagtgaaatgagaaggcgggcgaaagctgtcaactttggtattgtatatggtataagcgattacggcttatctaaagacttaaagatttcgcgaaaagaagcgaaagaatacatagacaattattttgacaggtacaagggcgtcaaaaattacatcgactcaattgtcaaatttgcaaaggaaaatgggtatgttacgactatcttaaataggagaagatacataccggaaatcaatgttaaaaattttaaccaaagatcttttggcgagagaatggcaatgaatacacctattcaaggtagcgctgcggatataataaagatgtcgatggttaaagtatacaatgaattaaaggaaagaggattgaaatcaagacttattcttcaggtgcacgatgagcttataattgacacacatcctgatgaagttgaaatagtcaaggagcttctaaaatcaataatggaaaatatcataaagttgaaagttcctttagttgtagatatagggcaagggaaaaactggtatgatgcaaaataaaaggatcc

SEQ ID NO: 721 - DNA, 2678 bp, Artificial Sequence
  Description of Artificial Sequence: Synthetic Clostridium thermosulfurogenes DNA Polymerase K792A
atgaaatacctgctgccgaccgctgctgctggtctgctgctcctcgctgcccagccggcgatggccatggcgaaatttttgatcatagatggtaatagcttgatgtacagggcgtattttgccctgcctgatttgatgaacagcgaaggaatgcatacaaatgccatatacggtttttcaatgatgcttcttaaattgctggaggaggagaaaccagactacatagcaatagctttcgataaaaaggcttctacatttaggcacaaggagtacagtgcttataaaggaacccgccagtcgatgccagaagagctgatagaacaggtggatattttaaaagatgtgataaatgcatttaacataaagaccatcgagatagagggatttgaagcagatgatatcattggtacagtatcaaaaattgcttccgaaagtgggatggatgtgcttatcgtcacaggcgacagagatgcgcttcagcttgtgtcggcaaatgtaaaagtaaaaatatgtaaaaaaggcataacgcagatggatgagtacgatgaaaaggcggtctttgaaaagtatgaagtgacgccgcttcaattcatagacttgaaagggcttatgggagacaaatcagacaacattccaggagtgcccaatataggggagaagacggccataaagcttgttaaagaatttggatcaattgaaaatttactgatgaatacagataagttaaaagggaaaataaaagaaaatgtagaaaacaatgcagaattagctgttttaagcaaacggcttgctacgattgagagaaatgttcctattgatattgatttgaatgaatacgcggttaaaaattacgatgtcaataagcttacagagctatttgaaaaattggaattttcaagcctcatctcagatttaaaagatgatagtcgtgatacaaaggatattaaagaatggcctgtaagagattttacatacgttaaaaatgttttaggaaagtttgatgttttgtcattgtatccattcatatatgatggaaagataaaagcagtatcatttgcttgcggtgacggatcgttttttgtagagattgatgattatgacaattttaaattgcttaataatgataagcttacgttgataggacacgatctgaaagattttttagtaaacatttcatactgcggtattgaacttaattgtaagattttagatacggccataatgacttatcttttaaatccgtctgagtcgaattacgacataagtcgcgtattgaaaaaatacttgaaagaggatttgcaaaacatagatgatatagtaggcaagggcaggaataaaaagagctacgatgacattgacaaaaagcttttagtcgattatatgtgttcagccgcatcaaacttatctaagttaaaagataagctcatgtcatttataaaagagatggagatggaagatcttttaaaaaatgtggaaattccgcttattgaagtgctaaaatctatggaggtgtacggctttacattagataaagatgtacttagaagtatttctaaagaaatagatgaaaagacagataagattgtaaaagatatttacgatgctgctggatacgaatttaatattaactctacaaagcagttatcagaatttttgtttgataaactgaatttgccagcaataaaaaagactaaaacagggtattcgactgacatggaagtccttgcagaacttataccgtacaatgacatagtaggagaaataatagaatatagacagcttatgaagcttaaatctacgtacatagatggcttcattcccatcatggatgaaaataatagggtccactctacgtttaaacaaacagttgctgctacagggagaattagctcaacagagcctaatctgcagaacatacctgtaagagaagaatttggcaggaggataagaaaggcatttgtatcaagttatgaagatgggcttataatatctgctgattattctcagattgagctaagggttcttgcacatctttcagaggatgaaaaacttattgagtcatttttgaacaacgaagatatacatttaaggacggcatcggaggtttttaaggtttcgaaagaagaagtgacaagtgaaatgagaaggcgggcgaaagctgtcaactttggtattgtatatggtataagcgattacggcttatctaaagacttaaagatttcgcgaaaagaagcgaaagaatacatagacaattattttgacaggtacaagggcgtcaaaaattacatcgactcaattgtcaaatttgcaaaggaaaatgggtatgttacgactatcttaaataggagaagatacataccggaaatcaattcagctaattttaaccaaagatcttttggcgagagaatggcaatgaatacacctattcaaggtagcgctgcggatataataaagatgtcgatggttaaagtatacaatgaattaaaggaaagaggattgaaatcaagacttattcttcaggtgcacgatgagcttataattgacacacatcctgatgaagttgaaatagtcaaggagcttctaaaatcaataatggaaaatatcataaagttgaaagttcctttagttgtagatatagggcaagggaaaaactggtatgatgcaaaataaaaggatcc

SEQ ID NO: 722 - DNA, 2678 bp, Artificial Sequence
  Description of Artificial Sequence: Synthetic Clostridium thermosulfurogenes DNA Polymerase K792R
atgaaatacctgctgccgaccgctgctgctggtctgctgctcctcgctgcccagccggcgatggccatggcgaaatttttgatcatagatggtaatagcttgatgtacagggcgtattttgccctgcctgatttgatgaacagcgaaggaatgcatacaaatgccatatacggtttttcaatgatgcttcttaaattgctggaggaggagaaaccagactacatagcaatagctttcgataaaaaggcttctacatttaggcacaaggagtacagtgcttataaaggaacccgccagtcgatgccagaagagctgatagaacaggtggatattttaaaagatgtgataaatgcatttaacataaagaccatcgagatagagggatttgaagcagatgatatcattggtacagtatcaaaaattgcttccgaaagtgggatggatgtgcttatcgtcacaggcgacagagatgcgcttcagcttgtgtcggcaaatgtaaaagtaaaaatatgtaaaaaaggcataacgcagatggatgagtacgatgaaaaggcggtctttgaaaagtatgaagtgacgccgcttcaattcatagacttgaaagggcttatgggagacaaatcagacaacattccaggagtgcccaatataggggagaagacggccataaagcttgttaaagaatttggatcaattgaaaatttactgatgaatacagataagttaaaagggaaaataaaagaaaatgtagaaaacaatgcagaattagctgttttaagcaaacggcttgctacgattgagagaaatgttcctattgatattgatttgaatgaatacgcggttaaaaattacgatgtcaataagcttacagagctatttgaaaaattggaattttcaagcctcatctcagatttaaaagatgatagtcgtgatacaaaggatattaaagaatggcctgtaagagattttacatacgttaaaaatgttttaggaaagtttgatgttttgtcattgtatccattcatatatgatggaaagataaaagcagtatcatttgcttgcggtgacggatcgttttttgtagagattgatgattatgacaattttaaattgcttaataatgataagcttacgttgataggacacgatctgaaagattttttagtaaacatttcatactgcggtattgaacttaattgtaagattttagatacggccataatgacttatcttttaaatccgtctgagtcgaattacgacataagtcgcgtattgaaaaaatacttgaaagaggatttgcaaaacatagatgatatagtaggcaagggcaggaataaaaagagctacgatgacattgacaaaaagcttttagtcgattatatgtgttcagccgcatcaaacttatctaagttaaaagataagctcatgtcatttataaaagagatggagatggaagatcttttaaaaaatgtggaaattccgcttattgaagtgctaaaatctatggaggtgtacggctttacattagataaagatgtacttagaagtatttctaaagaaatagatgaaaagacagataagattgtaaaagatatttacgatgctgctggatacgaatttaatattaactctacaaagcagttatcagaatttttgtttgataaactgaatttgccagcaataaaaaagactaaaacagggtattcgactgacatggaagtccttgcagaacttataccgtacaatgacatagtaggagaaataatagaatatagacagcttatgaagcttaaatctacgtacatagatggcttcattcccatcatggatgaaaataatagggtccactctacgtttaaacaaacagttgctgctacagggagaattagctcaacagagcctaatctgcagaacatacctgtaagagaagaatttggcaggaggataagaaaggcatttgtatcaagttatgaagatgggcttataatatctgctgattattctcagattgagctaagggttcttgcacatctttcagaggatgaaaaacttattgagtcatttttgaacaacgaagatatacatttaaggacggcatcggaggtttttaaggtttcgaaagaagaagtgacaagtgaaatgagaaggcgggcgaaagctgtcaactttggtattgtatatggtataagcgattacggcttatctaaagacttaaagatttcgcgaaaagaagcgaaagaatacatagacaattattttgacaggtacaagggcgtcaaaaattacatcgactcaattgtcaaatttgcaaaggaaaatgggtatgttacgactatcttaaataggagaagatacataccggaaatcaattcacgtaattttaaccaaagatcttttggcgagagaatggcaatgaatacacctattcaaggtagcgctgcggatataataaagatgtcgatggttaaagtatacaatgaattaaaggaaagaggattgaaatcaagacttattcttcaggtgcacgatgagcttataattgacacacatcctgatgaagttgaaatagtcaaggagcttctaaaatcaataatggaaaatatcataaagttgaaagttcctttagttgtagatatagggcaagggaaaaactggtatgatgcaaaataaaaggatcc

SEQ ID NO: 723 - DNA, 2678 bp, Artificial Sequence
  Description of Artificial Sequence: Synthetic Clostridium thermosulfurogenes DNA Polymerase K792N
atgaaatacctgctgccgaccgctgctgctggtctgctgctcctcgctgcccagccggcgatggccatggcgaaatttttgatcatagatggtaatagcttgatgtacagggcgtattttgccctgcctgatttgatgaacagcgaaggaatgcatacaaatgccatatacggtttttcaatgatgcttcttaaattgctggaggaggagaaaccagactacatagcaatagctttcgataaaaaggcttctacatttaggcacaaggagtacagtgcttataaaggaacccgccagtcgatgccagaagagctgatagaacaggtggatattttaaaagatgtgataaatgcatttaacataaagaccatcgagatagagggatttgaagcagatgatatcattggtacagtatcaaaaattgcttccgaaagtgggatggatgtgcttatcgtcacaggcgacagagatgcgcttcagcttgtgtcggcaaatgtaaaagtaaaaatatgtaaaaaaggcataacgcagatggatgagtacgatgaaaaggcggtctttgaaaagtatgaagtgacgccgcttcaattcatagacttgaaagggcttatgggagacaaatcagacaacattccaggagtgcccaatataggggagaagacggccataaagcttgttaaagaatttggatcaattgaaaatttactgatgaatacagataagttaaaagggaaaataaaagaaaatgtagaaaacaatgcagaattagctgttttaagcaaacggcttgctacgattgagagaaatgttcctattgatattgatttgaatgaatacgcggttaaaaattacgatgtcaataagcttacagagctatttgaaaaattggaattttcaagcctcatctcagatttaaaagatgatagtcgtgatacaaaggatattaaagaatggcctgtaagagattttacatacgttaaaaatgttttaggaaagtttgatgttttgtcattgtatccattcatatatgatggaaagataaaagcagtatcatttgcttgcggtgacggatcgttttttgtagagattgatgattatgacaattttaaattgcttaataatgataagcttacgttgataggacacgatctgaaagattttttagtaaacatttcatactgcggtattgaacttaattgtaagattttagatacggccataatgacttatcttttaaatccgtctgagtcgaattacgacataagtcgcgtattgaaaaaatacttgaaagaggatttgcaaaacatagatgatatagtaggcaagggcaggaataaaaagagctacgatgacattgacaaaaagcttttagtcgattatatgtgttcagccgcatcaaacttatctaagttaaaagataagctcatgtcatttataaaagagatggagatggaagatcttttaaaaaatgtggaaattccgcttattgaagtgctaaaatctatggaggtgtacggctttacattagataaagatgtacttagaagtatttctaaagaaatagatgaaaagacagataagattgtaaaagatatttacgatgctgctggatacgaatttaatattaactctacaaagcagttatcagaatttttgtttgataaactgaatttgccagcaataaaaaagactaaaacagggtattcgactgacatggaagtccttgcagaacttataccgtacaatgacatagtaggagaaataatagaatatagacagcttatgaagcttaaatctacgtacatagatggcttcattcccatcatggatgaaaataatagggtccactctacgtttaaacaaacagttgctgctacagggagaattagctcaacagagcctaatctgcagaacatacctgtaagagaagaatttggcaggaggataagaaaggcatttgtatcaagttatgaagatgggcttataatatctgctgattattctcagattgagctaagggttcttgcacatctttcagaggatgaaaaacttattgagtcatttttgaacaacgaagatatacatttaaggacggcatcggaggtttttaaggtttcgaaagaagaagtgacaagtgaaatgagaaggcgggcgaaagctgtcaactttggtattgtatatggtataagcgattacggcttatctaaagacttaaagatttcgcgaaaagaagcgaaagaatacatagacaattattttgacaggtacaagggcgtcaaaaattacatcgactcaattgtcaaatttgcaaaggaaaatgggtatgttacgactatcttaaataggagaagatacataccggaaatcaattcaaataattttaaccaaagatcttttggcgagagaatggcaatgaatacacctattcaaggtagcgctgcggatataataaagatgtcgatggttaaagtatacaatgaattaaaggaaagaggattgaaatcaagacttattcttcaggtgcacgatgagcttataattgacacacatcctgatgaagttgaaatagtcaaggagcttctaaaatcaataatggaaaatatcataaagttgaaagttcctttagttgtagatatagggcaagggaaaaactggtatgatgcaaaataaaaggatcc

SEQ ID NO: 724 - DNA, 2678 bp, Artificial Sequence
  Description of Artificial Sequence: Synthetic Clostridium thermosulfurogenes DNA Polymerase K792D
atgaaatacctgctgccgaccgctgctgctggtctgctgctcctcgctgcccagccggcgatggccatggcgaaatttttgatcatagatggtaatagcttgatgtacagggcgtattttgccctgcctgatttgatgaacagcgaaggaatgcatacaaatgccatatacggtttttcaatgatgcttcttaaattgctggaggaggagaaaccagactacatagcaatagctttcgataaaaaggcttctacatttaggcacaaggagtacagtgcttataaaggaacccgccagtcgatgccagaagagctgatagaacaggtggatattttaaaagatgtgataaatgcatttaacataaagaccatcgagatagagggatttgaagcagatgatatcattggtacagtatcaaaaattgcttccgaaagtgggatggatgtgcttatcgtcacaggcgacagagatgcgcttcagcttgtgtcggcaaatgtaaaagtaaaaatatgtaaaaaaggcataacgcagatggatgagtacgatgaaaaggcggtctttgaaaagtatgaagtgacgccgcttcaattcatagacttgaaagggcttatgggagacaaatcagacaacattccaggagtgcccaatataggggagaagacggccataaagcttgttaaagaatttggatcaattgaaaatttactgatgaatacagataagttaaaagggaaaataaaagaaaatgtagaaaacaatgcagaattagctgttttaagcaaacggcttgctacgattgagagaaatgttcctattgatattgatttgaatgaatacgcggttaaaaattacgatgtcaataagcttacagagctatttgaaaaattggaattttcaagcctcatctcagatttaaaagatgatagtcgtgatacaaaggatattaaagaatggcctgtaagagattttacatacgttaaaaatgttttaggaaagtttgatgttttgtcattgtatccattcatatatgatggaaagataaaagcagtatcatttgcttgcggtgacggatcgttttttgtagagattgatgattatgacaattttaaattgcttaataatgataagcttacgttgataggacacgatctgaaagattttttagtaaacatttcatactgcggtattgaacttaattgtaagattttagatacggccataatgacttatcttttaaatccgtctgagtcgaattacgacataagtcgcgtattgaaaaaatacttgaaagaggatttgcaaaacatagatgatatagtaggcaagggcaggaataaaaagagctacgatgacattgacaaaaagcttttagtcgattatatgtgttcagccgcatcaaacttatctaagttaaaagataagctcatgtcatttataaaagagatggagatggaagatcttttaaaaaatgtggaaattccgcttattgaagtgctaaaatctatggaggtgtacggctttacattagataaagatgtacttagaagtatttctaaagaaatagatgaaaagacagataagattgtaaaagatatttacgatgctgctggatacgaatttaatattaactctacaaagcagttatcagaatttttgtttgataaactgaatttgccagcaataaaaaagactaaaacagggtattcgactgacatggaagtccttgcagaacttataccgtacaatgacatagtaggagaaataatagaatatagacagcttatgaagcttaaatctacgtacatagatggcttcattcccatcatggatgaaaataatagggtccactctacgtttaaacaaacagttgctgctacagggagaattagctcaacagagcctaatctgcagaacatacctgtaagagaagaatttggcaggaggataagaaaggcatttgtatcaagttatgaagatgggcttataatatctgctgattattctcagattgagctaagggttcttgcacatctttcagaggatgaaaaacttattgagtcatttttgaacaacgaagatatacatttaaggacggcatcggaggtttttaaggtttcgaaagaagaagtgacaagtgaaatgagaaggcgggcgaaagctgtcaactttggtattgtatatggtataagcgattacggcttatctaaagacttaaagatttcgcgaaaagaagcgaaagaatacatagacaattattttgacaggtacaagggcgtcaaaaattacatcgactcaattgtcaaatttgcaaaggaaaatgggtatgttacgactatcttaaataggagaagatacataccggaaatcaattcagataattttaaccaaagatcttttggcgagagaatggcaatgaatacacctattcaaggtagcgctgcggatataataaagatgtcgatggttaaagtatacaatgaattaaaggaaagaggattgaaatcaagacttattcttcaggtgcacgatgagcttataattgacacacatcctgatgaagttgaaatagtcaaggagcttctaaaatcaataatggaaaatatcataaagttgaaagttcctttagttgtagatatagggcaagggaaaaactggtatgatgcaaaataaaaggatcc

SEQ ID NO: 725 - DNA, 2678 bp, Artificial Sequence
  Description of Artificial Sequence: Synthetic Clostridium thermosulfurogenes DNA Polymerase K792C
atgaaatacctgctgccgaccgctgctgctggtctgctgctcctcgctgcccagccggcgatggccatggcgaaatttttgatcatagatggtaatagcttgatgtacagggcgtattttgccctgcctgatttgatgaacagcgaaggaatgcatacaaatgccatatacggtttttcaatgatgcttcttaaattgctggaggaggagaaaccagactacatagcaatagctttcgataaaaaggcttctacatttaggcacaaggagtacagtgcttataaaggaacccgccagtcgatgccagaagagctgatagaacaggtggatattttaaaagatgtgataaatgcatttaacataaagaccatcgagatagagggatttgaagcagatgatatcattggtacagtatcaaaaattgcttccgaaagtgggatggatgtgcttatcgtcacaggcgacagagatgcgcttcagcttgtgtcggcaaatgtaaaagtaaaaatatgtaaaaaaggcataacgcagatggatgagtacgatgaaaaggcggtctttgaaaagtatgaagtgacgccgcttcaattcatagacttgaaagggcttatgggagacaaatcagacaacattccaggagtgcccaatataggggagaagacggccataaagcttgttaaagaatttggatcaattgaaaatttactgatgaatacagataagttaaaagggaaaataaaagaaaatgtagaaaacaatgcagaattagctgttttaagcaaacggcttgctacgattgagagaaatgttcctattgatattgatttgaatgaatacgcggttaaaaattacgatgtcaataagcttacagagctatttgaaaaattggaattttcaagcctcatctcagatttaaaagatgatagtcgtgatacaaaggatattaaagaatggcctgtaagagattttacatacgttaaaaatgttttaggaaagtttgatgttttgtcattgtatccattcatatatgatggaaagataaaagcagtatcatttgcttgcggtgacggatcgttttttgtagagattgatgattatgacaattttaaattgcttaataatgataagcttacgttgataggacacgatctgaaagattttttagtaaacatttcatactgcggtattgaacttaattgtaagattttagatacggccataatgacttatcttttaaatccgtctgagtcgaattacgacataagtcgcgtattgaaaaaatacttgaaagaggatttgcaaaacatagatgatatagtaggcaagggcaggaataaaaagagctacgatgacattgacaaaaagcttttagtcgattatatgtgttcagccgcatcaaacttatctaagttaaaagataagctcatgtcatttataaaagagatggagatggaagatcttttaaaaaatgtggaaattccgcttattgaagtgctaaaatctatggaggtgtacggctttacattagataaagatgtacttagaagtatttctaaagaaatagatgaaaagacagataagattgtaaaagatatttacgatgctgctggatacgaatttaatattaactctacaaagcagttatcagaatttttgtttgataaactgaatttgccagcaataaaaaagactaaaacagggtattcgactgacatggaagtccttgcagaacttataccgtacaatgacatagtaggagaaataatagaatatagacagcttatgaagcttaaatctacgtacatagatggcttcattcccatcatggatgaaaataatagggtccactctacgtttaaacaaacagttgctgctacagggagaattagctcaacagagcctaatctgcagaacatacctgtaagagaagaatttggcaggaggataagaaaggcatttgtatcaagttatgaagatgggcttataatatctgctgattattctcagattgagctaagggttcttgcacatctttcagaggatgaaaaacttattgagtcatttttgaacaacgaagatatacatttaaggacggcatcggaggtttttaaggtttcgaaagaagaagtgacaagtgaaatgagaaggcgggcgaaagctgtcaactttggtattgtatatggtataagcgattacggcttatctaaagacttaaagatttcgcgaaaagaagcgaaagaatacatagacaattattttgacaggtacaagggcgtcaaaaattacatcgactcaattgtcaaatttgcaaaggaaaatgggtatgttacgactatcttaaataggagaagatacataccggaaatcaattcatgtaattttaaccaaagatcttttggcgagagaatggcaatgaatacacctattcaaggtagcgctgcggatataataaagatgtcgatggttaaagtatacaatgaattaaaggaaagaggattgaaatcaagacttattcttcaggtgcacgatgagcttataattgacacacatcctgatgaagttgaaatagtcaaggagcttctaaaatcaataatggaaaatatcataaagttgaaagttcctttagttgtagatatagggcaagggaaaaactggtatgatgcaaaataaaaggatcc

SEQ ID NO: 726 - DNA, 2678 bp, Artificial Sequence
  Description of Artificial Sequence: Synthetic Clostridium thermosulfurogenes DNA Polymerase K792E
atgaaatacctgctgccgaccgctgctgctggtctgctgctcctcgctgcccagccggcgatggccatggcgaaatttttgatcatagatggtaatagcttgatgtacagggcgtattttgccctgcctgatttgatgaacagcgaaggaatgcatacaaatgccatatacggtttttcaatgatgcttcttaaattgctggaggaggagaaaccagactacatagcaatagctttcgataaaaaggcttctacatttaggcacaaggagtacagtgcttataaaggaacccgccagtcgatgccagaagagctgatagaacaggtggatattttaaaagatgtgataaatgcatttaacataaagaccatcgagatagagggatttgaagcagatgatatcattggtacagtatcaaaaattgcttccgaaagtgggatggatgtgcttatcgtcacaggcgacagagatgcgcttcagcttgtgtcggcaaatgtaaaagtaaaaatatgtaaaaaaggcataacgcagatggatgagtacgatgaaaaggcggtctttgaaaagtatgaagtgacgccgcttcaattcatagacttgaaagggcttatgggagacaaatcagacaacattccaggagtgcccaatataggggagaagacggccataaagcttgttaaagaatttggatcaattgaaaatttactgatgaatacagataagttaaaagggaaaataaaagaaaatgtagaaaacaatgcagaattagctgttttaagcaaacggcttgctacgattgagagaaatgttcctattgatattgatttgaatgaatacgcggttaaaaattacgatgtcaataagcttacagagctatttgaaaaattggaattttcaagcctcatctcagatttaaaagatgatagtcgtgatacaaaggatattaaagaatggcctgtaagagattttacatacgttaaaaatgttttaggaaagtttgatgttttgtcattgtatccattcatatatgatggaaagataaaagcagtatcatttgcttgcggtgacggatcgttttttgtagagattgatgattatgacaattttaaattgcttaataatgataagcttacgttgataggacacgatctgaaagattttttagtaaacatttcatactgcggtattgaacttaattgtaagattttagatacggccataatgacttatcttttaaatccgtctgagtcgaattacgacataagtcgcgtattgaaaaaatacttgaaagaggatttgcaaaacatagatgatatagtaggcaagggcaggaataaaaagagctacgatgacattgacaaaaagcttttagtcgattatatgtgttcagccgcatcaaacttatctaagttaaaagataagctcatgtcatttataaaagagatggagatggaagatcttttaaaaaatgtggaaattccgcttattgaagtgctaaaatctatggaggtgtacggctttacattagataaagatgtacttagaagtatttctaaagaaatagatgaaaagacagataagattgtaaaagatatttacgatgctgctggatacgaatttaatattaactctacaaagcagttatcagaatttttgtttgataaactgaatttgccagcaataaaaaagactaaaacagggtattcgactgacatggaagtccttgcagaacttataccgtacaatgacatagtaggagaaataatagaatatagacagcttatgaagcttaaatctacgtacatagatggcttcattcccatcatggatgaaaataatagggtccactctacgtttaaacaaacagttgctgctacagggagaattagctcaacagagcctaatctgcagaacatacctgtaagagaagaatttggcaggaggataagaaaggcatttgtatcaagttatgaagatgggcttataatatctgctgattattctcagattgagctaagggttcttgcacatctttcagaggatgaaaaacttattgagtcatttttgaacaacgaagatatacatttaaggacggcatcggaggtttttaaggtttcgaaagaagaagtgacaagtgaaatgagaaggcgggcgaaagctgtcaactttggtattgtatatggtataagcgattacggcttatctaaagacttaaagatttcgcgaaaagaagcgaaagaatacatagacaattattttgacaggtacaagggcgtcaaaaattacatcgactcaattgtcaaatttgcaaaggaaaatgggtatgttacgactatcttaaataggagaagatacataccggaaatcaattcagaaaattttaaccaaagatcttttggcgagagaatggcaatgaatacacctattcaaggtagcgctgcggatataataaagatgtcgatggttaaagtatacaatgaattaaaggaaagaggattgaaatcaagacttattcttcaggtgcacgatgagcttataattgacacacatcctgatgaagttgaaatagtcaaggagcttctaaaatcaataatggaaaatatcataaagttgaaagttcctttagttgtagatatagggcaagggaaaaactggtatgatgcaaaataaaaggatcc

SEQ ID NO: 727 - DNA, 2678 bp, Artificial Sequence
  Description of Artificial Sequence: Synthetic Clostridium thermosulfurogenes DNA Polymerase K792Q
atgaaatacctgctgccgaccgctgctgctggtctgctgctcctcgctgcccagccggcgatggccatggcgaaatttttgatcatagatggtaatagcttgatgtacagggcgtattttgccctgcctgatttgatgaacagcgaaggaatgcatacaaatgccatatacggtttttcaatgatgcttcttaaattgctggaggaggagaaaccagactacatagcaatagctttcgataaaaaggcttctacatttaggcacaaggagtacagtgcttataaaggaacccgccagtcgatgccagaagagctgatagaacaggtggatattttaaaagatgtgataaatgcatttaacataaagaccatcgagatagagggatttgaagcagatgatatcattggtacagtatcaaaaattgcttccgaaagtgggatggatgtgcttatcgtcacaggcgacagagatgcgcttcagcttgtgtcggcaaatgtaaaagtaaaaatatgtaaaaaaggcataacgcagatggatgagtacgatgaaaaggcggtctttgaaaagtatgaagtgacgccgcttcaattcatagacttgaaagggcttatgggagacaaatcagacaacattccaggagtgcccaatataggggagaagacggccataaagcttgttaaagaatttggatcaattgaaaatttactgatgaatacagataagttaaaagggaaaataaaagaaaatgtagaaaacaatgcagaattagctgttttaagcaaacggcttgctacgattgagagaaatgttcctattgatattgatttgaatgaatacgcggttaaaaattacgatgtcaataagcttacagagctatttgaaaaattggaattttcaagcctcatctcagatttaaaagatgatagtcgtgatacaaaggatattaaagaatggcctgtaagagattttacatacgttaaaaatgttttaggaaagtttgatgttttgtcattgtatccattcatatatgatggaaagataaaagcagtatcatttgcttgcggtgacggatcgttttttgtagagattgatgattatgacaattttaaattgcttaataatgataagcttacgttgataggacacgatctgaaagattttttagtaaacatttcatactgcggtattgaacttaattgtaagattttagatacggccataatgacttatcttttaaatccgtctgagtcgaattacgacataagtcgcgtattgaaaaaatacttgaaagaggatttgcaaaacatagatgatatagtaggcaagggcaggaataaaaagagctacgatgacattgacaaaaagcttttagtcgattatatgtgttcagccgcatcaaacttatctaagttaaaagataagctcatgtcatttataaaagagatggagatggaagatcttttaaaaaatgtggaaattccgcttattgaagtgctaaaatctatggaggtgtacggctttacattagataaagatgtacttagaagtatttctaaagaaatagatgaaaagacagataagattgtaaaagatatttacgatgctgctggatacgaatttaatattaactctacaaagcagttatcagaatttttgtttgataaactgaatttgccagcaataaaaaagactaaaacagggtattcgactgacatggaagtccttgcagaacttataccgtacaatgacatagtaggagaaataatagaatatagacagcttatgaagcttaaatctacgtacatagatggcttcattcccatcatggatgaaaataatagggtccactctacgtttaaacaaacagttgctgctacagggagaattagctcaacagagcctaatctgcagaacatacctgtaagagaagaatttggcaggaggataagaaaggcatttgtatcaagttatgaagatgggcttataatatctgctgattattctcagattgagctaagggttcttgcacatctttcagaggatgaaaaacttattgagtcatttttgaacaacgaagatatacatttaaggacggcatcggaggtttttaaggtttcgaaagaagaagtgacaagtgaaatgagaaggcgggcgaaagctgtcaactttggtattgtatatggtataagcgattacggcttatctaaagacttaaagatttcgcgaaaagaagcgaaagaatacatagacaattattttgacaggtacaagggcgtcaaaaattacatcgactcaattgtcaaatttgcaaaggaaaatgggtatgttacgactatcttaaataggagaagatacataccggaaatcaattcacaaaattttaaccaaagatcttttggcgagagaatggcaatgaatacacctattcaaggtagcgctgcggatataataaagatgtcgatggttaaagtatacaatgaattaaaggaaagaggattgaaatcaagacttattcttcaggtgcacgatgagcttataattgacacacatcctgatgaagttgaaatagtcaaggagcttctaaaatcaataatggaaaatatcataaagttgaaagttcctttagttgtagatatagggcaagggaaaaactggtatgatgcaaaataaaaggatcc

SEQ ID NO: 728 - DNA, 2678 bp, Artificial Sequence
  Description of Artificial Sequence: Synthetic Clostridium thermosulfurogenes DNA Polymerase K792G
atgaaatacctgctgccgaccgctgctgctggtctgctgctcctcgctgcccagccggcgatggccatggcgaaatttttgatcatagatggtaatagcttgatgtacagggcgtattttgccctgcctgatttgatgaacagcgaaggaatgcatacaaatgccatatacggtttttcaatgatgcttcttaaattgctggaggaggagaaaccagactacatagcaatagctttcgataaaaaggcttctacatttaggcacaaggagtacagtgcttataaaggaacccgccagtcgatgccagaagagctgatagaacaggtggatattttaaaagatgtgataaatgcatttaacataaagaccatcgagatagagggatttgaagcagatgatatcattggtacagtatcaaaaattgcttccgaaagtgggatggatgtgcttatcgtcacaggcgacagagatgcgcttcagcttgtgtcggcaaatgtaaaagtaaaaatatgtaaaaaaggcataacgcagatggatgagtacgatgaaaaggcggtctttgaaaagtatgaagtgacgccgcttcaattcatagacttgaaagggcttatgggagacaaatcagacaacattccaggagtgcccaatataggggagaagacggccataaagcttgttaaagaatttggatcaattgaaaatttactgatgaatacagataagttaaaagggaaaataaaagaaaatgtagaaaacaatgcagaattagctgttttaagcaaacggcttgctacgattgagagaaatgttcctattgatattgatttgaatgaatacgcggttaaaaattacgatgtcaataagcttacagagctatttgaaaaattggaattttcaagcctcatctcagatttaaaagatgatagtcgtgatacaaaggatattaaagaatggcctgtaagagattttacatacgttaaaaatgttttaggaaagtttgatgttttgtcattgtatccattcatatatgatggaaagataaaagcagtatcatttgcttgcggtgacggatcgttttttgtagagattgatgattatgacaattttaaattgcttaataatgataagcttacgttgataggacacgatctgaaagattttttagtaaacatttcatactgcggtattgaacttaattgtaagattttagatacggccataatgacttatcttttaaatccgtctgagtcgaattacgacataagtcgcgtattgaaaaaatacttgaaagaggatttgcaaaacatagatgatatagtaggcaagggcaggaataaaaagagctacgatgacattgacaaaaagcttttagtcgattatatgtgttcagccgcatcaaacttatctaagttaaaagataagctcatgtcatttataaaagagatggagatggaagatcttttaaaaaatgtggaaattccgcttattgaagtgctaaaatctatggaggtgtacggctttacattagataaagatgtacttagaagtatttctaaagaaatagatgaaaagacagataagattgtaaaagatatttacgatgctgctggatacgaatttaatattaactctacaaagcagttatcagaatttttgtttgataaactgaatttgccagcaataaaaaagactaaaacagggtattcgactgacatggaagtccttgcagaacttataccgtacaatgacatagtaggagaaataatagaatatagacagcttatgaagcttaaatctacgtacatagatggcttcattcccatcatggatgaaaataatagggtccactctacgtttaaacaaacagttgctgctacagggagaattagctcaacagagcctaatctgcagaacatacctgtaagagaagaatttggcaggaggataagaaaggcatttgtatcaagttatgaagatgggcttataatatctgctgattattctcagattgagctaagggttcttgcacatctttcagaggatgaaaaacttattgagtcatttttgaacaacgaagatatacatttaaggacggcatcggaggtttttaaggtttcgaaagaagaagtgacaagtgaaatgagaaggcgggcgaaagctgtcaactttggtattgtatatggtataagcgattacggcttatctaaagacttaaagatttcgcgaaaagaagcgaaagaatacatagacaattattttgacaggtacaagggcgtcaaaaattacatcgactcaattgtcaaatttgcaaaggaaaatgggtatgttacgactatcttaaataggagaagatacataccggaaatcaattcaggtaattttaaccaaagatcttttggcgagagaatggcaatgaatacacctattcaaggtagcgctgcggatataataaagatgtcgatggttaaagtatacaatgaattaaaggaaagaggattgaaatcaagacttattcttcaggtgcacgatgagcttataattgacacacatcctgatgaagttgaaatagtcaaggagcttctaaaatcaataatggaaaatatcataaagttgaaagttcctttagttgtagatatagggcaagggaaaaactggtatgatgcaaaataaaaggatcc

SEQ ID NO: 729 - DNA, 2678 bp, Artificial Sequence
  Description of Artificial Sequence: Synthetic Clostridium thermosulfurogenes DNA Polymerase K792H
atgaaatacctgctgccgaccgctgctgctggtctgctgctcctcgctgcccagccggcgatggccatggcgaaatttttgatcatagatggtaatagcttgatgtacagggcgtattttgccctgcctgatttgatgaacagcgaaggaatgcatacaaatgccatatacggtttttcaatgatgcttcttaaattgctggaggaggagaaaccagactacatagcaatagctttcgataaaaaggcttctacatttaggcacaaggagtacagtgcttataaaggaacccgccagtcgatgccagaagagctgatagaacaggtggatattttaaaagatgtgataaatgcatttaacataaagaccatcgagatagagggatttgaagcagatgatatcattggtacagtatcaaaaattgcttccgaaagtgggatggatgtgcttatcgtcacaggcgacagagatgcgcttcagcttgtgtcggcaaatgtaaaagtaaaaatatgtaaaaaaggcataacgcagatggatgagtacgatgaaaaggcggtctttgaaaagtatgaagtgacgccgcttcaattcatagacttgaaagggcttatgggagacaaatcagacaacattccaggagtgcccaatataggggagaagacggccataaagcttgttaaagaatttggatcaattgaaaatttactgatgaatacagataagttaaaagggaaaataaaagaaaatgtagaaaacaatgcagaattagctgttttaagcaaacggcttgctacgattgagagaaatgttcctattgatattgatttgaatgaatacgcggttaaaaattacgatgtcaataagcttacagagctatttgaaaaattggaattttcaagcctcatctcagatttaaaagatgatagtcgtgatacaaaggatattaaagaatggcctgtaagagattttacatacgttaaaaatgttttaggaaagtttgatgttttgtcattgtatccattcatatatgatggaaagataaaagcagtatcatttgcttgcggtgacggatcgttttttgtagagattgatgattatgacaattttaaattgcttaataatgataagcttacgttgataggacacgatctgaaagattttttagtaaacatttcatactgcggtattgaacttaattgtaagattttagatacggccataatgacttatcttttaaatccgtctgagtcgaattacgacataagtcgcgtattgaaaaaatacttgaaagaggatttgcaaaacatagatgatatagtaggcaagggcaggaataaaaagagctacgatgacattgacaaaaagcttttagtcgattatatgtgttcagccgcatcaaacttatctaagttaaaagataagctcatgtcatttataaaagagatggagatggaagatcttttaaaaaatgtggaaattccgcttattgaagtgctaaaatctatggaggtgtacggctttacattagataaagatgtacttagaagtatttctaaagaaatagatgaaaagacagataagattgtaaaagatatttacgatgctgctggatacgaatttaatattaactctacaaagcagttatcagaatttttgtttgataaactgaatttgccagcaataaaaaagactaaaacagggtattcgactgacatggaagtccttgcagaacttataccgtacaatgacatagtaggagaaataatagaatatagacagcttatgaagcttaaatctacgtacatagatggcttcattcccatcatggatgaaaataatagggtccactctacgtttaaacaaacagttgctgctacagggagaattagctcaacagagcctaatctgcagaacatacctgtaagagaagaatttggcaggaggataagaaaggcatttgtatcaagttatgaagatgggcttataatatctgctgattattctcagattgagctaagggttcttgcacatctttcagaggatgaaaaacttattgagtcatttttgaacaacgaagatatacatttaaggacggcatcggaggtttttaaggtttcgaaagaagaagtgacaagtgaaatgagaaggcgggcgaaagctgtcaactttggtattgtatatggtataagcgattacggcttatctaaagacttaaagatttcgcgaaaagaagcgaaagaatacatagacaattattttgacaggtacaagggcgtcaaaaattacatcgactcaattgtcaaatttgcaaaggaaaatgggtatgttacgactatcttaaataggagaagatacataccggaaatcaattcacataattttaaccaaagatcttttggcgagagaatggcaatgaatacacctattcaaggtagcgctgcggatataataaagatgtcgatggttaaagtatacaatgaattaaaggaaagaggattgaaatcaagacttattcttcaggtgcacgatgagcttataattgacacacatcctgatgaagttgaaatagtcaaggagcttctaaaatcaataatggaaaatatcataaagttgaaagttcctttagttgtagatatagggcaagggaaaaactggtatgatgcaaaataaaaggatcc

SEQ ID NO: 730 - DNA, 2678 bp, Artificial Sequence
  Description of Artificial Sequence: Synthetic Clostridium thermosulfurogenes DNA Polymerase K792I
atgaaatacctgctgccgaccgctgctgctggtctgctgctcctcgctgcccagccggcgatggccatggcgaaatttttgatcatagatggtaatagcttgatgtacagggcgtattttgccctgcctgatttgatgaacagcgaaggaatgcatacaaatgccatatacggtttttcaatgatgcttcttaaattgctggaggaggagaaaccagactacatagcaatagctttcgataaaaaggcttctacatttaggcacaaggagtacagtgcttataaaggaacccgccagtcgatgccagaagagctgatagaacaggtggatattttaaaagatgtgataaatgcatttaacataaagaccatcgagatagagggatttgaagcagatgatatcattggtacagtatcaaaaattgcttccgaaagtgggatggatgtgcttatcgtcacaggcgacagagatgcgcttcagcttgtgtcggcaaatgtaaaagtaaaaatatgtaaaaaaggcataacgcagatggatgagtacgatgaaaaggcggtctttgaaaagtatgaagtgacgccgcttcaattcatagacttgaaagggcttatgggagacaaatcagacaacattccaggagtgcccaatataggggagaagacggccataaagcttgttaaagaatttggatcaattgaaaatttactgatgaatacagataagttaaaagggaaaataaaagaaaatgtagaaaacaatgcagaattagctgttttaagcaaacggcttgctacgattgagagaaatgttcctattgatattgatttgaatgaatacgcggttaaaaattacgatgtcaataagcttacagagctatttgaaaaattggaattttcaagcctcatctcagatttaaaagatgatagtcgtgatacaaaggatattaaagaatggcctgtaagagattttacatacgttaaaaatgttttaggaaagtttgatgttttgtcattgtatccattcatatatgatggaaagataaaagcagtatcatttgcttgcggtgacggatcgttttttgtagagattgatgattatgacaattttaaattgcttaataatgataagcttacgttgataggacacgatctgaaagattttttagtaaacatttcatactgcggtattgaacttaattgtaagattttagatacggccataatgacttatcttttaaatccgtctgagtcgaattacgacataagtcgcgtattgaaaaaatacttgaaagaggatttgcaaaacatagatgatatagtaggcaagggcaggaataaaaagagctacgatgacattgacaaaaagcttttagtcgattatatgtgttcagccgcatcaaacttatctaagttaaaagataagctcatgtcatttataaaagagatggagatggaagatcttttaaaaaatgtggaaattccgcttattgaagtgctaaaatctatggaggtgtacggctttacattagataaagatgtacttagaagtatttctaaagaaatagatgaaaagacagataagattgtaaaagatatttacgatgctgctggatacgaatttaatattaactctacaaagcagttatcagaatttttgtttgataaactgaatttgccagcaataaaaaagactaaaacagggtattcgactgacatggaagtccttgcagaacttataccgtacaatgacatagtaggagaaataatagaatatagacagcttatgaagcttaaatctacgtacatagatggcttcattcccatcatggatgaaaataatagggtccactctacgtttaaacaaacagttgctgctacagggagaattagctcaacagagcctaatctgcagaacatacctgtaagagaagaatttggcaggaggataagaaaggcatttgtatcaagttatgaagatgggcttataatatctgctgattattctcagattgagctaagggttcttgcacatctttcagaggatgaaaaacttattgagtcatttttgaacaacgaagatatacatttaaggacggcatcggaggtttttaaggtttcgaaagaagaagtgacaagtgaaatgagaaggcgggcgaaagctgtcaactttggtattgtatatggtataagcgattacggcttatctaaagacttaaagatttcgcgaaaagaagcgaaagaatacatagacaattattttgacaggtacaagggcgtcaaaaattacatcgactcaattgtcaaatttgcaaaggaaaatgggtatgttacgactatcttaaataggagaagatacataccggaaatcaattcaattaattttaaccaaagatcttttggcgagagaatggcaatgaatacacctattcaaggtagcgctgcggatataataaagatgtcgatggttaaagtatacaatgaattaaaggaaagaggattgaaatcaagacttattcttcaggtgcacgatgagcttataattgacacacatcctgatgaagttgaaatagtcaaggagcttctaaaatcaataatggaaaatatcataaagttgaaagttcctttagttgtagatatagggcaagggaaaaactggtatgatgcaaaataaaaggatcc

SEQ ID NO: 731 - DNA, 2678 bp, Artificial Sequence
  Description of Artificial Sequence: Synthetic Clostridium thermosulfurogenes DNA Polymerase K792L
atgaaatacctgctgccgaccgctgctgctggtctgctgctcctcgctgcccagccggcgatggccatggcgaaatttttgatcatagatggtaatagcttgatgtacagggcgtattttgccctgcctgatttgatgaacagcgaaggaatgcatacaaatgccatatacggtttttcaatgatgcttcttaaattgctggaggaggagaaaccagactacatagcaatagctttcgataaaaaggcttctacatttaggcacaaggagtacagtgcttataaaggaacccgccagtcgatgccagaagagctgatagaacaggtggatattttaaaagatgtgataaatgcatttaacataaagaccatcgagatagagggatttgaagcagatgatatcattggtacagtatcaaaaattgcttccgaaagtgggatggatgtgcttatcgtcacaggcgacagagatgcgcttcagcttgtgtcggcaaatgtaaaagtaaaaatatgtaaaaaaggcataacgcagatggatgagtacgatgaaaaggcggtctttgaaaagtatgaagtgacgccgcttcaattcatagacttgaaagggcttatgggagacaaatcagacaacattccaggagtgcccaatataggggagaagacggccataaagcttgttaaagaatttggatcaattgaaaatttactgatgaatacagataagttaaaagggaaaataaaagaaaatgtagaaaacaatgcagaattagctgttttaagcaaacggcttgctacgattgagagaaatgttcctattgatattgatttgaatgaatacgcggttaaaaattacgatgtcaataagcttacagagctatttgaaaaattggaattttcaagcctcatctcagatttaaaagatgatagtcgtgatacaaaggatattaaagaatggcctgtaagagattttacatacgttaaaaatgttttaggaaagtttgatgttttgtcattgtatccattcatatatgatggaaagataaaagcagtatcatttgcttgcggtgacggatcgttttttgtagagattgatgattatgacaattttaaattgcttaataatgataagcttacgttgataggacacgatctgaaagattttttagtaaacatttcatactgcggtattgaacttaattgtaagattttagatacggccataatgacttatcttttaaatccgtctgagtcgaattacgacataagtcgcgtattgaaaaaatacttgaaagaggatttgcaaaacatagatgatatagtaggcaagggcaggaataaaaagagctacgatgacattgacaaaaagcttttagtcgattatatgtgttcagccgcatcaaacttatctaagttaaaagataagctcatgtcatttataaaagagatggagatggaagatcttttaaaaaatgtggaaattccgcttattgaagtgctaaaatctatggaggtgtacggctttacattagataaagatgtacttagaagtatttctaaagaaatagatgaaaagacagataagattgtaaaagatatttacgatgctgctggatacgaatttaatattaactctacaaagcagttatcagaatttttgtttgataaactgaatttgccagcaataaaaaagactaaaacagggtattcgactgacatggaagtccttgcagaacttataccgtacaatgacatagtaggagaaataatagaatatagacagcttatgaagcttaaatctacgtacatagatggcttcattcccatcatggatgaaaataatagggtccactctacgtttaaacaaacagttgctgctacagggagaattagctcaacagagcctaatctgcagaacatacctgtaagagaagaatttggcaggaggataagaaaggcatttgtatcaagttatgaagatgggcttataatatctgctgattattctcagattgagctaagggttcttgcacatctttcagaggatgaaaaacttattgagtcatttttgaacaacgaagatatacatttaaggacggcatcggaggtttttaaggtttcgaaagaagaagtgacaagtgaaatgagaaggcgggcgaaagctgtcaactttggtattgtatatggtataagcgattacggcttatctaaagacttaaagatttcgcgaaaagaagcgaaagaatacatagacaattattttgacaggtacaagggcgtcaaaaattacatcgactcaattgtcaaatttgcaaaggaaaatgggtatgttacgactatcttaaataggagaagatacataccggaaatcaattcacttaattttaaccaaagatcttttggcgagagaatggcaatgaatacacctattcaaggtagcgctgcggatataataaagatgtcgatggttaaagtatacaatgaattaaaggaaagaggattgaaatcaagacttattcttcaggtgcacgatgagcttataattgacacacatcctgatgaagttgaaatagtcaaggagcttctaaaatcaataatggaaaatatcataaagttgaaagttcctttagttgtagatatagggcaagggaaaaactggtatgatgcaaaataaaaggatcc

SEQ ID NO: 732 - DNA, 2678 bp, Artificial Sequence
  Description of Artificial Sequence: Synthetic Clostridium thermosulfurogenes DNA Polymerase K792M
atgaaatacctgctgccgaccgctgctgctggtctgctgctcctcgctgcccagccggcgatggccatggcgaaatttttgatcatagatggtaatagcttgatgtacagggcgtattttgccctgcctgatttgatgaacagcgaaggaatgcatacaaatgccatatacggtttttcaatgatgcttcttaaattgctggaggaggagaaaccagactacatagcaatagctttcgataaaaaggcttctacatttaggcacaaggagtacagtgcttataaaggaacccgccagtcgatgccagaagagctgatagaacaggtggatattttaaaagatgtgataaatgcatttaacataaagaccatcgagatagagggatttgaagcagatgatatcattggtacagtatcaaaaattgcttccgaaagtgggatggatgtgcttatcgtcacaggcgacagagatgcgcttcagcttgtgtcggcaaatgtaaaagtaaaaatatgtaaaaaaggcataacgcagatggatgagtacgatgaaaaggcggtctttgaaaagtatgaagtgacgccgcttcaattcatagacttgaaagggcttatgggagacaaatcagacaacattccaggagtgcccaatataggggagaagacggccataaagcttgttaaagaatttggatcaattgaaaatttactgatgaatacagataagttaaaagggaaaataaaagaaaatgtagaaaacaatgcagaattagctgttttaagcaaacggcttgctacgattgagagaaatgttcctattgatattgatttgaatgaatacgcggttaaaaattacgatgtcaataagcttacagagctatttgaaaaattggaattttcaagcctcatctcagatttaaaagatgatagtcgtgatacaaaggatattaaagaatggcctgtaagagattttacatacgttaaaaatgttttaggaaagtttgatgttttgtcattgtatccattcatatatgatggaaagataaaagcagtatcatttgcttgcggtgacggatcgttttttgtagagattgatgattatgacaattttaaattgcttaataatgataagcttacgttgataggacacgatctgaaagattttttagtaaacatttcatactgcggtattgaacttaattgtaagattttagatacggccataatgacttatcttttaaatccgtctgagtcgaattacgacataagtcgcgtattgaaaaaatacttgaaagaggatttgcaaaacatagatgatatagtaggcaagggcaggaataaaaagagctacgatgacattgacaaaaagcttttagtcgattatatgtgttcagccgcatcaaacttatctaagttaaaagataagctcatgtcatttataaaagagatggagatggaagatcttttaaaaaatgtggaaattccgcttattgaagtgctaaaatctatggaggtgtacggctttacattagataaagatgtacttagaagtatttctaaagaaatagatgaaaagacagataagattgtaaaagatatttacgatgctgctggatacgaatttaatattaactctacaaagcagttatcagaatttttgtttgataaactgaatttgccagcaataaaaaagactaaaacagggtattcgactgacatggaagtccttgcagaacttataccgtacaatgacatagtaggagaaataatagaatatagacagcttatgaagcttaaatctacgtacatagatggcttcattcccatcatggatgaaaataatagggtccactctacgtttaaacaaacagttgctgctacagggagaattagctcaacagagcctaatctgcagaacatacctgtaagagaagaatttggcaggaggataagaaaggcatttgtatcaagttatgaagatgggcttataatatctgctgattattctcagattgagctaagggttcttgcacatctttcagaggatgaaaaacttattgagtcatttttgaacaacgaagatatacatttaaggacggcatcggaggtttttaaggtttcgaaagaagaagtgacaagtgaaatgagaaggcgggcgaaagctgtcaactttggtattgtatatggtataagcgattacggcttatctaaagacttaaagatttcgcgaaaagaagcgaaagaatacatagacaattattttgacaggtacaagggcgtcaaaaattacatcgactcaattgtcaaatttgcaaaggaaaatgggtatgttacgactatcttaaataggagaagatacataccggaaatcaattcaatgaattttaaccaaagatcttttggcgagagaatggcaatgaatacacctattcaaggtagcgctgcggatataataaagatgtcgatggttaaagtatacaatgaattaaaggaaagaggattgaaatcaagacttattcttcaggtgcacgatgagcttataattgacacacatcctgatgaagttgaaatagtcaaggagcttctaaaatcaataatggaaaatatcataaagttgaaagttcctttagttgtagatatagggcaagggaaaaactggtatgatgcaaaataaaaggatcc

SEQ ID NO: 733 - DNA, 2678 bp, Artificial Sequence
  Description of Artificial Sequence: Synthetic Clostridium thermosulfurogenes DNA Polymerase K792F
atgaaatacctgctgccgaccgctgctgctggtctgctgctcctcgctgcccagccggcgatggccatggcgaaatttttgatcatagatggtaatagcttgatgtacagggcgtattttgccctgcctgatttgatgaacagcgaaggaatgcatacaaatgccatatacggtttttcaatgatgcttcttaaattgctggaggaggagaaaccagactacatagcaatagctttcgataaaaaggcttctacatttaggcacaaggagtacagtgcttataaaggaacccgccagtcgatgccagaagagctgatagaacaggtggatattttaaaagatgtgataaatgcatttaacataaagaccatcgagatagagggatttgaagcagatgatatcattggtacagtatcaaaaattgcttccgaaagtgggatggatgtgcttatcgtcacaggcgacagagatgcgcttcagcttgtgtcggcaaatgtaaaagtaaaaatatgtaaaaaaggcataacgcagatggatgagtacgatgaaaaggcggtctttgaaaagtatgaagtgacgccgcttcaattcatagacttgaaagggcttatgggagacaaatcagacaacattccaggagtgcccaatataggggagaagacggccataaagcttgttaaagaatttggatcaattgaaaatttactgatgaatacagataagttaaaagggaaaataaaagaaaatgtagaaaacaatgcagaattagctgttttaagcaaacggcttgctacgattgagagaaatgttcctattgatattgatttgaatgaatacgcggttaaaaattacgatgtcaataagcttacagagctatttgaaaaattggaattttcaagcctcatctcagatttaaaagatgatagtcgtgatacaaaggatattaaagaatggcctgtaagagattttacatacgttaaaaatgttttaggaaagtttgatgttttgtcattgtatccattcatatatgatggaaagataaaagcagtatcatttgcttgcggtgacggatcgttttttgtagagattgatgattatgacaattttaaattgcttaataatgataagcttacgttgataggacacgatctgaaagattttttagtaaacatttcatactgcggtattgaacttaattgtaagattttagatacggccataatgacttatcttttaaatccgtctgagtcgaattacgacataagtcgcgtattgaaaaaatacttgaaagaggatttgcaaaacatagatgatatagtaggcaagggcaggaataaaaagagctacgatgacattgacaaaaagcttttagtcgattatatgtgttcagccgcatcaaacttatctaagttaaaagataagctcatgtcatttataaaagagatggagatggaagatcttttaaaaaatgtggaaattccgcttattgaagtgctaaaatctatggaggtgtacggctttacattagataaagatgtacttagaagtatttctaaagaaatagatgaaaagacagataagattgtaaaagatatttacgatgctgctggatacgaatttaatattaactctacaaagcagttatcagaatttttgtttgataaactgaatttgccagcaataaaaaagactaaaacagggtattcgactgacatggaagtccttgcagaacttataccgtacaatgacatagtaggagaaataatagaatatagacagcttatgaagcttaaatctacgtacatagatggcttcattcccatcatggatgaaaataatagggtccactctacgtttaaacaaacagttgctgctacagggagaattagctcaacagagcctaatctgcagaacatacctgtaagagaagaatttggcaggaggataagaaaggcatttgtatcaagttatgaagatgggcttataatatctgctgattattctcagattgagctaagggttcttgcacatctttcagaggatgaaaaacttattgagtcatttttgaacaacgaagatatacatttaaggacggcatcggaggtttttaaggtttcgaaagaagaagtgacaagtgaaatgagaaggcgggcgaaagctgtcaactttggtattgtatatggtataagcgattacggcttatctaaagacttaaagatttcgcgaaaagaagcgaaagaatacatagacaattattttgacaggtacaagggcgtcaaaaattacatcgactcaattgtcaaatttgcaaaggaaaatgggtatgttacgactatcttaaataggagaagatacataccggaaatcaattcatttaattttaaccaaagatcttttggcgagagaatggcaatgaatacacctattcaaggtagcgctgcggatataataaagatgtcgatggttaaagtatacaatgaattaaaggaaagaggattgaaatcaagacttattcttcaggtgcacgatgagcttataattgacacacatcctgatgaagttgaaatagtcaaggagcttctaaaatcaataatggaaaatatcataaagttgaaagttcctttagttgtagatatagggcaagggaaaaactggtatgatgcaaaataaaaggatcc

SEQ ID NO: 734 - DNA, 2678 bp, Artificial Sequence
  Description of Artificial Sequence: Synthetic Clostridium thermosulfurogenes DNA Polymerase K792P
atgaaatacctgctgccgaccgctgctgctggtctgctgctcctcgctgcccagccggcgatggccatggcgaaatttttgatcatagatggtaatagcttgatgtacagggcgtattttgccctgcctgatttgatgaacagcgaaggaatgcatacaaatgccatatacggtttttcaatgatgcttcttaaattgctggaggaggagaaaccagactacatagcaatagctttcgataaaaaggcttctacatttaggcacaaggagtacagtgcttataaaggaacccgccagtcgatgccagaagagctgatagaacaggtggatattttaaaagatgtgataaatgcatttaacataaagaccatcgagatagagggatttgaagcagatgatatcattggtacagtatcaaaaattgcttccgaaagtgggatggatgtgcttatcgtcacaggcgacagagatgcgcttcagcttgtgtcggcaaatgtaaaagtaaaaatatgtaaaaaaggcataacgcagatggatgagtacgatgaaaaggcggtctttgaaaagtatgaagtgacgccgcttcaattcatagacttgaaagggcttatgggagacaaatcagacaacattccaggagtgcccaatataggggagaagacggccataaagcttgttaaagaatttggatcaattgaaaatttactgatgaatacagataagttaaaagggaaaataaaagaaaatgtagaaaacaatgcagaattagctgttttaagcaaacggcttgctacgattgagagaaatgttcctattgatattgatttgaatgaatacgcggttaaaaattacgatgtcaataagcttacagagctatttgaaaaattggaattttcaagcctcatctcagatttaaaagatgatagtcgtgatacaaaggatattaaagaatggcctgtaagagattttacatacgttaaaaatgttttaggaaagtttgatgttttgtcattgtatccattcatatatgatggaaagataaaagcagtatcatttgcttgcggtgacggatcgttttttgtagagattgatgattatgacaattttaaattgcttaataatgataagcttacgttgataggacacgatctgaaagattttttagtaaacatttcatactgcggtattgaacttaattgtaagattttagatacggccataatgacttatcttttaaatccgtctgagtcgaattacgacataagtcgcgtattgaaaaaatacttgaaagaggatttgcaaaacatagatgatatagtaggcaagggcaggaataaaaagagctacgatgacattgacaaaaagcttttagtcgattatatgtgttcagccgcatcaaacttatctaagttaaaagataagctcatgtcatttataaaagagatggagatggaagatcttttaaaaaatgtggaaattccgcttattgaagtgctaaaatctatggaggtgtacggctttacattagataaagatgtacttagaagtatttctaaagaaatagatgaaaagacagataagattgtaaaagatatttacgatgctgctggatacgaatttaatattaactctacaaagcagttatcagaatttttgtttgataaactgaatttgccagcaataaaaaagactaaaacagggtattcgactgacatggaagtccttgcagaacttataccgtacaatgacatagtaggagaaataatagaatatagacagcttatgaagcttaaatctacgtacatagatggcttcattcccatcatggatgaaaataatagggtccactctacgtttaaacaaacagttgctgctacagggagaattagctcaacagagcctaatctgcagaacatacctgtaagagaagaatttggcaggaggataagaaaggcatttgtatcaagttatgaagatgggcttataatatctgctgattattctcagattgagctaagggttcttgcacatctttcagaggatgaaaaacttattgagtcatttttgaacaacgaagatatacatttaaggacggcatcggaggtttttaaggtttcgaaagaagaagtgacaagtgaaatgagaaggcgggcgaaagctgtcaactttggtattgtatatggtataagcgattacggcttatctaaagacttaaagatttcgcgaaaagaagcgaaagaatacatagacaattattttgacaggtacaagggcgtcaaaaattacatcgactcaattgtcaaatttgcaaaggaaaatgggtatgttacgactatcttaaataggagaagatacataccggaaatcaattcacctaattttaaccaaagatcttttggcgagagaatggcaatgaatacacctattcaaggtagcgctgcggatataataaagatgtcgatggttaaagtatacaatgaattaaaggaaagaggattgaaatcaagacttattcttcaggtgcacgatgagcttataattgacacacatcctgatgaagttgaaatagtcaaggagcttctaaaatcaataatggaaaatatcataaagttgaaagttcctttagttgtagatatagggcaagggaaaaactggtatgatgcaaaataaaaggatcc

SEQ ID NO: 735 - DNA, 2678 bp, Artificial Sequence
  Description of Artificial Sequence: Synthetic Clostridium thermosulfurogenes DNA Polymerase K792S
atgaaatacctgctgccgaccgctgctgctggtctgctgctcctcgctgcccagccggcgatggccatggcgaaatttttgatcatagatggtaatagcttgatgtacagggcgtattttgccctgcctgatttgatgaacagcgaaggaatgcatacaaatgccatatacggtttttcaatgatgcttcttaaattgctggaggaggagaaaccagactacatagcaatagctttcgataaaaaggcttctacatttaggcacaaggagtacagtgcttataaaggaacccgccagtcgatgccagaagagctgatagaacaggtggatattttaaaagatgtgataaatgcatttaacataaagaccatcgagatagagggatttgaagcagatgatatcattggtacagtatcaaaaattgcttccgaaagtgggatggatgtgcttatcgtcacaggcgacagagatgcgcttcagcttgtgtcggcaaatgtaaaagtaaaaatatgtaaaaaaggcataacgcagatggatgagtacgatgaaaaggcggtctttgaaaagtatgaagtgacgccgcttcaattcatagacttgaaagggcttatgggagacaaatcagacaacattccaggagtgcccaatataggggagaagacggccataaagcttgttaaagaatttggatcaattgaaaatttactgatgaatacagataagttaaaagggaaaataaaagaaaatgtagaaaacaatgcagaattagctgttttaagcaaacggcttgctacgattgagagaaatgttcctattgatattgatttgaatgaatacgcggttaaaaattacgatgtcaataagcttacagagctatttgaaaaattggaattttcaagcctcatctcagatttaaaagatgatagtcgtgatacaaaggatattaaagaatggcctgtaagagattttacatacgttaaaaatgttttaggaaagtttgatgttttgtcattgtatccattcatatatgatggaaagataaaagcagtatcatttgcttgcggtgacggatcgttttttgtagagattgatgattatgacaattttaaattgcttaataatgataagcttacgttgataggacacgatctgaaagattttttagtaaacatttcatactgcggtattgaacttaattgtaagattttagatacggccataatgacttatcttttaaatccgtctgagtcgaattacgacataagtcgcgtattgaaaaaatacttgaaagaggatttgcaaaacatagatgatatagtaggcaagggcaggaataaaaagagctacgatgacattgacaaaaagcttttagtcgattatatgtgttcagccgcatcaaacttatctaagttaaaagataagctcatgtcatttataaaagagatggagatggaagatcttttaaaaaatgtggaaattccgcttattgaagtgctaaaatctatggaggtgtacggctttacattagataaagatgtacttagaagtatttctaaagaaatagatgaaaagacagataagattgtaaaagatatttacgatgctgctggatacgaatttaatattaactctacaaagcagttatcagaatttttgtttgataaactgaatttgccagcaataaaaaagactaaaacagggtattcgactgacatggaagtccttgcagaacttataccgtacaatgacatagtaggagaaataatagaatatagacagcttatgaagcttaaatctacgtacatagatggcttcattcccatcatggatgaaaataatagggtccactctacgtttaaacaaacagttgctgctacagggagaattagctcaacagagcctaatctgcagaacatacctgtaagagaagaatttggcaggaggataagaaaggcatttgtatcaagttatgaagatgggcttataatatctgctgattattctcagattgagctaagggttcttgcacatctttcagaggatgaaaaacttattgagtcatttttgaacaacgaagatatacatttaaggacggcatcggaggtttttaaggtttcgaaagaagaagtgacaagtgaaatgagaaggcgggcgaaagctgtcaactttggtattgtatatggtataagcgattacggcttatctaaagacttaaagatttcgcgaaaagaagcgaaagaatacatagacaattattttgacaggtacaagggcgtcaaaaattacatcgactcaattgtcaaatttgcaaaggaaaatgggtatgttacgactatcttaaataggagaagatacataccggaaatcaattcatctaattttaaccaaagatcttttggcgagagaatggcaatgaatacacctattcaaggtagcgctgcggatataataaagatgtcgatggttaaagtatacaatgaattaaaggaaagaggattgaaatcaagacttattcttcaggtgcacgatgagcttataattgacacacatcctgatgaagttgaaatagtcaaggagcttctaaaatcaataatggaaaatatcataaagttgaaagttcctttagttgtagatatagggcaagggaaaaactggtatgatgcaaaataaaaggatcc

SEQ ID NO: 736 - DNA, 2678 bp, Artificial Sequence
  Description of Artificial Sequence: Synthetic Clostridium thermosulfurogenes DNA Polymerase K792T
atgaaatacctgctgccgaccgctgctgctggtctgctgctcctcgctgcccagccggcgatggccatggcgaaatttttgatcatagatggtaatagcttgatgtacagggcgtattttgccctgcctgatttgatgaacagcgaaggaatgcatacaaatgccatatacggtttttcaatgatgcttcttaaattgctggaggaggagaaaccagactacatagcaatagctttcgataaaaaggcttctacatttaggcacaaggagtacagtgcttataaaggaacccgccagtcgatgccagaagagctgatagaacaggtggatattttaaaagatgtgataaatgcatttaacataaagaccatcgagatagagggatttgaagcagatgatatcattggtacagtatcaaaaattgcttccgaaagtgggatggatgtgcttatcgtcacaggcgacagagatgcgcttcagcttgtgtcggcaaatgtaaaagtaaaaatatgtaaaaaaggcataacgcagatggatgagtacgatgaaaaggcggtctttgaaaagtatgaagtgacgccgcttcaattcatagacttgaaagggcttatgggagacaaatcagacaacattccaggagtgcccaatataggggagaagacggccataaagcttgttaaagaatttggatcaattgaaaatttactgatgaatacagataagttaaaagggaaaataaaagaaaatgtagaaaacaatgcagaattagctgttttaagcaaacggcttgctacgattgagagaaatgttcctattgatattgatttgaatgaatacgcggttaaaaattacgatgtcaataagcttacagagctatttgaaaaattggaattttcaagcctcatctcagatttaaaagatgatagtcgtgatacaaaggatattaaagaatggcctgtaagagattttacatacgttaaaaatgttttaggaaagtttgatgttttgtcattgtatccattcatatatgatggaaagataaaagcagtatcatttgcttgcggtgacggatcgttttttgtagagattgatgattatgacaattttaaattgcttaataatgataagcttacgttgataggacacgatctgaaagattttttagtaaacatttcatactgcggtattgaacttaattgtaagattttagatacggccataatgacttatcttttaaatccgtctgagtcgaattacgacataagtcgcgtattgaaaaaatacttgaaagaggatttgcaaaacatagatgatatagtaggcaagggcaggaataaaaagagctacgatgacattgacaaaaagcttttagtcgattatatgtgttcagccgcatcaaacttatctaagttaaaagataagctcatgtcatttataaaagagatggagatggaagatcttttaaaaaatgtggaaattccgcttattgaagtgctaaaatctatggaggtgtacggctttacattagataaagatgtacttagaagtatttctaaagaaatagatgaaaagacagataagattgtaaaagatatttacgatgctgctggatacgaatttaatattaactctacaaagcagttatcagaatttttgtttgataaactgaatttgccagcaataaaaaagactaaaacagggtattcgactgacatggaagtccttgcagaacttataccgtacaatgacatagtaggagaaataatagaatatagacagcttatgaagcttaaatctacgtacatagatggcttcattcccatcatggatgaaaataatagggtccactctacgtttaaacaaacagttgctgctacagggagaattagctcaacagagcctaatctgcagaacatacctgtaagagaagaatttggcaggaggataagaaaggcatttgtatcaagttatgaagatgggcttataatatctgctgattattctcagattgagctaagggttcttgcacatctttcagaggatgaaaaacttattgagtcatttttgaacaacgaagatatacatttaaggacggcatcggaggtttttaaggtttcgaaagaagaagtgacaagtgaaatgagaaggcgggcgaaagctgtcaactttggtattgtatatggtataagcgattacggcttatctaaagacttaaagatttcgcgaaaagaagcgaaagaatacatagacaattattttgacaggtacaagggcgtcaaaaattacatcgactcaattgtcaaatttgcaaaggaaaatgggtatgttacgactatcttaaataggagaagatacataccggaaatcaattcaactaattttaaccaaagatcttttggcgagagaatggcaatgaatacacctattcaaggtagcgctgcggatataataaagatgtcgatggttaaagtatacaatgaattaaaggaaagaggattgaaatcaagacttattcttcaggtgcacgatgagcttataattgacacacatcctgatgaagttgaaatagtcaaggagcttctaaaatcaataatggaaaatatcataaagttgaaagttcctttagttgtagatatagggcaagggaaaaactggtatgatgcaaaataaaaggatcc

SEQ ID NO: 737 - DNA, 2678 bp, Artificial Sequence
  Description of Artificial Sequence: Synthetic Clostridium thermosulfurogenes DNA Polymerase K792W
atgaaatacctgctgccgaccgctgctgctggtctgctgctcctcgctgcccagccggcgatggccatggcgaaatttttgatcatagatggtaatagcttgatgtacagggcgtattttgccctgcctgatttgatgaacagcgaaggaatgcatacaaatgccatatacggtttttcaatgatgcttcttaaattgctggaggaggagaaaccagactacatagcaatagctttcgataaaaaggcttctacatttaggcacaaggagtacagtgcttataaaggaacccgccagtcgatgccagaagagctgatagaacaggtggatattttaaaagatgtgataaatgcatttaacataaagaccatcgagatagagggatttgaagcagatgatatcattggtacagtatcaaaaattgcttccgaaagtgggatggatgtgcttatcgtcacaggcgacagagatgcgcttcagcttgtgtcggcaaatgtaaaagtaaaaatatgtaaaaaaggcataacgcagatggatgagtacgatgaaaaggcggtctttgaaaagtatgaagtgacgccgcttcaattcatagacttgaaagggcttatgggagacaaatcagacaacattccaggagtgcccaatataggggagaagacggccataaagcttgttaaagaatttggatcaattgaaaatttactgatgaatacagataagttaaaagggaaaataaaagaaaatgtagaaaacaatgcagaattagctgttttaagcaaacggcttgctacgattgagagaaatgttcctattgatattgatttgaatgaatacgcggttaaaaattacgatgtcaataagcttacagagctatttgaaaaattggaattttcaagcctcatctcagatttaaaagatgatagtcgtgatacaaaggatattaaagaatggcctgtaagagattttacatacgttaaaaatgttttaggaaagtttgatgttttgtcattgtatccattcatatatgatggaaagataaaagcagtatcatttgcttgcggtgacggatcgttttttgtagagattgatgattatgacaattttaaattgcttaataatgataagcttacgttgataggacacgatctgaaagattttttagtaaacatttcatactgcggtattgaacttaattgtaagattttagatacggccataatgacttatcttttaaatccgtctgagtcgaattacgacataagtcgcgtattgaaaaaatacttgaaagaggatttgcaaaacatagatgatatagtaggcaagggcaggaataaaaagagctacgatgacattgacaaaaagcttttagtcgattatatgtgttcagccgcatcaaacttatctaagttaaaagataagctcatgtcatttataaaagagatggagatggaagatcttttaaaaaatgtggaaattccgcttattgaagtgctaaaatctatggaggtgtacggctttacattagataaagatgtacttagaagtatttctaaagaaatagatgaaaagacagataagattgtaaaagatatttacgatgctgctggatacgaatttaatattaactctacaaagcagttatcagaatttttgtttgataaactgaatttgccagcaataaaaaagactaaaacagggtattcgactgacatggaagtccttgcagaacttataccgtacaatgacatagtaggagaaataatagaatatagacagcttatgaagcttaaatctacgtacatagatggcttcattcccatcatggatgaaaataatagggtccactctacgtttaaacaaacagttgctgctacagggagaattagctcaacagagcctaatctgcagaacatacctgtaagagaagaatttggcaggaggataagaaaggcatttgtatcaagttatgaagatgggcttataatatctgctgattattctcagattgagctaagggttcttgcacatctttcagaggatgaaaaacttattgagtcatttttgaacaacgaagatatacatttaaggacggcatcggaggtttttaaggtttcgaaagaagaagtgacaagtgaaatgagaaggcgggcgaaagctgtcaactttggtattgtatatggtataagcgattacggcttatctaaagacttaaagatttcgcgaaaagaagcgaaagaatacatagacaattattttgacaggtacaagggcgtcaaaaattacatcgactcaattgtcaaatttgcaaaggaaaatgggtatgttacgactatcttaaataggagaagatacataccggaaatcaattcatggaattttaaccaaagatcttttggcgagagaatggcaatgaatacacctattcaaggtagcgctgcggatataataaagatgtcgatggttaaagtatacaatgaattaaaggaaagaggattgaaatcaagacttattcttcaggtgcacgatgagcttataattgacacacatcctgatgaagttgaaatagtcaaggagcttctaaaatcaataatggaaaatatcataaagttgaaagttcctttagttgtagatatagggcaagggaaaaactggtatgatgcaaaataaaaggatcc

SEQ ID NO: 738 - DNA, 2678 bp, Artificial Sequence
  Description of Artificial Sequence: Synthetic Clostridium thermosulfurogenes DNA Polymerase K792Y
atgaaatacctgctgccgaccgctgctgctggtctgctgctcctcgctgcccagccggcgatggccatggcgaaatttttgatcatagatggtaatagcttgatgtacagggcgtattttgccctgcctgatttgatgaacagcgaaggaatgcatacaaatgccatatacggtttttcaatgatgcttcttaaattgctggaggaggagaaaccagactacatagcaatagctttcgataaaaaggcttctacatttaggcacaaggagtacagtgcttataaaggaacccgccagtcgatgccagaagagctgatagaacaggtggatattttaaaagatgtgataaatgcatttaacataaagaccatcgagatagagggatttgaagcagatgatatcattggtacagtatcaaaaattgcttccgaaagtgggatggatgtgcttatcgtcacaggcgacagagatgcgcttcagcttgtgtcggcaaatgtaaaagtaaaaatatgtaaaaaaggcataacgcagatggatgagtacgatgaaaaggcggtctttgaaaagtatgaagtgacgccgcttcaattcatagacttgaaagggcttatgggagacaaatcagacaacattccaggagtgcccaatataggggagaagacggccataaagcttgttaaagaatttggatcaattgaaaatttactgatgaatacagataagttaaaagggaaaataaaagaaaatgtagaaaacaatgcagaattagctgttttaagcaaacggcttgctacgattgagagaaatgttcctattgatattgatttgaatgaatacgcggttaaaaattacgatgtcaataagcttacagagctatttgaaaaattggaattttcaagcctcatctcagatttaaaagatgatagtcgtgatacaaaggatattaaagaatggcctgtaagagattttacatacgttaaaaatgttttaggaaagtttgatgttttgtcattgtatccattcatatatgatggaaagataaaagcagtatcatttgcttgcggtgacggatcgttttttgtagagattgatgattatgacaattttaaattgcttaataatgataagcttacgttgataggacacgatctgaaagattttttagtaaacatttcatactgcggtattgaacttaattgtaagattttagatacggccataatgacttatcttttaaatccgtctgagtcgaattacgacataagtcgcgtattgaaaaaatacttgaaagaggatttgcaaaacatagatgatatagtaggcaagggcaggaataaaaagagctacgatgacattgacaaaaagcttttagtcgattatatgtgttcagccgcatcaaacttatctaagttaaaagataagctcatgtcatttataaaagagatggagatggaagatcttttaaaaaatgtggaaattccgcttattgaagtgctaaaatctatggaggtgtacggctttacattagataaagatgtacttagaagtatttctaaagaaatagatgaaaagacagataagattgtaaaagatatttacgatgctgctggatacgaatttaatattaactctacaaagcagttatcagaatttttgtttgataaactgaatttgccagcaataaaaaagactaaaacagggtattcgactgacatggaagtccttgcagaacttataccgtacaatgacatagtaggagaaataatagaatatagacagcttatgaagcttaaatctacgtacatagatggcttcattcccatcatggatgaaaataatagggtccactctacgtttaaacaaacagttgctgctacagggagaattagctcaacagagcctaatctgcagaacatacctgtaagagaagaatttggcaggaggataagaaaggcatttgtatcaagttatgaagatgggcttataatatctgctgattattctcagattgagctaagggttcttgcacatctttcagaggatgaaaaacttattgagtcatttttgaacaacgaagatatacatttaaggacggcatcggaggtttttaaggtttcgaaagaagaagtgacaagtgaaatgagaaggcgggcgaaagctgtcaactttggtattgtatatggtataagcgattacggcttatctaaagacttaaagatttcgcgaaaagaagcgaaagaatacatagacaattattttgacaggtacaagggcgtcaaaaattacatcgactcaattgtcaaatttgcaaaggaaaatgggtatgttacgactatcttaaataggagaagatacataccggaaatcaattcatataattttaaccaaagatcttttggcgagagaatggcaatgaatacacctattcaaggtagcgctgcggatataataaagatgtcgatggttaaagtatacaatgaattaaaggaaagaggattgaaatcaagacttattcttcaggtgcacgatgagcttataattgacacacatcctgatgaagttgaaatagtcaaggagcttctaaaatcaataatggaaaatatcataaagttgaaagttcctttagttgtagatatagggcaagggaaaaactggtatgatgcaaaataaaaggatcc

SEQ ID NO: 739 - DNA, 2678 bp, Artificial Sequence
  Description of Artificial Sequence: Synthetic Clostridium thermosulfurogenes DNA Polymerase K792V
atgaaatacctgctgccgaccgctgctgctggtctgctgctcctcgctgcccagccggcgatggccatggcgaaatttttgatcatagatggtaatagcttgatgtacagggcgtattttgccctgcctgatttgatgaacagcgaaggaatgcatacaaatgccatatacggtttttcaatgatgcttcttaaattgctggaggaggagaaaccagactacatagcaatagctttcgataaaaaggcttctacatttaggcacaaggagtacagtgcttataaaggaacccgccagtcgatgccagaagagctgatagaacaggtggatattttaaaagatgtgataaatgcatttaacataaagaccatcgagatagagggatttgaagcagatgatatcattggtacagtatcaaaaattgcttccgaaagtgggatggatgtgcttatcgtcacaggcgacagagatgcgcttcagcttgtgtcggcaaatgtaaaagtaaaaatatgtaaaaaaggcataacgcagatggatgagtacgatgaaaaggcggtctttgaaaagtatgaagtgacgccgcttcaattcatagacttgaaagggcttatgggagacaaatcagacaacattccaggagtgcccaatataggggagaagacggccataaagcttgttaaagaatttggatcaattgaaaatttactgatgaatacagataagttaaaagggaaaataaaagaaaatgtagaaaacaatgcagaattagctgttttaagcaaacggcttgctacgattgagagaaatgttcctattgatattgatttgaatgaatacgcggttaaaaattacgatgtcaataagcttacagagctatttgaaaaattggaattttcaagcctcatctcagatttaaaagatgatagtcgtgatacaaaggatattaaagaatggcctgtaagagattttacatacgttaaaaatgttttaggaaagtttgatgttttgtcattgtatccattcatatatgatggaaagataaaagcagtatcatttgcttgcggtgacggatcgttttttgtagagattgatgattatgacaattttaaattgcttaataatgataagcttacgttgataggacacgatctgaaagattttttagtaaacatttcatactgcggtattgaacttaattgtaagattttagatacggccataatgacttatcttttaaatccgtctgagtcgaattacgacataagtcgcgtattgaaaaaatacttgaaagaggatttgcaaaacatagatgatatagtaggcaagggcaggaataaaaagagctacgatgacattgacaaaaagcttttagtcgattatatgtgttcagccgcatcaaacttatctaagttaaaagataagctcatgtcatttataaaagagatggagatggaagatcttttaaaaaatgtggaaattccgcttattgaagtgctaaaatctatggaggtgtacggctttacattagataaagatgtacttagaagtatttctaaagaaatagatgaaaagacagataagattgtaaaagatatttacgatgctgctggatacgaatttaatattaactctacaaagcagttatcagaatttttgtttgataaactgaatttgccagcaataaaaaagactaaaacagggtattcgactgacatggaagtccttgcagaacttataccgtacaatgacatagtaggagaaataatagaatatagacagcttatgaagcttaaatctacgtacatagatggcttcattcccatcatggatgaaaataatagggtccactctacgtttaaacaaacagttgctgctacagggagaattagctcaacagagcctaatctgcagaacatacctgtaagagaagaatttggcaggaggataagaaaggcatttgtatcaagttatgaagatgggcttataatatctgctgattattctcagattgagctaagggttcttgcacatctttcagaggatgaaaaacttattgagtcatttttgaacaacgaagatatacatttaaggacggcatcggaggtttttaaggtttcgaaagaagaagtgacaagtgaaatgagaaggcgggcgaaagctgtcaactttggtattgtatatggtataagcgattacggcttatctaaagacttaaagatttcgcgaaaagaagcgaaagaatacatagacaattattttgacaggtacaagggcgtcaaaaattacatcgactcaattgtcaaatttgcaaaggaaaatgggtatgttacgactatcttaaataggagaagatacataccggaaatcaattcagttaattttaaccaaagatcttttggcgagagaatggcaatgaatacacctattcaaggtagcgctgcggatataataaagatgtcgatggttaaagtatacaatgaattaaaggaaagaggattgaaatcaagacttattcttcaggtgcacgatgagcttataattgacacacatcctgatgaagttgaaatagtcaaggagcttctaaaatcaataatggaaaatatcataaagttgaaagttcctttagttgtagatatagggcaagggaaaaactggtatgatgcaaaataaaaggatcc

SEQ ID NO: 740 - DNA, 2678 bp, Artificial Sequence
  Description of Artificial Sequence: Synthetic Clostridium thermosulfurogenes DNA Polymerase N793A
atgaaatacctgctgccgaccgctgctgctggtctgctgctcctcgctgcccagccggcgatggccatggcgaaatttttgatcatagatggtaatagcttgatgtacagggcgtattttgccctgcctgatttgatgaacagcgaaggaatgcatacaaatgccatatacggtttttcaatgatgcttcttaaattgctggaggaggagaaaccagactacatagcaatagctttcgataaaaaggcttctacatttaggcacaaggagtacagtgcttataaaggaacccgccagtcgatgccagaagagctgatagaacaggtggatattttaaaagatgtgataaatgcatttaacataaagaccatcgagatagagggatttgaagcagatgatatcattggtacagtatcaaaaattgcttccgaaagtgggatggatgtgcttatcgtcacaggcgacagagatgcgcttcagcttgtgtcggcaaatgtaaaagtaaaaatatgtaaaaaaggcataacgcagatggatgagtacgatgaaaaggcggtctttgaaaagtatgaagtgacgccgcttcaattcatagacttgaaagggcttatgggagacaaatcagacaacattccaggagtgcccaatataggggagaagacggccataaagcttgttaaagaatttggatcaattgaaaatttactgatgaatacagataagttaaaagggaaaataaaagaaaatgtagaaaacaatgcagaattagctgttttaagcaaacggcttgctacgattgagagaaatgttcctattgatattgatttgaatgaatacgcggttaaaaattacgatgtcaataagcttacagagctatttgaaaaattggaattttcaagcctcatctcagatttaaaagatgatagtcgtgatacaaaggatattaaagaatggcctgtaagagattttacatacgttaaaaatgttttaggaaagtttgatgttttgtcattgtatccattcatatatgatggaaagataaaagcagtatcatttgcttgcggtgacggatcgttttttgtagagattgatgattatgacaattttaaattgcttaataatgataagcttacgttgataggacacgatctgaaagattttttagtaaacatttcatactgcggtattgaacttaattgtaagattttagatacggccataatgacttatcttttaaatccgtctgagtcgaattacgacataagtcgcgtattgaaaaaatacttgaaagaggatttgcaaaacatagatgatatagtaggcaagggcaggaataaaaagagctacgatgacattgacaaaaagcttttagtcgattatatgtgttcagccgcatcaaacttatctaagttaaaagataagctcatgtcatttataaaagagatggagatggaagatcttttaaaaaatgtggaaattccgcttattgaagtgctaaaatctatggaggtgtacggctttacattagataaagatgtacttagaagtatttctaaagaaatagatgaaaagacagataagattgtaaaagatatttacgatgctgctggatacgaatttaatattaactctacaaagcagttatcagaatttttgtttgataaactgaatttgccagcaataaaaaagactaaaacagggtattcgactgacatggaagtccttgcagaacttataccgtacaatgacatagtaggagaaataatagaatatagacagcttatgaagcttaaatctacgtacatagatggcttcattcccatcatggatgaaaataatagggtccactctacgtttaaacaaacagttgctgctacagggagaattagctcaacagagcctaatctgcagaacatacctgtaagagaagaatttggcaggaggataagaaaggcatttgtatcaagttatgaagatgggcttataatatctgctgattattctcagattgagctaagggttcttgcacatctttcagaggatgaaaaacttattgagtcatttttgaacaacgaagatatacatttaaggacggcatcggaggtttttaaggtttcgaaagaagaagtgacaagtgaaatgagaaggcgggcgaaagctgtcaactttggtattgtatatggtataagcgattacggcttatctaaagacttaaagatttcgcgaaaagaagcgaaagaatacatagacaattattttgacaggtacaagggcgtcaaaaattacatcgactcaattgtcaaatttgcaaaggaaaatgggtatgttacgactatcttaaataggagaagatacataccggaaatcaattcaaaagcttttaaccaaagatcttttggcgagagaatggcaatgaatacacctattcaaggtagcgctgcggatataataaagatgtcgatggttaaagtatacaatgaattaaaggaaagaggattgaaatcaagacttattcttcaggtgcacgatgagcttataattgacacacatcctgatgaagttgaaatagtcaaggagcttctaaaatcaataatggaaaatatcataaagttgaaagttcctttagttgtagatatagggcaagggaaaaactggtatgatgcaaaataaaaggatcc

SEQ ID NO: 741 - DNA, 2678 bp, Artificial Sequence
  Description of Artificial Sequence: Synthetic Clostridium thermosulfurogenes DNA Polymerase N793R
atgaaatacctgctgccgaccgctgctgctggtctgctgctcctcgctgcccagccggcgatggccatggcgaaatttttgatcatagatggtaatagcttgatgtacagggcgtattttgccctgcctgatttgatgaacagcgaaggaatgcatacaaatgccatatacggtttttcaatgatgcttcttaaattgctggaggaggagaaaccagactacatagcaatagctttcgataaaaaggcttctacatttaggcacaaggagtacagtgcttataaaggaacccgccagtcgatgccagaagagctgatagaacaggtggatattttaaaagatgtgataaatgcatttaacataaagaccatcgagatagagggatttgaagcagatgatatcattggtacagtatcaaaaattgcttccgaaagtgggatggatgtgcttatcgtcacaggcgacagagatgcgcttcagcttgtgtcggcaaatgtaaaagtaaaaatatgtaaaaaaggcataacgcagatggatgagtacgatgaaaaggcggtctttgaaaagtatgaagtgacgccgcttcaattcatagacttgaaagggcttatgggagacaaatcagacaacattccaggagtgcccaatataggggagaagacggccataaagcttgttaaagaatttggatcaattgaaaatttactgatgaatacagataagttaaaagggaaaataaaagaaaatgtagaaaacaatgcagaattagctgttttaagcaaacggcttgctacgattgagagaaatgttcctattgatattgatttgaatgaatacgcggttaaaaattacgatgtcaataagcttacagagctatttgaaaaattggaattttcaagcctcatctcagatttaaaagatgatagtcgtgatacaaaggatattaaagaatggcctgtaagagattttacatacgttaaaaatgttttaggaaagtttgatgttttgtcattgtatccattcatatatgatggaaagataaaagcagtatcatttgcttgcggtgacggatcgttttttgtagagattgatgattatgacaattttaaattgcttaataatgataagcttacgttgataggacacgatctgaaagattttttagtaaacatttcatactgcggtattgaacttaattgtaagattttagatacggccataatgacttatcttttaaatccgtctgagtcgaattacgacataagtcgcgtattgaaaaaatacttgaaagaggatttgcaaaacatagatgatatagtaggcaagggcaggaataaaaagagctacgatgacattgacaaaaagcttttagtcgattatatgtgttcagccgcatcaaacttatctaagttaaaagataagctcatgtcatttataaaagagatggagatggaagatcttttaaaaaatgtggaaattccgcttattgaagtgctaaaatctatggaggtgtacggctttacattagataaagatgtacttagaagtatttctaaagaaatagatgaaaagacagataagattgtaaaagatatttacgatgctgctggatacgaatttaatattaactctacaaagcagttatcagaatttttgtttgataaactgaatttgccagcaataaaaaagactaaaacagggtattcgactgacatggaagtccttgcagaacttataccgtacaatgacatagtaggagaaataatagaatatagacagcttatgaagcttaaatctacgtacatagatggcttcattcccatcatggatgaaaataatagggtccactctacgtttaaacaaacagttgctgctacagggagaattagctcaacagagcctaatctgcagaacatacctgtaagagaagaatttggcaggaggataagaaaggcatttgtatcaagttatgaagatgggcttataatatctgctgattattctcagattgagctaagggttcttgcacatctttcagaggatgaaaaacttattgagtcatttttgaacaacgaagatatacatttaaggacggcatcggaggtttttaaggtttcgaaagaagaagtgacaagtgaaatgagaaggcgggcgaaagctgtcaactttggtattgtatatggtataagcgattacggcttatctaaagacttaaagatttcgcgaaaagaagcgaaagaatacatagacaattattttgacaggtacaagggcgtcaaaaattacatcgactcaattgtcaaatttgcaaaggaaaatgggtatgttacgactatcttaaataggagaagatacataccggaaatcaattcaaaacgttttaaccaaagatcttttggcgagagaatggcaatgaatacacctattcaaggtagcgctgcggatataataaagatgtcgatggttaaagtatacaatgaattaaaggaaagaggattgaaatcaagacttattcttcaggtgcacgatgagcttataattgacacacatcctgatgaagttgaaatagtcaaggagcttctaaaatcaataatggaaaatatcataaagttgaaagttcctttagttgtagatatagggcaagggaaaaactggtatgatgcaaaataaaaggatcc

SEQ ID NO: 742 - DNA, 2678 bp, Artificial Sequence
  Description of Artificial Sequence: Synthetic Clostridium thermosulfurogenes DNA Polymerase N793D
atgaaatacctgctgccgaccgctgctgctggtctgctgctcctcgctgcccagccggcgatggccatggcgaaatttttgatcatagatggtaatagcttgatgtacagggcgtattttgccctgcctgatttgatgaacagcgaaggaatgcatacaaatgccatatacggtttttcaatgatgcttcttaaattgctggaggaggagaaaccagactacatagcaatagctttcgataaaaaggcttctacatttaggcacaaggagtacagtgcttataaaggaacccgccagtcgatgccagaagagctgatagaacaggtggatattttaaaagatgtgataaatgcatttaacataaagaccatcgagatagagggatttgaagcagatgatatcattggtacagtatcaaaaattgcttccgaaagtgggatggatgtgcttatcgtcacaggcgacagagatgcgcttcagcttgtgtcggcaaatgtaaaagtaaaaatatgtaaaaaaggcataacgcagatggatgagtacgatgaaaaggcggtctttgaaaagtatgaagtgacgccgcttcaattcatagacttgaaagggcttatgggagacaaatcagacaacattccaggagtgcccaatataggggagaagacggccataaagcttgttaaagaatttggatcaattgaaaatttactgatgaatacagataagttaaaagggaaaataaaagaaaatgtagaaaacaatgcagaattagctgttttaagcaaacggcttgctacgattgagagaaatgttcctattgatattgatttgaatgaatacgcggttaaaaattacgatgtcaataagcttacagagctatttgaaaaattggaattttcaagcctcatctcagatttaaaagatgatagtcgtgatacaaaggatattaaagaatggcctgtaagagattttacatacgttaaaaatgttttaggaaagtttgatgttttgtcattgtatccattcatatatgatggaaagataaaagcagtatcatttgcttgcggtgacggatcgttttttgtagagattgatgattatgacaattttaaattgcttaataatgataagcttacgttgataggacacgatctgaaagattttttagtaaacatttcatactgcggtattgaacttaattgtaagattttagatacggccataatgacttatcttttaaatccgtctgagtcgaattacgacataagtcgcgtattgaaaaaatacttgaaagaggatttgcaaaacatagatgatatagtaggcaagggcaggaataaaaagagctacgatgacattgacaaaaagcttttagtcgattatatgtgttcagccgcatcaaacttatctaagttaaaagataagctcatgtcatttataaaagagatggagatggaagatcttttaaaaaatgtggaaattccgcttattgaagtgctaaaatctatggaggtgtacggctttacattagataaagatgtacttagaagtatttctaaagaaatagatgaaaagacagataagattgtaaaagatatttacgatgctgctggatacgaatttaatattaactctacaaagcagttatcagaatttttgtttgataaactgaatttgccagcaataaaaaagactaaaacagggtattcgactgacatggaagtccttgcagaacttataccgtacaatgacatagtaggagaaataatagaatatagacagcttatgaagcttaaatctacgtacatagatggcttcattcccatcatggatgaaaataatagggtccactctacgtttaaacaaacagttgctgctacagggagaattagctcaacagagcctaatctgcagaacatacctgtaagagaagaatttggcaggaggataagaaaggcatttgtatcaagttatgaagatgggcttataatatctgctgattattctcagattgagctaagggttcttgcacatctttcagaggatgaaaaacttattgagtcatttttgaacaacgaagatatacatttaaggacggcatcggaggtttttaaggtttcgaaagaagaagtgacaagtgaaatgagaaggcgggcgaaagctgtcaactttggtattgtatatggtataagcgattacggcttatctaaagacttaaagatttcgcgaaaagaagcgaaagaatacatagacaattattttgacaggtacaagggcgtcaaaaattacatcgactcaattgtcaaatttgcaaaggaaaatgggtatgttacgactatcttaaataggagaagatacataccggaaatcaattcaaaagattttaaccaaagatcttttggcgagagaatggcaatgaatacacctattcaaggtagcgctgcggatataataaagatgtcgatggttaaagtatacaatgaattaaaggaaagaggattgaaatcaagacttattcttcaggtgcacgatgagcttataattgacacacatcctgatgaagttgaaatagtcaaggagcttctaaaatcaataatggaaaatatcataaagttgaaagttcctttagttgtagatatagggcaagggaaaaactggtatgatgcaaaataaaaggatcc

SEQ ID NO: 743 - DNA, 2678 bp, Artificial Sequence
  Description of Artificial Sequence: Synthetic Clostridium thermosulfurogenes DNA Polymerase N793C
atgaaatacctgctgccgaccgctgctgctggtctgctgctcctcgctgcccagccggcgatggccatggcgaaatttttgatcatagatggtaatagcttgatgtacagggcgtattttgccctgcctgatttgatgaacagcgaaggaatgcatacaaatgccatatacggtttttcaatgatgcttcttaaattgctggaggaggagaaaccagactacatagcaatagctttcgataaaaaggcttctacatttaggcacaaggagtacagtgcttataaaggaacccgccagtcgatgccagaagagctgatagaacaggtggatattttaaaagatgtgataaatgcatttaacataaagaccatcgagatagagggatttgaagcagatgatatcattggtacagtatcaaaaattgcttccgaaagtgggatggatgtgcttatcgtcacaggcgacagagatgcgcttcagcttgtgtcggcaaatgtaaaagtaaaaatatgtaaaaaaggcataacgcagatggatgagtacgatgaaaaggcggtctttgaaaagtatgaagtgacgccgcttcaattcatagacttgaaagggcttatgggagacaaatcagacaacattccaggagtgcccaatataggggagaagacggccataaagcttgttaaagaatttggatcaattgaaaatttactgatgaatacagataagttaaaagggaaaataaaagaaaatgtagaaaacaatgcagaattagctgttttaagcaaacggcttgctacgattgagagaaatgttcctattgatattgatttgaatgaatacgcggttaaaaattacgatgtcaataagcttacagagctatttgaaaaattggaattttcaagcctcatctcagatttaaaagatgatagtcgtgatacaaaggatattaaagaatggcctgtaagagattttacatacgttaaaaatgttttaggaaagtttgatgttttgtcattgtatccattcatatatgatggaaagataaaagcagtatcatttgcttgcggtgacggatcgttttttgtagagattgatgattatgacaattttaaattgcttaataatgataagcttacgttgataggacacgatctgaaagattttttagtaaacatttcatactgcggtattgaacttaattgtaagattttagatacggccataatgacttatcttttaaatccgtctgagtcgaattacgacataagtcgcgtattgaaaaaatacttgaaagaggatttgcaaaacatagatgatatagtaggcaagggcaggaataaaaagagctacgatgacattgacaaaaagcttttagtcgattatatgtgttcagccgcatcaaacttatctaagttaaaagataagctcatgtcatttataaaagagatggagatggaagatcttttaaaaaatgtggaaattccgcttattgaagtgctaaaatctatggaggtgtacggctttacattagataaagatgtacttagaagtatttctaaagaaatagatgaaaagacagataagattgtaaaagatatttacgatgctgctggatacgaatttaatattaactctacaaagcagttatcagaatttttgtttgataaactgaatttgccagcaataaaaaagactaaaacagggtattcgactgacatggaagtccttgcagaacttataccgtacaatgacatagtaggagaaataatagaatatagacagcttatgaagcttaaatctacgtacatagatggcttcattcccatcatggatgaaaataatagggtccactctacgtttaaacaaacagttgctgctacagggagaattagctcaacagagcctaatctgcagaacatacctgtaagagaagaatttggcaggaggataagaaaggcatttgtatcaagttatgaagatgggcttataatatctgctgattattctcagattgagctaagggttcttgcacatctttcagaggatgaaaaacttattgagtcatttttgaacaacgaagatatacatttaaggacggcatcggaggtttttaaggtttcgaaagaagaagtgacaagtgaaatgagaaggcgggcgaaagctgtcaactttggtattgtatatggtataagcgattacggcttatctaaagacttaaagatttcgcgaaaagaagcgaaagaatacatagacaattattttgacaggtacaagggcgtcaaaaattacatcgactcaattgtcaaatttgcaaaggaaaatgggtatgttacgactatcttaaataggagaagatacataccggaaatcaattcaaaatgttttaaccaaagatcttttggcgagagaatggcaatgaatacacctattcaaggtagcgctgcggatataataaagatgtcgatggttaaagtatacaatgaattaaaggaaagaggattgaaatcaagacttattcttcaggtgcacgatgagcttataattgacacacatcctgatgaagttgaaatagtcaaggagcttctaaaatcaataatggaaaatatcataaagttgaaagttcctttagttgtagatatagggcaagggaaaaactggtatgatgcaaaataaaaggatcc

SEQ ID NO: 744 - DNA, 2678 bp, Artificial Sequence
  Description of Artificial Sequence: Synthetic Clostridium thermosulfurogenes DNA Polymerase N793E
atgaaatacctgctgccgaccgctgctgctggtctgctgctcctcgctgcccagccggcgatggccatggcgaaatttttgatcatagatggtaatagcttgatgtacagggcgtattttgccctgcctgatttgatgaacagcgaaggaatgcatacaaatgccatatacggtttttcaatgatgcttcttaaattgctggaggaggagaaaccagactacatagcaatagctttcgataaaaaggcttctacatttaggcacaaggagtacagtgcttataaaggaacccgccagtcgatgccagaagagctgatagaacaggtggatattttaaaagatgtgataaatgcatttaacataaagaccatcgagatagagggatttgaagcagatgatatcattggtacagtatcaaaaattgcttccgaaagtgggatggatgtgcttatcgtcacaggcgacagagatgcgcttcagcttgtgtcggcaaatgtaaaagtaaaaatatgtaaaaaaggcataacgcagatggatgagtacgatgaaaaggcggtctttgaaaagtatgaagtgacgccgcttcaattcatagacttgaaagggcttatgggagacaaatcagacaacattccaggagtgcccaatataggggagaagacggccataaagcttgttaaagaatttggatcaattgaaaatttactgatgaatacagataagttaaaagggaaaataaaagaaaatgtagaaaacaatgcagaattagctgttttaagcaaacggcttgctacgattgagagaaatgttcctattgatattgatttgaatgaatacgcggttaaaaattacgatgtcaataagcttacagagctatttgaaaaattggaattttcaagcctcatctcagatttaaaagatgatagtcgtgatacaaaggatattaaagaatggcctgtaagagattttacatacgttaaaaatgttttaggaaagtttgatgttttgtcattgtatccattcatatatgatggaaagataaaagcagtatcatttgcttgcggtgacggatcgttttttgtagagattgatgattatgacaattttaaattgcttaataatgataagcttacgttgataggacacgatctgaaagattttttagtaaacatttcatactgcggtattgaacttaattgtaagattttagatacggccataatgacttatcttttaaatccgtctgagtcgaattacgacataagtcgcgtattgaaaaaatacttgaaagaggatttgcaaaacatagatgatatagtaggcaagggcaggaataaaaagagctacgatgacattgacaaaaagcttttagtcgattatatgtgttcagccgcatcaaacttatctaagttaaaagataagctcatgtcatttataaaagagatggagatggaagatcttttaaaaaatgtggaaattccgcttattgaagtgctaaaatctatggaggtgtacggctttacattagataaagatgtacttagaagtatttctaaagaaatagatgaaaagacagataagattgtaaaagatatttacgatgctgctggatacgaatttaatattaactctacaaagcagttatcagaatttttgtttgataaactgaatttgccagcaataaaaaagactaaaacagggtattcgactgacatggaagtccttgcagaacttataccgtacaatgacatagtaggagaaataatagaatatagacagcttatgaagcttaaatctacgtacatagatggcttcattcccatcatggatgaaaataatagggtccactctacgtttaaacaaacagttgctgctacagggagaattagctcaacagagcctaatctgcagaacatacctgtaagagaagaatttggcaggaggataagaaaggcatttgtatcaagttatgaagatgggcttataatatctgctgattattctcagattgagctaagggttcttgcacatctttcagaggatgaaaaacttattgagtcatttttgaacaacgaagatatacatttaaggacggcatcggaggtttttaaggtttcgaaagaagaagtgacaagtgaaatgagaaggcgggcgaaagctgtcaactttggtattgtatatggtataagcgattacggcttatctaaagacttaaagatttcgcgaaaagaagcgaaagaatacatagacaattattttgacaggtacaagggcgtcaaaaattacatcgactcaattgtcaaatttgcaaaggaaaatgggtatgttacgactatcttaaataggagaagatacataccggaaatcaattcaaaagaatttaaccaaagatcttttggcgagagaatggcaatgaatacacctattcaaggtagcgctgcggatataataaagatgtcgatggttaaagtatacaatgaattaaaggaaagaggattgaaatcaagacttattcttcaggtgcacgatgagcttataattgacacacatcctgatgaagttgaaatagtcaaggagcttctaaaatcaataatggaaaatatcataaagttgaaagttcctttagttgtagatatagggcaagggaaaaactggtatgatgcaaaataaaaggatcc

SEQ ID NO: 745 - DNA, 2678 bp, Artificial Sequence
  Description of Artificial Sequence: Synthetic Clostridium thermosulfurogenes DNA Polymerase N793Q
atgaaatacctgctgccgaccgctgctgctggtctgctgctcctcgctgcccagccggcgatggccatggcgaaatttttgatcatagatggtaatagcttgatgtacagggcgtattttgccctgcctgatttgatgaacagcgaaggaatgcatacaaatgccatatacggtttttcaatgatgcttcttaaattgctggaggaggagaaaccagactacatagcaatagctttcgataaaaaggcttctacatttaggcacaaggagtacagtgcttataaaggaacccgccagtcgatgccagaagagctgatagaacaggtggatattttaaaagatgtgataaatgcatttaacataaagaccatcgagatagagggatttgaagcagatgatatcattggtacagtatcaaaaattgcttccgaaagtgggatggatgtgcttatcgtcacaggcgacagagatgcgcttcagcttgtgtcggcaaatgtaaaagtaaaaatatgtaaaaaaggcataacgcagatggatgagtacgatgaaaaggcggtctttgaaaagtatgaagtgacgccgcttcaattcatagacttgaaagggcttatgggagacaaatcagacaacattccaggagtgcccaatataggggagaagacggccataaagcttgttaaagaatttggatcaattgaaaatttactgatgaatacagataagttaaaagggaaaataaaagaaaatgtagaaaacaatgcagaattagctgttttaagcaaacggcttgctacgattgagagaaatgttcctattgatattgatttgaatgaatacgcggttaaaaattacgatgtcaataagcttacagagctatttgaaaaattggaattttcaagcctcatctcagatttaaaagatgatagtcgtgatacaaaggatattaaagaatggcctgtaagagattttacatacgttaaaaatgttttaggaaagtttgatgttttgtcattgtatccattcatatatgatggaaagataaaagcagtatcatttgcttgcggtgacggatcgttttttgtagagattgatgattatgacaattttaaattgcttaataatgataagcttacgttgataggacacgatctgaaagattttttagtaaacatttcatactgcggtattgaacttaattgtaagattttagatacggccataatgacttatcttttaaatccgtctgagtcgaattacgacataagtcgcgtattgaaaaaatacttgaaagaggatttgcaaaacatagatgatatagtaggcaagggcaggaataaaaagagctacgatgacattgacaaaaagcttttagtcgattatatgtgttcagccgcatcaaacttatctaagttaaaagataagctcatgtcatttataaaagagatggagatggaagatcttttaaaaaatgtggaaattccgcttattgaagtgctaaaatctatggaggtgtacggctttacattagataaagatgtacttagaagtatttctaaagaaatagatgaaaagacagataagattgtaaaagatatttacgatgctgctggatacgaatttaatattaactctacaaagcagttatcagaatttttgtttgataaactgaatttgccagcaataaaaaagactaaaacagggtattcgactgacatggaagtccttgcagaacttataccgtacaatgacatagtaggagaaataatagaatatagacagcttatgaagcttaaatctacgtacatagatggcttcattcccatcatggatgaaaataatagggtccactctacgtttaaacaaacagttgctgctacagggagaattagctcaacagagcctaatctgcagaacatacctgtaagagaagaatttggcaggaggataagaaaggcatttgtatcaagttatgaagatgggcttataatatctgctgattattctcagattgagctaagggttcttgcacatctttcagaggatgaaaaacttattgagtcatttttgaacaacgaagatatacatttaaggacggcatcggaggtttttaaggtttcgaaagaagaagtgacaagtgaaatgagaaggcgggcgaaagctgtcaactttggtattgtatatggtataagcgattacggcttatctaaagacttaaagatttcgcgaaaagaagcgaaagaatacatagacaattattttgacaggtacaagggcgtcaaaaattacatcgactcaattgtcaaatttgcaaaggaaaatgggtatgttacgactatcttaaataggagaagatacataccggaaatcaattcaaaacaatttaaccaaagatcttttggcgagagaatggcaatgaatacacctattcaaggtagcgctgcggatataataaagatgtcgatggttaaagtatacaatgaattaaaggaaagaggattgaaatcaagacttattcttcaggtgcacgatgagcttataattgacacacatcctgatgaagttgaaatagtcaaggagcttctaaaatcaataatggaaaatatcataaagttgaaagttcctttagttgtagatatagggcaagggaaaaactggtatgatgcaaaataaaaggatcc

SEQ ID NO: 746 - DNA, 2678 bp, Artificial Sequence
  Description of Artificial Sequence: Synthetic Clostridium thermosulfurogenes DNA Polymerase N793G
atgaaatacctgctgccgaccgctgctgctggtctgctgctcctcgctgcccagccggcgatggccatggcgaaatttttgatcatagatggtaatagcttgatgtacagggcgtattttgccctgcctgatttgatgaacagcgaaggaatgcatacaaatgccatatacggtttttcaatgatgcttcttaaattgctggaggaggagaaaccagactacatagcaatagctttcgataaaaaggcttctacatttaggcacaaggagtacagtgcttataaaggaacccgccagtcgatgccagaagagctgatagaacaggtggatattttaaaagatgtgataaatgcatttaacataaagaccatcgagatagagggatttgaagcagatgatatcattggtacagtatcaaaaattgcttccgaaagtgggatggatgtgcttatcgtcacaggcgacagagatgcgcttcagcttgtgtcggcaaatgtaaaagtaaaaatatgtaaaaaaggcataacgcagatggatgagtacgatgaaaaggcggtctttgaaaagtatgaagtgacgccgcttcaattcatagacttgaaagggcttatgggagacaaatcagacaacattccaggagtgcccaatataggggagaagacggccataaagcttgttaaagaatttggatcaattgaaaatttactgatgaatacagataagttaaaagggaaaataaaagaaaatgtagaaaacaatgcagaattagctgttttaagcaaacggcttgctacgattgagagaaatgttcctattgatattgatttgaatgaatacgcggttaaaaattacgatgtcaataagcttacagagctatttgaaaaattggaattttcaagcctcatctcagatttaaaagatgatagtcgtgatacaaaggatattaaagaatggcctgtaagagattttacatacgttaaaaatgttttaggaaagtttgatgttttgtcattgtatccattcatatatgatggaaagataaaagcagtatcatttgcttgcggtgacggatcgttttttgtagagattgatgattatgacaattttaaattgcttaataatgataagcttacgttgataggacacgatctgaaagattttttagtaaacatttcatactgcggtattgaacttaattgtaagattttagatacggccataatgacttatcttttaaatccgtctgagtcgaattacgacataagtcgcgtattgaaaaaatacttgaaagaggatttgcaaaacatagatgatatagtaggcaagggcaggaataaaaagagctacgatgacattgacaaaaagcttttagtcgattatatgtgttcagccgcatcaaacttatctaagttaaaagataagctcatgtcatttataaaagagatggagatggaagatcttttaaaaaatgtggaaattccgcttattgaagtgctaaaatctatggaggtgtacggctttacattagataaagatgtacttagaagtatttctaaagaaatagatgaaaagacagataagattgtaaaagatatttacgatgctgctggatacgaatttaatattaactctacaaagcagttatcagaatttttgtttgataaactgaatttgccagcaataaaaaagactaaaacagggtattcgactgacatggaagtccttgcagaacttataccgtacaatgacatagtaggagaaataatagaatatagacagcttatgaagcttaaatctacgtacatagatggcttcattcccatcatggatgaaaataatagggtccactctacgtttaaacaaacagttgctgctacagggagaattagctcaacagagcctaatctgcagaacatacctgtaagagaagaatttggcaggaggataagaaaggcatttgtatcaagttatgaagatgggcttataatatctgctgattattctcagattgagctaagggttcttgcacatctttcagaggatgaaaaacttattgagtcatttttgaacaacgaagatatacatttaaggacggcatcggaggtttttaaggtttcgaaagaagaagtgacaagtgaaatgagaaggcgggcgaaagctgtcaactttggtattgtatatggtataagcgattacggcttatctaaagacttaaagatttcgcgaaaagaagcgaaagaatacatagacaattattttgacaggtacaagggcgtcaaaaattacatcgactcaattgtcaaatttgcaaaggaaaatgggtatgttacgactatcttaaataggagaagatacataccggaaatcaattcaaaaggttttaaccaaagatcttttggcgagagaatggcaatgaatacacctattcaaggtagcgctgcggatataataaagatgtcgatggttaaagtatacaatgaattaaaggaaagaggattgaaatcaagacttattcttcaggtgcacgatgagcttataattgacacacatcctgatgaagttgaaatagtcaaggagcttctaaaatcaataatggaaaatatcataaagttgaaagttcctttagttgtagatatagggcaagggaaaaactggtatgatgcaaaataaaaggatcc

SEQ ID NO: 747 - DNA, 2678 bp, Artificial Sequence
  Description of Artificial Sequence: Synthetic Clostridium thermosulfurogenes DNA Polymerase N793H
atgaaatacctgctgccgaccgctgctgctggtctgctgctcctcgctgcccagccggcgatggccatggcgaaatttttgatcatagatggtaatagcttgatgtacagggcgtattttgccctgcctgatttgatgaacagcgaaggaatgcatacaaatgccatatacggtttttcaatgatgcttcttaaattgctggaggaggagaaaccagactacatagcaatagctttcgataaaaaggcttctacatttaggcacaaggagtacagtgcttataaaggaacccgccagtcgatgccagaagagctgatagaacaggtggatattttaaaagatgtgataaatgcatttaacataaagaccatcgagatagagggatttgaagcagatgatatcattggtacagtatcaaaaattgcttccgaaagtgggatggatgtgcttatcgtcacaggcgacagagatgcgcttcagcttgtgtcggcaaatgtaaaagtaaaaatatgtaaaaaaggcataacgcagatggatgagtacgatgaaaaggcggtctttgaaaagtatgaagtgacgccgcttcaattcatagacttgaaagggcttatgggagacaaatcagacaacattccaggagtgcccaatataggggagaagacggccataaagcttgttaaagaatttggatcaattgaaaatttactgatgaatacagataagttaaaagggaaaataaaagaaaatgtagaaaacaatgcagaattagctgttttaagcaaacggcttgctacgattgagagaaatgttcctattgatattgatttgaatgaatacgcggttaaaaattacgatgtcaataagcttacagagctatttgaaaaattggaattttcaagcctcatctcagatttaaaagatgatagtcgtgatacaaaggatattaaagaatggcctgtaagagattttacatacgttaaaaatgttttaggaaagtttgatgttttgtcattgtatccattcatatatgatggaaagataaaagcagtatcatttgcttgcggtgacggatcgttttttgtagagattgatgattatgacaattttaaattgcttaataatgataagcttacgttgataggacacgatctgaaagattttttagtaaacatttcatactgcggtattgaacttaattgtaagattttagatacggccataatgacttatcttttaaatccgtctgagtcgaattacgacataagtcgcgtattgaaaaaatacttgaaagaggatttgcaaaacatagatgatatagtaggcaagggcaggaataaaaagagctacgatgacattgacaaaaagcttttagtcgattatatgtgttcagccgcatcaaacttatctaagttaaaagataagctcatgtcatttataaaagagatggagatggaagatcttttaaaaaatgtggaaattccgcttattgaagtgctaaaatctatggaggtgtacggctttacattagataaagatgtacttagaagtatttctaaagaaatagatgaaaagacagataagattgtaaaagatatttacgatgctgctggatacgaatttaatattaactctacaaagcagttatcagaatttttgtttgataaactgaatttgccagcaataaaaaagactaaaacagggtattcgactgacatggaagtccttgcagaacttataccgtacaatgacatagtaggagaaataatagaatatagacagcttatgaagcttaaatctacgtacatagatggcttcattcccatcatggatgaaaataatagggtccactctacgtttaaacaaacagttgctgctacagggagaattagctcaacagagcctaatctgcagaacatacctgtaagagaagaatttggcaggaggataagaaaggcatttgtatcaagttatgaagatgggcttataatatctgctgattattctcagattgagctaagggttcttgcacatctttcagaggatgaaaaacttattgagtcatttttgaacaacgaagatatacatttaaggacggcatcggaggtttttaaggtttcgaaagaagaagtgacaagtgaaatgagaaggcgggcgaaagctgtcaactttggtattgtatatggtataagcgattacggcttatctaaagacttaaagatttcgcgaaaagaagcgaaagaatacatagacaattattttgacaggtacaagggcgtcaaaaattacatcgactcaattgtcaaatttgcaaaggaaaatgggtatgttacgactatcttaaataggagaagatacataccggaaatcaattcaaaacattttaaccaaagatcttttggcgagagaatggcaatgaatacacctattcaaggtagcgctgcggatataataaagatgtcgatggttaaagtatacaatgaattaaaggaaagaggattgaaatcaagacttattcttcaggtgcacgatgagcttataattgacacacatcctgatgaagttgaaatagtcaaggagcttctaaaatcaataatggaaaatatcataaagttgaaagttcctttagttgtagatatagggcaagggaaaaactggtatgatgcaaaataaaaggatcc

SEQ ID NO: 748 - DNA, 2678 bp, Artificial Sequence
  Description of Artificial Sequence: Synthetic Clostridium thermosulfurogenes DNA Polymerase N793I
atgaaatacctgctgccgaccgctgctgctggtctgctgctcctcgctgcccagccggcgatggccatggcgaaatttttgatcatagatggtaatagcttgatgtacagggcgtattttgccctgcctgatttgatgaacagcgaaggaatgcatacaaatgccatatacggtttttcaatgatgcttcttaaattgctggaggaggagaaaccagactacatagcaatagctttcgataaaaaggcttctacatttaggcacaaggagtacagtgcttataaaggaacccgccagtcgatgccagaagagctgatagaacaggtggatattttaaaagatgtgataaatgcatttaacataaagaccatcgagatagagggatttgaagcagatgatatcattggtacagtatcaaaaattgcttccgaaagtgggatggatgtgcttatcgtcacaggcgacagagatgcgcttcagcttgtgtcggcaaatgtaaaagtaaaaatatgtaaaaaaggcataacgcagatggatgagtacgatgaaaaggcggtctttgaaaagtatgaagtgacgccgcttcaattcatagacttgaaagggcttatgggagacaaatcagacaacattccaggagtgcccaatataggggagaagacggccataaagcttgttaaagaatttggatcaattgaaaatttactgatgaatacagataagttaaaagggaaaataaaagaaaatgtagaaaacaatgcagaattagctgttttaagcaaacggcttgctacgattgagagaaatgttcctattgatattgatttgaatgaatacgcggttaaaaattacgatgtcaataagcttacagagctatttgaaaaattggaattttcaagcctcatctcagatttaaaagatgatagtcgtgatacaaaggatattaaagaatggcctgtaagagattttacatacgttaaaaatgttttaggaaagtttgatgttttgtcattgtatccattcatatatgatggaaagataaaagcagtatcatttgcttgcggtgacggatcgttttttgtagagattgatgattatgacaattttaaattgcttaataatgataagcttacgttgataggacacgatctgaaagattttttagtaaacatttcatactgcggtattgaacttaattgtaagattttagatacggccataatgacttatcttttaaatccgtctgagtcgaattacgacataagtcgcgtattgaaaaaatacttgaaagaggatttgcaaaacatagatgatatagtaggcaagggcaggaataaaaagagctacgatgacattgacaaaaagcttttagtcgattatatgtgttcagccgcatcaaacttatctaagttaaaagataagctcatgtcatttataaaagagatggagatggaagatcttttaaaaaatgtggaaattccgcttattgaagtgctaaaatctatggaggtgtacggctttacattagataaagatgtacttagaagtatttctaaagaaatagatgaaaagacagataagattgtaaaagatatttacgatgctgctggatacgaatttaatattaactctacaaagcagttatcagaatttttgtttgataaactgaatttgccagcaataaaaaagactaaaacagggtattcgactgacatggaagtccttgcagaacttataccgtacaatgacatagtaggagaaataatagaatatagacagcttatgaagcttaaatctacgtacatagatggcttcattcccatcatggatgaaaataatagggtccactctacgtttaaacaaacagttgctgctacagggagaattagctcaacagagcctaatctgcagaacatacctgtaagagaagaatttggcaggaggataagaaaggcatttgtatcaagttatgaagatgggcttataatatctgctgattattctcagattgagctaagggttcttgcacatctttcagaggatgaaaaacttattgagtcatttttgaacaacgaagatatacatttaaggacggcatcggaggtttttaaggtttcgaaagaagaagtgacaagtgaaatgagaaggcgggcgaaagctgtcaactttggtattgtatatggtataagcgattacggcttatctaaagacttaaagatttcgcgaaaagaagcgaaagaatacatagacaattattttgacaggtacaagggcgtcaaaaattacatcgactcaattgtcaaatttgcaaaggaaaatgggtatgttacgactatcttaaataggagaagatacataccggaaatcaattcaaaaatttttaaccaaagatcttttggcgagagaatggcaatgaatacacctattcaaggtagcgctgcggatataataaagatgtcgatggttaaagtatacaatgaattaaaggaaagaggattgaaatcaagacttattcttcaggtgcacgatgagcttataattgacacacatcctgatgaagttgaaatagtcaaggagcttctaaaatcaataatggaaaatatcataaagttgaaagttcctttagttgtagatatagggcaagggaaaaactggtatgatgcaaaataaaaggatcc

SEQ ID NO: 749 - DNA, 2678 bp, Artificial Sequence
  Description of Artificial Sequence: Synthetic Clostridium thermosulfurogenes DNA Polymerase N793L
atgaaatacctgctgccgaccgctgctgctggtctgctgctcctcgctgcccagccggcgatggccatggcgaaatttttgatcatagatggtaatagcttgatgtacagggcgtattttgccctgcctgatttgatgaacagcgaaggaatgcatacaaatgccatatacggtttttcaatgatgcttcttaaattgctggaggaggagaaaccagactacatagcaatagctttcgataaaaaggcttctacatttaggcacaaggagtacagtgcttataaaggaacccgccagtcgatgccagaagagctgatagaacaggtggatattttaaaagatgtgataaatgcatttaacataaagaccatcgagatagagggatttgaagcagatgatatcattggtacagtatcaaaaattgcttccgaaagtgggatggatgtgcttatcgtcacaggcgacagagatgcgcttcagcttgtgtcggcaaatgtaaaagtaaaaatatgtaaaaaaggcataacgcagatggatgagtacgatgaaaaggcggtctttgaaaagtatgaagtgacgccgcttcaattcatagacttgaaagggcttatgggagacaaatcagacaacattccaggagtgcccaatataggggagaagacggccataaagcttgttaaagaatttggatcaattgaaaatttactgatgaatacagataagttaaaagggaaaataaaagaaaatgtagaaaacaatgcagaattagctgttttaagcaaacggcttgctacgattgagagaaatgttcctattgatattgatttgaatgaatacgcggttaaaaattacgatgtcaataagcttacagagctatttgaaaaattggaattttcaagcctcatctcagatttaaaagatgatagtcgtgatacaaaggatattaaagaatggcctgtaagagattttacatacgttaaaaatgttttaggaaagtttgatgttttgtcattgtatccattcatatatgatggaaagataaaagcagtatcatttgcttgcggtgacggatcgttttttgtagagattgatgattatgacaattttaaattgcttaataatgataagcttacgttgataggacacgatctgaaagattttttagtaaacatttcatactgcggtattgaacttaattgtaagattttagatacggccataatgacttatcttttaaatccgtctgagtcgaattacgacataagtcgcgtattgaaaaaatacttgaaagaggatttgcaaaacatagatgatatagtaggcaagggcaggaataaaaagagctacgatgacattgacaaaaagcttttagtcgattatatgtgttcagccgcatcaaacttatctaagttaaaagataagctcatgtcatttataaaagagatggagatggaagatcttttaaaaaatgtggaaattccgcttattgaagtgctaaaatctatggaggtgtacggctttacattagataaagatgtacttagaagtatttctaaagaaatagatgaaaagacagataagattgtaaaagatatttacgatgctgctggatacgaatttaatattaactctacaaagcagttatcagaatttttgtttgataaactgaatttgccagcaataaaaaagactaaaacagggtattcgactgacatggaagtccttgcagaacttataccgtacaatgacatagtaggagaaataatagaatatagacagcttatgaagcttaaatctacgtacatagatggcttcattcccatcatggatgaaaataatagggtccactctacgtttaaacaaacagttgctgctacagggagaattagctcaacagagcctaatctgcagaacatacctgtaagagaagaatttggcaggaggataagaaaggcatttgtatcaagttatgaagatgggcttataatatctgctgattattctcagattgagctaagggttcttgcacatctttcagaggatgaaaaacttattgagtcatttttgaacaacgaagatatacatttaaggacggcatcggaggtttttaaggtttcgaaagaagaagtgacaagtgaaatgagaaggcgggcgaaagctgtcaactttggtattgtatatggtataagcgattacggcttatctaaagacttaaagatttcgcgaaaagaagcgaaagaatacatagacaattattttgacaggtacaagggcgtcaaaaattacatcgactcaattgtcaaatttgcaaaggaaaatgggtatgttacgactatcttaaataggagaagatacataccggaaatcaattcaaaactttttaaccaaagatcttttggcgagagaatggcaatgaatacacctattcaaggtagcgctgcggatataataaagatgtcgatggttaaagtatacaatgaattaaaggaaagaggattgaaatcaagacttattcttcaggtgcacgatgagcttataattgacacacatcctgatgaagttgaaatagtcaaggagcttctaaaatcaataatggaaaatatcataaagttgaaagttcctttagttgtagatatagggcaagggaaaaactggtatgatgcaaaataaaaggatcc

SEQ ID NO: 750 - DNA, 2678 bp, Artificial Sequence
  Description of Artificial Sequence: Synthetic Clostridium thermosulfurogenes DNA Polymerase N793K
atgaaatacctgctgccgaccgctgctgctggtctgctgctcctcgctgcccagccggcgatggccatggcgaaatttttgatcatagatggtaatagcttgatgtacagggcgtattttgccctgcctgatttgatgaacagcgaaggaatgcatacaaatgccatatacggtttttcaatgatgcttcttaaattgctggaggaggagaaaccagactacatagcaatagctttcgataaaaaggcttctacatttaggcacaaggagtacagtgcttataaaggaacccgccagtcgatgccagaagagctgatagaacaggtggatattttaaaagatgtgataaatgcatttaacataaagaccatcgagatagagggatttgaagcagatgatatcattggtacagtatcaaaaattgcttccgaaagtgggatggatgtgcttatcgtcacaggcgacagagatgcgcttcagcttgtgtcggcaaatgtaaaagtaaaaatatgtaaaaaaggcataacgcagatggatgagtacgatgaaaaggcggtctttgaaaagtatgaagtgacgccgcttcaattcatagacttgaaagggcttatgggagacaaatcagacaacattccaggagtgcccaatataggggagaagacggccataaagcttgttaaagaatttggatcaattgaaaatttactgatgaatacagataagttaaaagggaaaataaaagaaaatgtagaaaacaatgcagaattagctgttttaagcaaacggcttgctacgattgagagaaatgttcctattgatattgatttgaatgaatacgcggttaaaaattacgatgtcaataagcttacagagctatttgaaaaattggaattttcaagcctcatctcagatttaaaagatgatagtcgtgatacaaaggatattaaagaatggcctgtaagagattttacatacgttaaaaatgttttaggaaagtttgatgttttgtcattgtatccattcatatatgatggaaagataaaagcagtatcatttgcttgcggtgacggatcgttttttgtagagattgatgattatgacaattttaaattgcttaataatgataagcttacgttgataggacacgatctgaaagattttttagtaaacatttcatactgcggtattgaacttaattgtaagattttagatacggccataatgacttatcttttaaatccgtctgagtcgaattacgacataagtcgcgtattgaaaaaatacttgaaagaggatttgcaaaacatagatgatatagtaggcaagggcaggaataaaaagagctacgatgacattgacaaaaagcttttagtcgattatatgtgttcagccgcatcaaacttatctaagttaaaagataagctcatgtcatttataaaagagatggagatggaagatcttttaaaaaatgtggaaattccgcttattgaagtgctaaaatctatggaggtgtacggctttacattagataaagatgtacttagaagtatttctaaagaaatagatgaaaagacagataagattgtaaaagatatttacgatgctgctggatacgaatttaatattaactctacaaagcagttatcagaatttttgtttgataaactgaatttgccagcaataaaaaagactaaaacagggtattcgactgacatggaagtccttgcagaacttataccgtacaatgacatagtaggagaaataatagaatatagacagcttatgaagcttaaatctacgtacatagatggcttcattcccatcatggatgaaaataatagggtccactctacgtttaaacaaacagttgctgctacagggagaattagctcaacagagcctaatctgcagaacatacctgtaagagaagaatttggcaggaggataagaaaggcatttgtatcaagttatgaagatgggcttataatatctgctgattattctcagattgagctaagggttcttgcacatctttcagaggatgaaaaacttattgagtcatttttgaacaacgaagatatacatttaaggacggcatcggaggtttttaaggtttcgaaagaagaagtgacaagtgaaatgagaaggcgggcgaaagctgtcaactttggtattgtatatggtataagcgattacggcttatctaaagacttaaagatttcgcgaaaagaagcgaaagaatacatagacaattattttgacaggtacaagggcgtcaaaaattacatcgactcaattgtcaaatttgcaaaggaaaatgggtatgttacgactatcttaaataggagaagatacataccggaaatcaattcaaaaaaatttaaccaaagatcttttggcgagagaatggcaatgaatacacctattcaaggtagcgctgcggatataataaagatgtcgatggttaaagtatacaatgaattaaaggaaagaggattgaaatcaagacttattcttcaggtgcacgatgagcttataattgacacacatcctgatgaagttgaaatagtcaaggagcttctaaaatcaataatggaaaatatcataaagttgaaagttcctttagttgtagatatagggcaagggaaaaactggtatgatgcaaaataaaaggatcc

SEQ ID NO: 751 - DNA, 2678 bp, Artificial Sequence
  Description of Artificial Sequence: Synthetic Clostridium thermosulfurogenes DNA Polymerase N793M
atgaaatacctgctgccgaccgctgctgctggtctgctgctcctcgctgcccagccggcgatggccatggcgaaatttttgatcatagatggtaatagcttgatgtacagggcgtattttgccctgcctgatttgatgaacagcgaaggaatgcatacaaatgccatatacggtttttcaatgatgcttcttaaattgctggaggaggagaaaccagactacatagcaatagctttcgataaaaaggcttctacatttaggcacaaggagtacagtgcttataaaggaacccgccagtcgatgccagaagagctgatagaacaggtggatattttaaaagatgtgataaatgcatttaacataaagaccatcgagatagagggatttgaagcagatgatatcattggtacagtatcaaaaattgcttccgaaagtgggatggatgtgcttatcgtcacaggcgacagagatgcgcttcagcttgtgtcggcaaatgtaaaagtaaaaatatgtaaaaaaggcataacgcagatggatgagtacgatgaaaaggcggtctttgaaaagtatgaagtgacgccgcttcaattcatagacttgaaagggcttatgggagacaaatcagacaacattccaggagtgcccaatataggggagaagacggccataaagcttgttaaagaatttggatcaattgaaaatttactgatgaatacagataagttaaaagggaaaataaaagaaaatgtagaaaacaatgcagaattagctgttttaagcaaacggcttgctacgattgagagaaatgttcctattgatattgatttgaatgaatacgcggttaaaaattacgatgtcaataagcttacagagctatttgaaaaattggaattttcaagcctcatctcagatttaaaagatgatagtcgtgatacaaaggatattaaagaatggcctgtaagagattttacatacgttaaaaatgttttaggaaagtttgatgttttgtcattgtatccattcatatatgatggaaagataaaagcagtatcatttgcttgcggtgacggatcgttttttgtagagattgatgattatgacaattttaaattgcttaataatgataagcttacgttgataggacacgatctgaaagattttttagtaaacatttcatactgcggtattgaacttaattgtaagattttagatacggccataatgacttatcttttaaatccgtctgagtcgaattacgacataagtcgcgtattgaaaaaatacttgaaagaggatttgcaaaacatagatgatatagtaggcaagggcaggaataaaaagagctacgatgacattgacaaaaagcttttagtcgattatatgtgttcagccgcatcaaacttatctaagttaaaagataagctcatgtcatttataaaagagatggagatggaagatcttttaaaaaatgtggaaattccgcttattgaagtgctaaaatctatggaggtgtacggctttacattagataaagatgtacttagaagtatttctaaagaaatagatgaaaagacagataagattgtaaaagatatttacgatgctgctggatacgaatttaatattaactctacaaagcagttatcagaatttttgtttgataaactgaatttgccagcaataaaaaagactaaaacagggtattcgactgacatggaagtccttgcagaacttataccgtacaatgacatagtaggagaaataatagaatatagacagcttatgaagcttaaatctacgtacatagatggcttcattcccatcatggatgaaaataatagggtccactctacgtttaaacaaacagttgctgctacagggagaattagctcaacagagcctaatctgcagaacatacctgtaagagaagaatttggcaggaggataagaaaggcatttgtatcaagttatgaagatgggcttataatatctgctgattattctcagattgagctaagggttcttgcacatctttcagaggatgaaaaacttattgagtcatttttgaacaacgaagatatacatttaaggacggcatcggaggtttttaaggtttcgaaagaagaagtgacaagtgaaatgagaaggcgggcgaaagctgtcaactttggtattgtatatggtataagcgattacggcttatctaaagacttaaagatttcgcgaaaagaagcgaaagaatacatagacaattattttgacaggtacaagggcgtcaaaaattacatcgactcaattgtcaaatttgcaaaggaaaatgggtatgttacgactatcttaaataggagaagatacataccggaaatcaattcaaaaatgtttaaccaaagatcttttggcgagagaatggcaatgaatacacctattcaaggtagcgctgcggatataataaagatgtcgatggttaaagtatacaatgaattaaaggaaagaggattgaaatcaagacttattcttcaggtgcacgatgagcttataattgacacacatcctgatgaagttgaaatagtcaaggagcttctaaaatcaataatggaaaatatcataaagttgaaagttcctttagttgtagatatagggcaagggaaaaactggtatgatgcaaaataaaaggatcc

SEQ ID NO: 752 - DNA, 2678 bp, Artificial Sequence
  Description of Artificial Sequence: Synthetic Clostridium thermosulfurogenes DNA Polymerase N793F
atgaaatacctgctgccgaccgctgctgctggtctgctgctcctcgctgcccagccggcgatggccatggcgaaatttttgatcatagatggtaatagcttgatgtacagggcgtattttgccctgcctgatttgatgaacagcgaaggaatgcatacaaatgccatatacggtttttcaatgatgcttcttaaattgctggaggaggagaaaccagactacatagcaatagctttcgataaaaaggcttctacatttaggcacaaggagtacagtgcttataaaggaacccgccagtcgatgccagaagagctgatagaacaggtggatattttaaaagatgtgataaatgcatttaacataaagaccatcgagatagagggatttgaagcagatgatatcattggtacagtatcaaaaattgcttccgaaagtgggatggatgtgcttatcgtcacaggcgacagagatgcgcttcagcttgtgtcggcaaatgtaaaagtaaaaatatgtaaaaaaggcataacgcagatggatgagtacgatgaaaaggcggtctttgaaaagtatgaagtgacgccgcttcaattcatagacttgaaagggcttatgggagacaaatcagacaacattccaggagtgcccaatataggggagaagacggccataaagcttgttaaagaatttggatcaattgaaaatttactgatgaatacagataagttaaaagggaaaataaaagaaaatgtagaaaacaatgcagaattagctgttttaagcaaacggcttgctacgattgagagaaatgttcctattgatattgatttgaatgaatacgcggttaaaaattacgatgtcaataagcttacagagctatttgaaaaattggaattttcaagcctcatctcagatttaaaagatgatagtcgtgatacaaaggatattaaagaatggcctgtaagagattttacatacgttaaaaatgttttaggaaagtttgatgttttgtcattgtatccattcatatatgatggaaagataaaagcagtatcatttgcttgcggtgacggatcgttttttgtagagattgatgattatgacaattttaaattgcttaataatgataagcttacgttgataggacacgatctgaaagattttttagtaaacatttcatactgcggtattgaacttaattgtaagattttagatacggccataatgacttatcttttaaatccgtctgagtcgaattacgacataagtcgcgtattgaaaaaatacttgaaagaggatttgcaaaacatagatgatatagtaggcaagggcaggaataaaaagagctacgatgacattgacaaaaagcttttagtcgattatatgtgttcagccgcatcaaacttatctaagttaaaagataagctcatgtcatttataaaagagatggagatggaagatcttttaaaaaatgtggaaattccgcttattgaagtgctaaaatctatggaggtgtacggctttacattagataaagatgtacttagaagtatttctaaagaaatagatgaaaagacagataagattgtaaaagatatttacgatgctgctggatacgaatttaatattaactctacaaagcagttatcagaatttttgtttgataaactgaatttgccagcaataaaaaagactaaaacagggtattcgactgacatggaagtccttgcagaacttataccgtacaatgacatagtaggagaaataatagaatatagacagcttatgaagcttaaatctacgtacatagatggcttcattcccatcatggatgaaaataatagggtccactctacgtttaaacaaacagttgctgctacagggagaattagctcaacagagcctaatctgcagaacatacctgtaagagaagaatttggcaggaggataagaaaggcatttgtatcaagttatgaagatgggcttataatatctgctgattattctcagattgagctaagggttcttgcacatctttcagaggatgaaaaacttattgagtcatttttgaacaacgaagatatacatttaaggacggcatcggaggtttttaaggtttcgaaagaagaagtgacaagtgaaatgagaaggcgggcgaaagctgtcaactttggtattgtatatggtataagcgattacggcttatctaaagacttaaagatttcgcgaaaagaagcgaaagaatacatagacaattattttgacaggtacaagggcgtcaaaaattacatcgactcaattgtcaaatttgcaaaggaaaatgggtatgttacgactatcttaaataggagaagatacataccggaaatcaattcaaaattttttaaccaaagatcttttggcgagagaatggcaatgaatacacctattcaaggtagcgctgcggatataataaagatgtcgatggttaaagtatacaatgaattaaaggaaagaggattgaaatcaagacttattcttcaggtgcacgatgagcttataattgacacacatcctgatgaagttgaaatagtcaaggagcttctaaaatcaataatggaaaatatcataaagttgaaagttcctttagttgtagatatagggcaagggaaaaactggtatgatgcaaaataaaaggatcc

SEQ ID NO: 753 - DNA, 2678 bp, Artificial Sequence
  Description of Artificial Sequence: Synthetic Clostridium thermosulfurogenes DNA Polymerase N793P
atgaaatacctgctgccgaccgctgctgctggtctgctgctcctcgctgcccagccggcgatggccatggcgaaatttttgatcatagatggtaatagcttgatgtacagggcgtattttgccctgcctgatttgatgaacagcgaaggaatgcatacaaatgccatatacggtttttcaatgatgcttcttaaattgctggaggaggagaaaccagactacatagcaatagctttcgataaaaaggcttctacatttaggcacaaggagtacagtgcttataaaggaacccgccagtcgatgccagaagagctgatagaacaggtggatattttaaaagatgtgataaatgcatttaacataaagaccatcgagatagagggatttgaagcagatgatatcattggtacagtatcaaaaattgcttccgaaagtgggatggatgtgcttatcgtcacaggcgacagagatgcgcttcagcttgtgtcggcaaatgtaaaagtaaaaatatgtaaaaaaggcataacgcagatggatgagtacgatgaaaaggcggtctttgaaaagtatgaagtgacgccgcttcaattcatagacttgaaagggcttatgggagacaaatcagacaacattccaggagtgcccaatataggggagaagacggccataaagcttgttaaagaatttggatcaattgaaaatttactgatgaatacagataagttaaaagggaaaataaaagaaaatgtagaaaacaatgcagaattagctgttttaagcaaacggcttgctacgattgagagaaatgttcctattgatattgatttgaatgaatacgcggttaaaaattacgatgtcaataagcttacagagctatttgaaaaattggaattttcaagcctcatctcagatttaaaagatgatagtcgtgatacaaaggatattaaagaatggcctgtaagagattttacatacgttaaaaatgttttaggaaagtttgatgttttgtcattgtatccattcatatatgatggaaagataaaagcagtatcatttgcttgcggtgacggatcgttttttgtagagattgatgattatgacaattttaaattgcttaataatgataagcttacgttgataggacacgatctgaaagattttttagtaaacatttcatactgcggtattgaacttaattgtaagattttagatacggccataatgacttatcttttaaatccgtctgagtcgaattacgacataagtcgcgtattgaaaaaatacttgaaagaggatttgcaaaacatagatgatatagtaggcaagggcaggaataaaaagagctacgatgacattgacaaaaagcttttagtcgattatatgtgttcagccgcatcaaacttatctaagttaaaagataagctcatgtcatttataaaagagatggagatggaagatcttttaaaaaatgtggaaattccgcttattgaagtgctaaaatctatggaggtgtacggctttacattagataaagatgtacttagaagtatttctaaagaaatagatgaaaagacagataagattgtaaaagatatttacgatgctgctggatacgaatttaatattaactctacaaagcagttatcagaatttttgtttgataaactgaatttgccagcaataaaaaagactaaaacagggtattcgactgacatggaagtccttgcagaacttataccgtacaatgacatagtaggagaaataatagaatatagacagcttatgaagcttaaatctacgtacatagatggcttcattcccatcatggatgaaaataatagggtccactctacgtttaaacaaacagttgctgctacagggagaattagctcaacagagcctaatctgcagaacatacctgtaagagaagaatttggcaggaggataagaaaggcatttgtatcaagttatgaagatgggcttataatatctgctgattattctcagattgagctaagggttcttgcacatctttcagaggatgaaaaacttattgagtcatttttgaacaacgaagatatacatttaaggacggcatcggaggtttttaaggtttcgaaagaagaagtgacaagtgaaatgagaaggcgggcgaaagctgtcaactttggtattgtatatggtataagcgattacggcttatctaaagacttaaagatttcgcgaaaagaagcgaaagaatacatagacaattattttgacaggtacaagggcgtcaaaaattacatcgactcaattgtcaaatttgcaaaggaaaatgggtatgttacgactatcttaaataggagaagatacataccggaaatcaattcaaaaccttttaaccaaagatcttttggcgagagaatggcaatgaatacacctattcaaggtagcgctgcggatataataaagatgtcgatggttaaagtatacaatgaattaaaggaaagaggattgaaatcaagacttattcttcaggtgcacgatgagcttataattgacacacatcctgatgaagttgaaatagtcaaggagcttctaaaatcaataatggaaaatatcataaagttgaaagttcctttagttgtagatatagggcaagggaaaaactggtatgatgcaaaataaaaggatcc

SEQ ID NO: 754 - DNA, 2678 bp, Artificial Sequence
  Description of Artificial Sequence: Synthetic Clostridium thermosulfurogenes DNA Polymerase N793S
atgaaatacctgctgccgaccgctgctgctggtctgctgctcctcgctgcccagccggcgatggccatggcgaaatttttgatcatagatggtaatagcttgatgtacagggcgtattttgccctgcctgatttgatgaacagcgaaggaatgcatacaaatgccatatacggtttttcaatgatgcttcttaaattgctggaggaggagaaaccagactacatagcaatagctttcgataaaaaggcttctacatttaggcacaaggagtacagtgcttataaaggaacccgccagtcgatgccagaagagctgatagaacaggtggatattttaaaagatgtgataaatgcatttaacataaagaccatcgagatagagggatttgaagcagatgatatcattggtacagtatcaaaaattgcttccgaaagtgggatggatgtgcttatcgtcacaggcgacagagatgcgcttcagcttgtgtcggcaaatgtaaaagtaaaaatatgtaaaaaaggcataacgcagatggatgagtacgatgaaaaggcggtctttgaaaagtatgaagtgacgccgcttcaattcatagacttgaaagggcttatgggagacaaatcagacaacattccaggagtgcccaatataggggagaagacggccataaagcttgttaaagaatttggatcaattgaaaatttactgatgaatacagataagttaaaagggaaaataaaagaaaatgtagaaaacaatgcagaattagctgttttaagcaaacggcttgctacgattgagagaaatgttcctattgatattgatttgaatgaatacgcggttaaaaattacgatgtcaataagcttacagagctatttgaaaaattggaattttcaagcctcatctcagatttaaaagatgatagtcgtgatacaaaggatattaaagaatggcctgtaagagattttacatacgttaaaaatgttttaggaaagtttgatgttttgtcattgtatccattcatatatgatggaaagataaaagcagtatcatttgcttgcggtgacggatcgttttttgtagagattgatgattatgacaattttaaattgcttaataatgataagcttacgttgataggacacgatctgaaagattttttagtaaacatttcatactgcggtattgaacttaattgtaagattttagatacggccataatgacttatcttttaaatccgtctgagtcgaattacgacataagtcgcgtattgaaaaaatacttgaaagaggatttgcaaaacatagatgatatagtaggcaagggcaggaataaaaagagctacgatgacattgacaaaaagcttttagtcgattatatgtgttcagccgcatcaaacttatctaagttaaaagataagctcatgtcatttataaaagagatggagatggaagatcttttaaaaaatgtggaaattccgcttattgaagtgctaaaatctatggaggtgtacggctttacattagataaagatgtacttagaagtatttctaaagaaatagatgaaaagacagataagattgtaaaagatatttacgatgctgctggatacgaatttaatattaactctacaaagcagttatcagaatttttgtttgataaactgaatttgccagcaataaaaaagactaaaacagggtattcgactgacatggaagtccttgcagaacttataccgtacaatgacatagtaggagaaataatagaatatagacagcttatgaagcttaaatctacgtacatagatggcttcattcccatcatggatgaaaataatagggtccactctacgtttaaacaaacagttgctgctacagggagaattagctcaacagagcctaatctgcagaacatacctgtaagagaagaatttggcaggaggataagaaaggcatttgtatcaagttatgaagatgggcttataatatctgctgattattctcagattgagctaagggttcttgcacatctttcagaggatgaaaaacttattgagtcatttttgaacaacgaagatatacatttaaggacggcatcggaggtttttaaggtttcgaaagaagaagtgacaagtgaaatgagaaggcgggcgaaagctgtcaactttggtattgtatatggtataagcgattacggcttatctaaagacttaaagatttcgcgaaaagaagcgaaagaatacatagacaattattttgacaggtacaagggcgtcaaaaattacatcgactcaattgtcaaatttgcaaaggaaaatgggtatgttacgactatcttaaataggagaagatacataccggaaatcaattcaaaatcttttaaccaaagatcttttggcgagagaatggcaatgaatacacctattcaaggtagcgctgcggatataataaagatgtcgatggttaaagtatacaatgaattaaaggaaagaggattgaaatcaagacttattcttcaggtgcacgatgagcttataattgacacacatcctgatgaagttgaaatagtcaaggagcttctaaaatcaataatggaaaatatcataaagttgaaagttcctttagttgtagatatagggcaagggaaaaactggtatgatgcaaaataaaaggatcc

SEQ ID NO: 755 - DNA, 2678 bp, Artificial Sequence
  Description of Artificial Sequence: Synthetic Clostridium thermosulfurogenes DNA Polymerase N793T
atgaaatacctgctgccgaccgctgctgctggtctgctgctcctcgctgcccagccggcgatggccatggcgaaatttttgatcatagatggtaatagcttgatgtacagggcgtattttgccctgcctgatttgatgaacagcgaaggaatgcatacaaatgccatatacggtttttcaatgatgcttcttaaattgctggaggaggagaaaccagactacatagcaatagctttcgataaaaaggcttctacatttaggcacaaggagtacagtgcttataaaggaacccgccagtcgatgccagaagagctgatagaacaggtggatattttaaaagatgtgataaatgcatttaacataaagaccatcgagatagagggatttgaagcagatgatatcattggtacagtatcaaaaattgcttccgaaagtgggatggatgtgcttatcgtcacaggcgacagagatgcgcttcagcttgtgtcggcaaatgtaaaagtaaaaatatgtaaaaaaggcataacgcagatggatgagtacgatgaaaaggcggtctttgaaaagtatgaagtgacgccgcttcaattcatagacttgaaagggcttatgggagacaaatcagacaacattccaggagtgcccaatataggggagaagacggccataaagcttgttaaagaatttggatcaattgaaaatttactgatgaatacagataagttaaaagggaaaataaaagaaaatgtagaaaacaatgcagaattagctgttttaagcaaacggcttgctacgattgagagaaatgttcctattgatattgatttgaatgaatacgcggttaaaaattacgatgtcaataagcttacagagctatttgaaaaattggaattttcaagcctcatctcagatttaaaagatgatagtcgtgatacaaaggatattaaagaatggcctgtaagagattttacatacgttaaaaatgttttaggaaagtttgatgttttgtcattgtatccattcatatatgatggaaagataaaagcagtatcatttgcttgcggtgacggatcgttttttgtagagattgatgattatgacaattttaaattgcttaataatgataagcttacgttgataggacacgatctgaaagattttttagtaaacatttcatactgcggtattgaacttaattgtaagattttagatacggccataatgacttatcttttaaatccgtctgagtcgaattacgacataagtcgcgtattgaaaaaatacttgaaagaggatttgcaaaacatagatgatatagtaggcaagggcaggaataaaaagagctacgatgacattgacaaaaagcttttagtcgattatatgtgttcagccgcatcaaacttatctaagttaaaagataagctcatgtcatttataaaagagatggagatggaagatcttttaaaaaatgtggaaattccgcttattgaagtgctaaaatctatggaggtgtacggctttacattagataaagatgtacttagaagtatttctaaagaaatagatgaaaagacagataagattgtaaaagatatttacgatgctgctggatacgaatttaatattaactctacaaagcagttatcagaatttttgtttgataaactgaatttgccagcaataaaaaagactaaaacagggtattcgactgacatggaagtccttgcagaacttataccgtacaatgacatagtaggagaaataatagaatatagacagcttatgaagcttaaatctacgtacatagatggcttcattcccatcatggatgaaaataatagggtccactctacgtttaaacaaacagttgctgctacagggagaattagctcaacagagcctaatctgcagaacatacctgtaagagaagaatttggcaggaggataagaaaggcatttgtatcaagttatgaagatgggcttataatatctgctgattattctcagattgagctaagggttcttgcacatctttcagaggatgaaaaacttattgagtcatttttgaacaacgaagatatacatttaaggacggcatcggaggtttttaaggtttcgaaagaagaagtgacaagtgaaatgagaaggcgggcgaaagctgtcaactttggtattgtatatggtataagcgattacggcttatctaaagacttaaagatttcgcgaaaagaagcgaaagaatacatagacaattattttgacaggtacaagggcgtcaaaaattacatcgactcaattgtcaaatttgcaaaggaaaatgggtatgttacgactatcttaaataggagaagatacataccggaaatcaattcaaaaacttttaaccaaagatcttttggcgagagaatggcaatgaatacacctattcaaggtagcgctgcggatataataaagatgtcgatggttaaagtatacaatgaattaaaggaaagaggattgaaatcaagacttattcttcaggtgcacgatgagcttataattgacacacatcctgatgaagttgaaatagtcaaggagcttctaaaatcaataatggaaaatatcataaagttgaaagttcctttagttgtagatatagggcaagggaaaaactggtatgatgcaaaataaaaggatcc

SEQ ID NO: 756 - DNA, 2678 bp, Artificial Sequence
  Description of Artificial Sequence: Synthetic Clostridium thermosulfurogenes DNA Polymerase N793W
atgaaatacctgctgccgaccgctgctgctggtctgctgctcctcgctgcccagccggcgatggccatggcgaaatttttgatcatagatggtaatagcttgatgtacagggcgtattttgccctgcctgatttgatgaacagcgaaggaatgcatacaaatgccatatacggtttttcaatgatgcttcttaaattgctggaggaggagaaaccagactacatagcaatagctttcgataaaaaggcttctacatttaggcacaaggagtacagtgcttataaaggaacccgccagtcgatgccagaagagctgatagaacaggtggatattttaaaagatgtgataaatgcatttaacataaagaccatcgagatagagggatttgaagcagatgatatcattggtacagtatcaaaaattgcttccgaaagtgggatggatgtgcttatcgtcacaggcgacagagatgcgcttcagcttgtgtcggcaaatgtaaaagtaaaaatatgtaaaaaaggcataacgcagatggatgagtacgatgaaaaggcggtctttgaaaagtatgaagtgacgccgcttcaattcatagacttgaaagggcttatgggagacaaatcagacaacattccaggagtgcccaatataggggagaagacggccataaagcttgttaaagaatttggatcaattgaaaatttactgatgaatacagataagttaaaagggaaaataaaagaaaatgtagaaaacaatgcagaattagctgttttaagcaaacggcttgctacgattgagagaaatgttcctattgatattgatttgaatgaatacgcggttaaaaattacgatgtcaataagcttacagagctatttgaaaaattggaattttcaagcctcatctcagatttaaaagatgatagtcgtgatacaaaggatattaaagaatggcctgtaagagattttacatacgttaaaaatgttttaggaaagtttgatgttttgtcattgtatccattcatatatgatggaaagataaaagcagtatcatttgcttgcggtgacggatcgttttttgtagagattgatgattatgacaattttaaattgcttaataatgataagcttacgttgataggacacgatctgaaagattttttagtaaacatttcatactgcggtattgaacttaattgtaagattttagatacggccataatgacttatcttttaaatccgtctgagtcgaattacgacataagtcgcgtattgaaaaaatacttgaaagaggatttgcaaaacatagatgatatagtaggcaagggcaggaataaaaagagctacgatgacattgacaaaaagcttttagtcgattatatgtgttcagccgcatcaaacttatctaagttaaaagataagctcatgtcatttataaaagagatggagatggaagatcttttaaaaaatgtggaaattccgcttattgaagtgctaaaatctatggaggtgtacggctttacattagataaagatgtacttagaagtatttctaaagaaatagatgaaaagacagataagattgtaaaagatatttacgatgctgctggatacgaatttaatattaactctacaaagcagttatcagaatttttgtttgataaactgaatttgccagcaataaaaaagactaaaacagggtattcgactgacatggaagtccttgcagaacttataccgtacaatgacatagtaggagaaataatagaatatagacagcttatgaagcttaaatctacgtacatagatggcttcattcccatcatggatgaaaataatagggtccactctacgtttaaacaaacagttgctgctacagggagaattagctcaacagagcctaatctgcagaacatacctgtaagagaagaatttggcaggaggataagaaaggcatttgtatcaagttatgaagatgggcttataatatctgctgattattctcagattgagctaagggttcttgcacatctttcagaggatgaaaaacttattgagtcatttttgaacaacgaagatatacatttaaggacggcatcggaggtttttaaggtttcgaaagaagaagtgacaagtgaaatgagaaggcgggcgaaagctgtcaactttggtattgtatatggtataagcgattacggcttatctaaagacttaaagatttcgcgaaaagaagcgaaagaatacatagacaattattttgacaggtacaagggcgtcaaaaattacatcgactcaattgtcaaatttgcaaaggaaaatgggtatgttacgactatcttaaataggagaagatacataccggaaatcaattcaaaatggtttaaccaaagatcttttggcgagagaatggcaatgaatacacctattcaaggtagcgctgcggatataataaagatgtcgatggttaaagtatacaatgaattaaaggaaagaggattgaaatcaagacttattcttcaggtgcacgatgagcttataattgacacacatcctgatgaagttgaaatagtcaaggagcttctaaaatcaataatggaaaatatcataaagttgaaagttcctttagttgtagatatagggcaagggaaaaactggtatgatgcaaaataaaaggatcc

SEQ ID NO: 757 - DNA, 2678 bp, Artificial Sequence
  Description of Artificial Sequence: Synthetic Clostridium thermosulfurogenes DNA Polymerase N793Y
atgaaatacctgctgccgaccgctgctgctggtctgctgctcctcgctgcccagccggcgatggccatggcgaaatttttgatcatagatggtaatagcttgatgtacagggcgtattttgccctgcctgatttgatgaacagcgaaggaatgcatacaaatgccatatacggtttttcaatgatgcttcttaaattgctggaggaggagaaaccagactacatagcaatagctttcgataaaaaggcttctacatttaggcacaaggagtacagtgcttataaaggaacccgccagtcgatgccagaagagctgatagaacaggtggatattttaaaagatgtgataaatgcatttaacataaagaccatcgagatagagggatttgaagcagatgatatcattggtacagtatcaaaaattgcttccgaaagtgggatggatgtgcttatcgtcacaggcgacagagatgcgcttcagcttgtgtcggcaaatgtaaaagtaaaaatatgtaaaaaaggcataacgcagatggatgagtacgatgaaaaggcggtctttgaaaagtatgaagtgacgccgcttcaattcatagacttgaaagggcttatgggagacaaatcagacaacattccaggagtgcccaatataggggagaagacggccataaagcttgttaaagaatttggatcaattgaaaatttactgatgaatacagataagttaaaagggaaaataaaagaaaatgtagaaaacaatgcagaattagctgttttaagcaaacggcttgctacgattgagagaaatgttcctattgatattgatttgaatgaatacgcggttaaaaattacgatgtcaataagcttacagagctatttgaaaaattggaattttcaagcctcatctcagatttaaaagatgatagtcgtgatacaaaggatattaaagaatggcctgtaagagattttacatacgttaaaaatgttttaggaaagtttgatgttttgtcattgtatccattcatatatgatggaaagataaaagcagtatcatttgcttgcggtgacggatcgttttttgtagagattgatgattatgacaattttaaattgcttaataatgataagcttacgttgataggacacgatctgaaagattttttagtaaacatttcatactgcggtattgaacttaattgtaagattttagatacggccataatgacttatcttttaaatccgtctgagtcgaattacgacataagtcgcgtattgaaaaaatacttgaaagaggatttgcaaaacatagatgatatagtaggcaagggcaggaataaaaagagctacgatgacattgacaaaaagcttttagtcgattatatgtgttcagccgcatcaaacttatctaagttaaaagataagctcatgtcatttataaaagagatggagatggaagatcttttaaaaaatgtggaaattccgcttattgaagtgctaaaatctatggaggtgtacggctttacattagataaagatgtacttagaagtatttctaaagaaatagatgaaaagacagataagattgtaaaagatatttacgatgctgctggatacgaatttaatattaactctacaaagcagttatcagaatttttgtttgataaactgaatttgccagcaataaaaaagactaaaacagggtattcgactgacatggaagtccttgcagaacttataccgtacaatgacatagtaggagaaataatagaatatagacagcttatgaagcttaaatctacgtacatagatggcttcattcccatcatggatgaaaataatagggtccactctacgtttaaacaaacagttgctgctacagggagaattagctcaacagagcctaatctgcagaacatacctgtaagagaagaatttggcaggaggataagaaaggcatttgtatcaagttatgaagatgggcttataatatctgctgattattctcagattgagctaagggttcttgcacatctttcagaggatgaaaaacttattgagtcatttttgaacaacgaagatatacatttaaggacggcatcggaggtttttaaggtttcgaaagaagaagtgacaagtgaaatgagaaggcgggcgaaagctgtcaactttggtattgtatatggtataagcgattacggcttatctaaagacttaaagatttcgcgaaaagaagcgaaagaatacatagacaattattttgacaggtacaagggcgtcaaaaattacatcgactcaattgtcaaatttgcaaaggaaaatgggtatgttacgactatcttaaataggagaagatacataccggaaatcaattcaaaatattttaaccaaagatcttttggcgagagaatggcaatgaatacacctattcaaggtagcgctgcggatataataaagatgtcgatggttaaagtatacaatgaattaaaggaaagaggattgaaatcaagacttattcttcaggtgcacgatgagcttataattgacacacatcctgatgaagttgaaatagtcaaggagcttctaaaatcaataatggaaaatatcataaagttgaaagttcctttagttgtagatatagggcaagggaaaaactggtatgatgcaaaataaaaggatcc

SEQ ID NO: 758 - DNA, 2678 bp, Artificial Sequence
  Description of Artificial Sequence: Synthetic Clostridium thermosulfurogenes DNA Polymerase N793V
atgaaatacctgctgccgaccgctgctgctggtctgctgctcctcgctgcccagccggcgatggccatggcgaaatttttgatcatagatggtaatagcttgatgtacagggcgtattttgccctgcctgatttgatgaacagcgaaggaatgcatacaaatgccatatacggtttttcaatgatgcttcttaaattgctggaggaggagaaaccagactacatagcaatagctttcgataaaaaggcttctacatttaggcacaaggagtacagtgcttataaaggaacccgccagtcgatgccagaagagctgatagaacaggtggatattttaaaagatgtgataaatgcatttaacataaagaccatcgagatagagggatttgaagcagatgatatcattggtacagtatcaaaaattgcttccgaaagtgggatggatgtgcttatcgtcacaggcgacagagatgcgcttcagcttgtgtcggcaaatgtaaaagtaaaaatatgtaaaaaaggcataacgcagatggatgagtacgatgaaaaggcggtctttgaaaagtatgaagtgacgccgcttcaattcatagacttgaaagggcttatgggagacaaatcagacaacattccaggagtgcccaatataggggagaagacggccataaagcttgttaaagaatttggatcaattgaaaatttactgatgaatacagataagttaaaagggaaaataaaagaaaatgtagaaaacaatgcagaattagctgttttaagcaaacggcttgctacgattgagagaaatgttcctattgatattgatttgaatgaatacgcggttaaaaattacgatgtcaataagcttacagagctatttgaaaaattggaattttcaagcctcatctcagatttaaaagatgatagtcgtgatacaaaggatattaaagaatggcctgtaagagattttacatacgttaaaaatgttttaggaaagtttgatgttttgtcattgtatccattcatatatgatggaaagataaaagcagtatcatttgcttgcggtgacggatcgttttttgtagagattgatgattatgacaattttaaattgcttaataatgataagcttacgttgataggacacgatctgaaagattttttagtaaacatttcatactgcggtattgaacttaattgtaagattttagatacggccataatgacttatcttttaaatccgtctgagtcgaattacgacataagtcgcgtattgaaaaaatacttgaaagaggatttgcaaaacatagatgatatagtaggcaagggcaggaataaaaagagctacgatgacattgacaaaaagcttttagtcgattatatgtgttcagccgcatcaaacttatctaagttaaaagataagctcatgtcatttataaaagagatggagatggaagatcttttaaaaaatgtggaaattccgcttattgaagtgctaaaatctatggaggtgtacggctttacattagataaagatgtacttagaagtatttctaaagaaatagatgaaaagacagataagattgtaaaagatatttacgatgctgctggatacgaatttaatattaactctacaaagcagttatcagaatttttgtttgataaactgaatttgccagcaataaaaaagactaaaacagggtattcgactgacatggaagtccttgcagaacttataccgtacaatgacatagtaggagaaataatagaatatagacagcttatgaagcttaaatctacgtacatagatggcttcattcccatcatggatgaaaataatagggtccactctacgtttaaacaaacagttgctgctacagggagaattagctcaacagagcctaatctgcagaacatacctgtaagagaagaatttggcaggaggataagaaaggcatttgtatcaagttatgaagatgggcttataatatctgctgattattctcagattgagctaagggttcttgcacatctttcagaggatgaaaaacttattgagtcatttttgaacaacgaagatatacatttaaggacggcatcggaggtttttaaggtttcgaaagaagaagtgacaagtgaaatgagaaggcgggcgaaagctgtcaactttggtattgtatatggtataagcgattacggcttatctaaagacttaaagatttcgcgaaaagaagcgaaagaatacatagacaattattttgacaggtacaagggcgtcaaaaattacatcgactcaattgtcaaatttgcaaaggaaaatgggtatgttacgactatcttaaataggagaagatacataccggaaatcaattcaaaagtttttaaccaaagatcttttggcgagagaatggcaatgaatacacctattcaaggtagcgctgcggatataataaagatgtcgatggttaaagtatacaatgaattaaaggaaagaggattgaaatcaagacttattcttcaggtgcacgatgagcttataattgacacacatcctgatgaagttgaaatagtcaaggagcttctaaaatcaataatggaaaatatcataaagttgaaagttcctttagttgtagatatagggcaagggaaaaactggtatgatgcaaaataaaaggatcc

SEQ ID NO: 759 - DNA, 2678 bp, Artificial Sequence
  Description of Artificial Sequence: Synthetic Clostridium thermosulfurogenes DNA Polymerase F794A
atgaaatacctgctgccgaccgctgctgctggtctgctgctcctcgctgcccagccggcgatggccatggcgaaatttttgatcatagatggtaatagcttgatgtacagggcgtattttgccctgcctgatttgatgaacagcgaaggaatgcatacaaatgccatatacggtttttcaatgatgcttcttaaattgctggaggaggagaaaccagactacatagcaatagctttcgataaaaaggcttctacatttaggcacaaggagtacagtgcttataaaggaacccgccagtcgatgccagaagagctgatagaacaggtggatattttaaaagatgtgataaatgcatttaacataaagaccatcgagatagagggatttgaagcagatgatatcattggtacagtatcaaaaattgcttccgaaagtgggatggatgtgcttatcgtcacaggcgacagagatgcgcttcagcttgtgtcggcaaatgtaaaagtaaaaatatgtaaaaaaggcataacgcagatggatgagtacgatgaaaaggcggtctttgaaaagtatgaagtgacgccgcttcaattcatagacttgaaagggcttatgggagacaaatcagacaacattccaggagtgcccaatataggggagaagacggccataaagcttgttaaagaatttggatcaattgaaaatttactgatgaatacagataagttaaaagggaaaataaaagaaaatgtagaaaacaatgcagaattagctgttttaagcaaacggcttgctacgattgagagaaatgttcctattgatattgatttgaatgaatacgcggttaaaaattacgatgtcaataagcttacagagctatttgaaaaattggaattttcaagcctcatctcagatttaaaagatgatagtcgtgatacaaaggatattaaagaatggcctgtaagagattttacatacgttaaaaatgttttaggaaagtttgatgttttgtcattgtatccattcatatatgatggaaagataaaagcagtatcatttgcttgcggtgacggatcgttttttgtagagattgatgattatgacaattttaaattgcttaataatgataagcttacgttgataggacacgatctgaaagattttttagtaaacatttcatactgcggtattgaacttaattgtaagattttagatacggccataatgacttatcttttaaatccgtctgagtcgaattacgacataagtcgcgtattgaaaaaatacttgaaagaggatttgcaaaacatagatgatatagtaggcaagggcaggaataaaaagagctacgatgacattgacaaaaagcttttagtcgattatatgtgttcagccgcatcaaacttatctaagttaaaagataagctcatgtcatttataaaagagatggagatggaagatcttttaaaaaatgtggaaattccgcttattgaagtgctaaaatctatggaggtgtacggctttacattagataaagatgtacttagaagtatttctaaagaaatagatgaaaagacagataagattgtaaaagatatttacgatgctgctggatacgaatttaatattaactctacaaagcagttatcagaatttttgtttgataaactgaatttgccagcaataaaaaagactaaaacagggtattcgactgacatggaagtccttgcagaacttataccgtacaatgacatagtaggagaaataatagaatatagacagcttatgaagcttaaatctacgtacatagatggcttcattcccatcatggatgaaaataatagggtccactctacgtttaaacaaacagttgctgctacagggagaattagctcaacagagcctaatctgcagaacatacctgtaagagaagaatttggcaggaggataagaaaggcatttgtatcaagttatgaagatgggcttataatatctgctgattattctcagattgagctaagggttcttgcacatctttcagaggatgaaaaacttattgagtcatttttgaacaacgaagatatacatttaaggacggcatcggaggtttttaaggtttcgaaagaagaagtgacaagtgaaatgagaaggcgggcgaaagctgtcaactttggtattgtatatggtataagcgattacggcttatctaaagacttaaagatttcgcgaaaagaagcgaaagaatacatagacaattattttgacaggtacaagggcgtcaaaaattacatcgactcaattgtcaaatttgcaaaggaaaatgggtatgttacgactatcttaaataggagaagatacataccggaaatcaattcaaaaaatgctaaccaaagatcttttggcgagagaatggcaatgaatacacctattcaaggtagcgctgcggatataataaagatgtcgatggttaaagtatacaatgaattaaaggaaagaggattgaaatcaagacttattcttcaggtgcacgatgagcttataattgacacacatcctgatgaagttgaaatagtcaaggagcttctaaaatcaataatggaaaatatcataaagttgaaagttcctttagttgtagatatagggcaagggaaaaactggtatgatgcaaaataaaaggatcc

SEQ ID NO: 760 - DNA, 2678 bp, Artificial Sequence
  Description of Artificial Sequence: Synthetic Clostridium thermosulfurogenes DNA Polymerase F794R
atgaaatacctgctgccgaccgctgctgctggtctgctgctcctcgctgcccagccggcgatggccatggcgaaatttttgatcatagatggtaatagcttgatgtacagggcgtattttgccctgcctgatttgatgaacagcgaaggaatgcatacaaatgccatatacggtttttcaatgatgcttcttaaattgctggaggaggagaaaccagactacatagcaatagctttcgataaaaaggcttctacatttaggcacaaggagtacagtgcttataaaggaacccgccagtcgatgccagaagagctgatagaacaggtggatattttaaaagatgtgataaatgcatttaacataaagaccatcgagatagagggatttgaagcagatgatatcattggtacagtatcaaaaattgcttccgaaagtgggatggatgtgcttatcgtcacaggcgacagagatgcgcttcagcttgtgtcggcaaatgtaaaagtaaaaatatgtaaaaaaggcataacgcagatggatgagtacgatgaaaaggcggtctttgaaaagtatgaagtgacgccgcttcaattcatagacttgaaagggcttatgggagacaaatcagacaacattccaggagtgcccaatataggggagaagacggccataaagcttgttaaagaatttggatcaattgaaaatttactgatgaatacagataagttaaaagggaaaataaaagaaaatgtagaaaacaatgcagaattagctgttttaagcaaacggcttgctacgattgagagaaatgttcctattgatattgatttgaatgaatacgcggttaaaaattacgatgtcaataagcttacagagctatttgaaaaattggaattttcaagcctcatctcagatttaaaagatgatagtcgtgatacaaaggatattaaagaatggcctgtaagagattttacatacgttaaaaatgttttaggaaagtttgatgttttgtcattgtatccattcatatatgatggaaagataaaagcagtatcatttgcttgcggtgacggatcgttttttgtagagattgatgattatgacaattttaaattgcttaataatgataagcttacgttgataggacacgatctgaaagattttttagtaaacatttcatactgcggtattgaacttaattgtaagattttagatacggccataatgacttatcttttaaatccgtctgagtcgaattacgacataagtcgcgtattgaaaaaatacttgaaagaggatttgcaaaacatagatgatatagtaggcaagggcaggaataaaaagagctacgatgacattgacaaaaagcttttagtcgattatatgtgttcagccgcatcaaacttatctaagttaaaagataagctcatgtcatttataaaagagatggagatggaagatcttttaaaaaatgtggaaattccgcttattgaagtgctaaaatctatggaggtgtacggctttacattagataaagatgtacttagaagtatttctaaagaaatagatgaaaagacagataagattgtaaaagatatttacgatgctgctggatacgaatttaatattaactctacaaagcagttatcagaatttttgtttgataaactgaatttgccagcaataaaaaagactaaaacagggtattcgactgacatggaagtccttgcagaacttataccgtacaatgacatagtaggagaaataatagaatatagacagcttatgaagcttaaatctacgtacatagatggcttcattcccatcatggatgaaaataatagggtccactctacgtttaaacaaacagttgctgctacagggagaattagctcaacagagcctaatctgcagaacatacctgtaagagaagaatttggcaggaggataagaaaggcatttgtatcaagttatgaagatgggcttataatatctgctgattattctcagattgagctaagggttcttgcacatctttcagaggatgaaaaacttattgagtcatttttgaacaacgaagatatacatttaaggacggcatcggaggtttttaaggtttcgaaagaagaagtgacaagtgaaatgagaaggcgggcgaaagctgtcaactttggtattgtatatggtataagcgattacggcttatctaaagacttaaagatttcgcgaaaagaagcgaaagaatacatagacaattattttgacaggtacaagggcgtcaaaaattacatcgactcaattgtcaaatttgcaaaggaaaatgggtatgttacgactatcttaaataggagaagatacataccggaaatcaattcaaaaaatcgtaaccaaagatcttttggcgagagaatggcaatgaatacacctattcaaggtagcgctgcggatataataaagatgtcgatggttaaagtatacaatgaattaaaggaaagaggattgaaatcaagacttattcttcaggtgcacgatgagcttataattgacacacatcctgatgaagttgaaatagtcaaggagcttctaaaatcaataatggaaaatatcataaagttgaaagttcctttagttgtagatatagggcaagggaaaaactggtatgatgcaaaataaaaggatcc

SEQ ID NO: 761 - DNA, 2678 bp, Artificial Sequence
  Description of Artificial Sequence: Synthetic Clostridium thermosulfurogenes DNA Polymerase F794N
atgaaatacctgctgccgaccgctgctgctggtctgctgctcctcgctgcccagccggcgatggccatggcgaaatttttgatcatagatggtaatagcttgatgtacagggcgtattttgccctgcctgatttgatgaacagcgaaggaatgcatacaaatgccatatacggtttttcaatgatgcttcttaaattgctggaggaggagaaaccagactacatagcaatagctttcgataaaaaggcttctacatttaggcacaaggagtacagtgcttataaaggaacccgccagtcgatgccagaagagctgatagaacaggtggatattttaaaagatgtgataaatgcatttaacataaagaccatcgagatagagggatttgaagcagatgatatcattggtacagtatcaaaaattgcttccgaaagtgggatggatgtgcttatcgtcacaggcgacagagatgcgcttcagcttgtgtcggcaaatgtaaaagtaaaaatatgtaaaaaaggcataacgcagatggatgagtacgatgaaaaggcggtctttgaaaagtatgaagtgacgccgcttcaattcatagacttgaaagggcttatgggagacaaatcagacaacattccaggagtgcccaatataggggagaagacggccataaagcttgttaaagaatttggatcaattgaaaatttactgatgaatacagataagttaaaagggaaaataaaagaaaatgtagaaaacaatgcagaattagctgttttaagcaaacggcttgctacgattgagagaaatgttcctattgatattgatttgaatgaatacgcggttaaaaattacgatgtcaataagcttacagagctatttgaaaaattggaattttcaagcctcatctcagatttaaaagatgatagtcgtgatacaaaggatattaaagaatggcctgtaagagattttacatacgttaaaaatgttttaggaaagtttgatgttttgtcattgtatccattcatatatgatggaaagataaaagcagtatcatttgcttgcggtgacggatcgttttttgtagagattgatgattatgacaattttaaattgcttaataatgataagcttacgttgataggacacgatctgaaagattttttagtaaacatttcatactgcggtattgaacttaattgtaagattttagatacggccataatgacttatcttttaaatccgtctgagtcgaattacgacataagtcgcgtattgaaaaaatacttgaaagaggatttgcaaaacatagatgatatagtaggcaagggcaggaataaaaagagctacgatgacattgacaaaaagcttttagtcgattatatgtgttcagccgcatcaaacttatctaagttaaaagataagctcatgtcatttataaaagagatggagatggaagatcttttaaaaaatgtggaaattccgcttattgaagtgctaaaatctatggaggtgtacggctttacattagataaagatgtacttagaagtatttctaaagaaatagatgaaaagacagataagattgtaaaagatatttacgatgctgctggatacgaatttaatattaactctacaaagcagttatcagaatttttgtttgataaactgaatttgccagcaataaaaaagactaaaacagggtattcgactgacatggaagtccttgcagaacttataccgtacaatgacatagtaggagaaataatagaatatagacagcttatgaagcttaaatctacgtacatagatggcttcattcccatcatggatgaaaataatagggtccactctacgtttaaacaaacagttgctgctacagggagaattagctcaacagagcctaatctgcagaacatacctgtaagagaagaatttggcaggaggataagaaaggcatttgtatcaagttatgaagatgggcttataatatctgctgattattctcagattgagctaagggttcttgcacatctttcagaggatgaaaaacttattgagtcatttttgaacaacgaagatatacatttaaggacggcatcggaggtttttaaggtttcgaaagaagaagtgacaagtgaaatgagaaggcgggcgaaagctgtcaactttggtattgtatatggtataagcgattacggcttatctaaagacttaaagatttcgcgaaaagaagcgaaagaatacatagacaattattttgacaggtacaagggcgtcaaaaattacatcgactcaattgtcaaatttgcaaaggaaaatgggtatgttacgactatcttaaataggagaagatacataccggaaatcaattcaaaaaataataaccaaagatcttttggcgagagaatggcaatgaatacacctattcaaggtagcgctgcggatataataaagatgtcgatggttaaagtatacaatgaattaaaggaaagaggattgaaatcaagacttattcttcaggtgcacgatgagcttataattgacacacatcctgatgaagttgaaatagtcaaggagcttctaaaatcaataatggaaaatatcataaagttgaaagttcctttagttgtagatatagggcaagggaaaaactggtatgatgcaaaataaaaggatcc

SEQ ID NO: 762 - DNA, 2678 bp, Artificial Sequence
  Description of Artificial Sequence: Synthetic Clostridium thermosulfurogenes DNA Polymerase F794D
atgaaatacctgctgccgaccgctgctgctggtctgctgctcctcgctgcccagccggcgatggccatggcgaaatttttgatcatagatggtaatagcttgatgtacagggcgtattttgccctgcctgatttgatgaacagcgaaggaatgcatacaaatgccatatacggtttttcaatgatgcttcttaaattgctggaggaggagaaaccagactacatagcaatagctttcgataaaaaggcttctacatttaggcacaaggagtacagtgcttataaaggaacccgccagtcgatgccagaagagctgatagaacaggtggatattttaaaagatgtgataaatgcatttaacataaagaccatcgagatagagggatttgaagcagatgatatcattggtacagtatcaaaaattgcttccgaaagtgggatggatgtgcttatcgtcacaggcgacagagatgcgcttcagcttgtgtcggcaaatgtaaaagtaaaaatatgtaaaaaaggcataacgcagatggatgagtacgatgaaaaggcggtctttgaaaagtatgaagtgacgccgcttcaattcatagacttgaaagggcttatgggagacaaatcagacaacattccaggagtgcccaatataggggagaagacggccataaagcttgttaaagaatttggatcaattgaaaatttactgatgaatacagataagttaaaagggaaaataaaagaaaatgtagaaaacaatgcagaattagctgttttaagcaaacggcttgctacgattgagagaaatgttcctattgatattgatttgaatgaatacgcggttaaaaattacgatgtcaataagcttacagagctatttgaaaaattggaattttcaagcctcatctcagatttaaaagatgatagtcgtgatacaaaggatattaaagaatggcctgtaagagattttacatacgttaaaaatgttttaggaaagtttgatgttttgtcattgtatccattcatatatgatggaaagataaaagcagtatcatttgcttgcggtgacggatcgttttttgtagagattgatgattatgacaattttaaattgcttaataatgataagcttacgttgataggacacgatctgaaagattttttagtaaacatttcatactgcggtattgaacttaattgtaagattttagatacggccataatgacttatcttttaaatccgtctgagtcgaattacgacataagtcgcgtattgaaaaaatacttgaaagaggatttgcaaaacatagatgatatagtaggcaagggcaggaataaaaagagctacgatgacattgacaaaaagcttttagtcgattatatgtgttcagccgcatcaaacttatctaagttaaaagataagctcatgtcatttataaaagagatggagatggaagatcttttaaaaaatgtggaaattccgcttattgaagtgctaaaatctatggaggtgtacggctttacattagataaagatgtacttagaagtatttctaaagaaatagatgaaaagacagataagattgtaaaagatatttacgatgctgctggatacgaatttaatattaactctacaaagcagttatcagaatttttgtttgataaactgaatttgccagcaataaaaaagactaaaacagggtattcgactgacatggaagtccttgcagaacttataccgtacaatgacatagtaggagaaataatagaatatagacagcttatgaagcttaaatctacgtacatagatggcttcattcccatcatggatgaaaataatagggtccactctacgtttaaacaaacagttgctgctacagggagaattagctcaacagagcctaatctgcagaacatacctgtaagagaagaatttggcaggaggataagaaaggcatttgtatcaagttatgaagatgggcttataatatctgctgattattctcagattgagctaagggttcttgcacatctttcagaggatgaaaaacttattgagtcatttttgaacaacgaagatatacatttaaggacggcatcggaggtttttaaggtttcgaaagaagaagtgacaagtgaaatgagaaggcgggcgaaagctgtcaactttggtattgtatatggtataagcgattacggcttatctaaagacttaaagatttcgcgaaaagaagcgaaagaatacatagacaattattttgacaggtacaagggcgtcaaaaattacatcgactcaattgtcaaatttgcaaaggaaaatgggtatgttacgactatcttaaataggagaagatacataccggaaatcaattcaaaaaatgataaccaaagatcttttggcgagagaatggcaatgaatacacctattcaaggtagcgctgcggatataataaagatgtcgatggttaaagtatacaatgaattaaaggaaagaggattgaaatcaagacttattcttcaggtgcacgatgagcttataattgacacacatcctgatgaagttgaaatagtcaaggagcttctaaaatcaataatggaaaatatcataaagttgaaagttcctttagttgtagatatagggcaagggaaaaactggtatgatgcaaaataaaaggatcc

SEQ ID NO: 763 - DNA, 2678 bp, Artificial Sequence
  Description of Artificial Sequence: Synthetic Clostridium thermosulfurogenes DNA Polymerase F794C
atgaaatacctgctgccgaccgctgctgctggtctgctgctcctcgctgcccagccggcgatggccatggcgaaatttttgatcatagatggtaatagcttgatgtacagggcgtattttgccctgcctgatttgatgaacagcgaaggaatgcatacaaatgccatatacggtttttcaatgatgcttcttaaattgctggaggaggagaaaccagactacatagcaatagctttcgataaaaaggcttctacatttaggcacaaggagtacagtgcttataaaggaacccgccagtcgatgccagaagagctgatagaacaggtggatattttaaaagatgtgataaatgcatttaacataaagaccatcgagatagagggatttgaagcagatgatatcattggtacagtatcaaaaattgcttccgaaagtgggatggatgtgcttatcgtcacaggcgacagagatgcgcttcagcttgtgtcggcaaatgtaaaagtaaaaatatgtaaaaaaggcataacgcagatggatgagtacgatgaaaaggcggtctttgaaaagtatgaagtgacgccgcttcaattcatagacttgaaagggcttatgggagacaaatcagacaacattccaggagtgcccaatataggggagaagacggccataaagcttgttaaagaatttggatcaattgaaaatttactgatgaatacagataagttaaaagggaaaataaaagaaaatgtagaaaacaatgcagaattagctgttttaagcaaacggcttgctacgattgagagaaatgttcctattgatattgatttgaatgaatacgcggttaaaaattacgatgtcaataagcttacagagctatttgaaaaattggaattttcaagcctcatctcagatttaaaagatgatagtcgtgatacaaaggatattaaagaatggcctgtaagagattttacatacgttaaaaatgttttaggaaagtttgatgttttgtcattgtatccattcatatatgatggaaagataaaagcagtatcatttgcttgcggtgacggatcgttttttgtagagattgatgattatgacaattttaaattgcttaataatgataagcttacgttgataggacacgatctgaaagattttttagtaaacatttcatactgcggtattgaacttaattgtaagattttagatacggccataatgacttatcttttaaatccgtctgagtcgaattacgacataagtcgcgtattgaaaaaatacttgaaagaggatttgcaaaacatagatgatatagtaggcaagggcaggaataaaaagagctacgatgacattgacaaaaagcttttagtcgattatatgtgttcagccgcatcaaacttatctaagttaaaagataagctcatgtcatttataaaagagatggagatggaagatcttttaaaaaatgtggaaattccgcttattgaagtgctaaaatctatggaggtgtacggctttacattagataaagatgtacttagaagtatttctaaagaaatagatgaaaagacagataagattgtaaaagatatttacgatgctgctggatacgaatttaatattaactctacaaagcagttatcagaatttttgtttgataaactgaatttgccagcaataaaaaagactaaaacagggtattcgactgacatggaagtccttgcagaacttataccgtacaatgacatagtaggagaaataatagaatatagacagcttatgaagcttaaatctacgtacatagatggcttcattcccatcatggatgaaaataatagggtccactctacgtttaaacaaacagttgctgctacagggagaattagctcaacagagcctaatctgcagaacatacctgtaagagaagaatttggcaggaggataagaaaggcatttgtatcaagttatgaagatgggcttataatatctgctgattattctcagattgagctaagggttcttgcacatctttcagaggatgaaaaacttattgagtcatttttgaacaacgaagatatacatttaaggacggcatcggaggtttttaaggtttcgaaagaagaagtgacaagtgaaatgagaaggcgggcgaaagctgtcaactttggtattgtatatggtataagcgattacggcttatctaaagacttaaagatttcgcgaaaagaagcgaaagaatacatagacaattattttgacaggtacaagggcgtcaaaaattacatcgactcaattgtcaaatttgcaaaggaaaatgggtatgttacgactatcttaaataggagaagatacataccggaaatcaattcaaaaaattgtaaccaaagatcttttggcgagagaatggcaatgaatacacctattcaaggtagcgctgcggatataataaagatgtcgatggttaaagtatacaatgaattaaaggaaagaggattgaaatcaagacttattcttcaggtgcacgatgagcttataattgacacacatcctgatgaagttgaaatagtcaaggagcttctaaaatcaataatggaaaatatcataaagttgaaagttcctttagttgtagatatagggcaagggaaaaactggtatgatgcaaaataaaaggatcc

SEQ ID NO: 764 - DNA, 2678 bp, Artificial Sequence
  Description of Artificial Sequence: Synthetic Clostridium thermosulfurogenes DNA Polymerase F794E
atgaaatacctgctgccgaccgctgctgctggtctgctgctcctcgctgcccagccggcgatggccatggcgaaatttttgatcatagatggtaatagcttgatgtacagggcgtattttgccctgcctgatttgatgaacagcgaaggaatgcatacaaatgccatatacggtttttcaatgatgcttcttaaattgctggaggaggagaaaccagactacatagcaatagctttcgataaaaaggcttctacatttaggcacaaggagtacagtgcttataaaggaacccgccagtcgatgccagaagagctgatagaacaggtggatattttaaaagatgtgataaatgcatttaacataaagaccatcgagatagagggatttgaagcagatgatatcattggtacagtatcaaaaattgcttccgaaagtgggatggatgtgcttatcgtcacaggcgacagagatgcgcttcagcttgtgtcggcaaatgtaaaagtaaaaatatgtaaaaaaggcataacgcagatggatgagtacgatgaaaaggcggtctttgaaaagtatgaagtgacgccgcttcaattcatagacttgaaagggcttatgggagacaaatcagacaacattccaggagtgcccaatataggggagaagacggccataaagcttgttaaagaatttggatcaattgaaaatttactgatgaatacagataagttaaaagggaaaataaaagaaaatgtagaaaacaatgcagaattagctgttttaagcaaacggcttgctacgattgagagaaatgttcctattgatattgatttgaatgaatacgcggttaaaaattacgatgtcaataagcttacagagctatttgaaaaattggaattttcaagcctcatctcagatttaaaagatgatagtcgtgatacaaaggatattaaagaatggcctgtaagagattttacatacgttaaaaatgttttaggaaagtttgatgttttgtcattgtatccattcatatatgatggaaagataaaagcagtatcatttgcttgcggtgacggatcgttttttgtagagattgatgattatgacaattttaaattgcttaataatgataagcttacgttgataggacacgatctgaaagattttttagtaaacatttcatactgcggtattgaacttaattgtaagattttagatacggccataatgacttatcttttaaatccgtctgagtcgaattacgacataagtcgcgtattgaaaaaatacttgaaagaggatttgcaaaacatagatgatatagtaggcaagggcaggaataaaaagagctacgatgacattgacaaaaagcttttagtcgattatatgtgttcagccgcatcaaacttatctaagttaaaagataagctcatgtcatttataaaagagatggagatggaagatcttttaaaaaatgtggaaattccgcttattgaagtgctaaaatctatggaggtgtacggctttacattagataaagatgtacttagaagtatttctaaagaaatagatgaaaagacagataagattgtaaaagatatttacgatgctgctggatacgaatttaatattaactctacaaagcagttatcagaatttttgtttgataaactgaatttgccagcaataaaaaagactaaaacagggtattcgactgacatggaagtccttgcagaacttataccgtacaatgacatagtaggagaaataatagaatatagacagcttatgaagcttaaatctacgtacatagatggcttcattcccatcatggatgaaaataatagggtccactctacgtttaaacaaacagttgctgctacagggagaattagctcaacagagcctaatctgcagaacatacctgtaagagaagaatttggcaggaggataagaaaggcatttgtatcaagttatgaagatgggcttataatatctgctgattattctcagattgagctaagggttcttgcacatctttcagaggatgaaaaacttattgagtcatttttgaacaacgaagatatacatttaaggacggcatcggaggtttttaaggtttcgaaagaagaagtgacaagtgaaatgagaaggcgggcgaaagctgtcaactttggtattgtatatggtataagcgattacggcttatctaaagacttaaagatttcgcgaaaagaagcgaaagaatacatagacaattattttgacaggtacaagggcgtcaaaaattacatcgactcaattgtcaaatttgcaaaggaaaatgggtatgttacgactatcttaaataggagaagatacataccggaaatcaattcaaaaaatgaaaaccaaagatcttttggcgagagaatggcaatgaatacacctattcaaggtagcgctgcggatataataaagatgtcgatggttaaagtatacaatgaattaaaggaaagaggattgaaatcaagacttattcttcaggtgcacgatgagcttataattgacacacatcctgatgaagttgaaatagtcaaggagcttctaaaatcaataatggaaaatatcataaagttgaaagttcctttagttgtagatatagggcaagggaaaaactggtatgatgcaaaataaaaggatcc

SEQ ID NO: 765 - DNA, 2678 bp, Artificial Sequence
  Description of Artificial Sequence: Synthetic Clostridium thermosulfurogenes DNA Polymerase F794Q
atgaaatacctgctgccgaccgctgctgctggtctgctgctcctcgctgcccagccggcgatggccatggcgaaatttttgatcatagatggtaatagcttgatgtacagggcgtattttgccctgcctgatttgatgaacagcgaaggaatgcatacaaatgccatatacggtttttcaatgatgcttcttaaattgctggaggaggagaaaccagactacatagcaatagctttcgataaaaaggcttctacatttaggcacaaggagtacagtgcttataaaggaacccgccagtcgatgccagaagagctgatagaacaggtggatattttaaaagatgtgataaatgcatttaacataaagaccatcgagatagagggatttgaagcagatgatatcattggtacagtatcaaaaattgcttccgaaagtgggatggatgtgcttatcgtcacaggcgacagagatgcgcttcagcttgtgtcggcaaatgtaaaagtaaaaatatgtaaaaaaggcataacgcagatggatgagtacgatgaaaaggcggtctttgaaaagtatgaagtgacgccgcttcaattcatagacttgaaagggcttatgggagacaaatcagacaacattccaggagtgcccaatataggggagaagacggccataaagcttgttaaagaatttggatcaattgaaaatttactgatgaatacagataagttaaaagggaaaataaaagaaaatgtagaaaacaatgcagaattagctgttttaagcaaacggcttgctacgattgagagaaatgttcctattgatattgatttgaatgaatacgcggttaaaaattacgatgtcaataagcttacagagctatttgaaaaattggaattttcaagcctcatctcagatttaaaagatgatagtcgtgatacaaaggatattaaagaatggcctgtaagagattttacatacgttaaaaatgttttaggaaagtttgatgttttgtcattgtatccattcatatatgatggaaagataaaagcagtatcatttgcttgcggtgacggatcgttttttgtagagattgatgattatgacaattttaaattgcttaataatgataagcttacgttgataggacacgatctgaaagattttttagtaaacatttcatactgcggtattgaacttaattgtaagattttagatacggccataatgacttatcttttaaatccgtctgagtcgaattacgacataagtcgcgtattgaaaaaatacttgaaagaggatttgcaaaacatagatgatatagtaggcaagggcaggaataaaaagagctacgatgacattgacaaaaagcttttagtcgattatatgtgttcagccgcatcaaacttatctaagttaaaagataagctcatgtcatttataaaagagatggagatggaagatcttttaaaaaatgtggaaattccgcttattgaagtgctaaaatctatggaggtgtacggctttacattagataaagatgtacttagaagtatttctaaagaaatagatgaaaagacagataagattgtaaaagatatttacgatgctgctggatacgaatttaatattaactctacaaagcagttatcagaatttttgtttgataaactgaatttgccagcaataaaaaagactaaaacagggtattcgactgacatggaagtccttgcagaacttataccgtacaatgacatagtaggagaaataatagaatatagacagcttatgaagcttaaatctacgtacatagatggcttcattcccatcatggatgaaaataatagggtccactctacgtttaaacaaacagttgctgctacagggagaattagctcaacagagcctaatctgcagaacatacctgtaagagaagaatttggcaggaggataagaaaggcatttgtatcaagttatgaagatgggcttataatatctgctgattattctcagattgagctaagggttcttgcacatctttcagaggatgaaaaacttattgagtcatttttgaacaacgaagatatacatttaaggacggcatcggaggtttttaaggtttcgaaagaagaagtgacaagtgaaatgagaaggcgggcgaaagctgtcaactttggtattgtatatggtataagcgattacggcttatctaaagacttaaagatttcgcgaaaagaagcgaaagaatacatagacaattattttgacaggtacaagggcgtcaaaaattacatcgactcaattgtcaaatttgcaaaggaaaatgggtatgttacgactatcttaaataggagaagatacataccggaaatcaattcaaaaaatcaaaaccaaagatcttttggcgagagaatggcaatgaatacacctattcaaggtagcgctgcggatataataaagatgtcgatggttaaagtatacaatgaattaaaggaaagaggattgaaatcaagacttattcttcaggtgcacgatgagcttataattgacacacatcctgatgaagttgaaatagtcaaggagcttctaaaatcaataatggaaaatatcataaagttgaaagttcctttagttgtagatatagggcaagggaaaaactggtatgatgcaaaataaaaggatcc

SEQ ID NO: 766 - DNA, 2678 bp, Artificial Sequence
  Description of Artificial Sequence: Synthetic Clostridium thermosulfurogenes DNA Polymerase F794G
atgaaatacctgctgccgaccgctgctgctggtctgctgctcctcgctgcccagccggcgatggccatggcgaaatttttgatcatagatggtaatagcttgatgtacagggcgtattttgccctgcctgatttgatgaacagcgaaggaatgcatacaaatgccatatacggtttttcaatgatgcttcttaaattgctggaggaggagaaaccagactacatagcaatagctttcgataaaaaggcttctacatttaggcacaaggagtacagtgcttataaaggaacccgccagtcgatgccagaagagctgatagaacaggtggatattttaaaagatgtgataaatgcatttaacataaagaccatcgagatagagggatttgaagcagatgatatcattggtacagtatcaaaaattgcttccgaaagtgggatggatgtgcttatcgtcacaggcgacagagatgcgcttcagcttgtgtcggcaaatgtaaaagtaaaaatatgtaaaaaaggcataacgcagatggatgagtacgatgaaaaggcggtctttgaaaagtatgaagtgacgccgcttcaattcatagacttgaaagggcttatgggagacaaatcagacaacattccaggagtgcccaatataggggagaagacggccataaagcttgttaaagaatttggatcaattgaaaatttactgatgaatacagataagttaaaagggaaaataaaagaaaatgtagaaaacaatgcagaattagctgttttaagcaaacggcttgctacgattgagagaaatgttcctattgatattgatttgaatgaatacgcggttaaaaattacgatgtcaataagcttacagagctatttgaaaaattggaattttcaagcctcatctcagatttaaaagatgatagtcgtgatacaaaggatattaaagaatggcctgtaagagattttacatacgttaaaaatgttttaggaaagtttgatgttttgtcattgtatccattcatatatgatggaaagataaaagcagtatcatttgcttgcggtgacggatcgttttttgtagagattgatgattatgacaattttaaattgcttaataatgataagcttacgttgataggacacgatctgaaagattttttagtaaacatttcatactgcggtattgaacttaattgtaagattttagatacggccataatgacttatcttttaaatccgtctgagtcgaattacgacataagtcgcgtattgaaaaaatacttgaaagaggatttgcaaaacatagatgatatagtaggcaagggcaggaataaaaagagctacgatgacattgacaaaaagcttttagtcgattatatgtgttcagccgcatcaaacttatctaagttaaaagataagctcatgtcatttataaaagagatggagatggaagatcttttaaaaaatgtggaaattccgcttattgaagtgctaaaatctatggaggtgtacggctttacattagataaagatgtacttagaagtatttctaaagaaatagatgaaaagacagataagattgtaaaagatatttacgatgctgctggatacgaatttaatattaactctacaaagcagttatcagaatttttgtttgataaactgaatttgccagcaataaaaaagactaaaacagggtattcgactgacatggaagtccttgcagaacttataccgtacaatgacatagtaggagaaataatagaatatagacagcttatgaagcttaaatctacgtacatagatggcttcattcccatcatggatgaaaataatagggtccactctacgtttaaacaaacagttgctgctacagggagaattagctcaacagagcctaatctgcagaacatacctgtaagagaagaatttggcaggaggataagaaaggcatttgtatcaagttatgaagatgggcttataatatctgctgattattctcagattgagctaagggttcttgcacatctttcagaggatgaaaaacttattgagtcatttttgaacaacgaagatatacatttaaggacggcatcggaggtttttaaggtttcgaaagaagaagtgacaagtgaaatgagaaggcgggcgaaagctgtcaactttggtattgtatatggtataagcgattacggcttatctaaagacttaaagatttcgcgaaaagaagcgaaagaatacatagacaattattttgacaggtacaagggcgtcaaaaattacatcgactcaattgtcaaatttgcaaaggaaaatgggtatgttacgactatcttaaataggagaagatacataccggaaatcaattcaaaaaatggtaaccaaagatcttttggcgagagaatggcaatgaatacacctattcaaggtagcgctgcggatataataaagatgtcgatggttaaagtatacaatgaattaaaggaaagaggattgaaatcaagacttattcttcaggtgcacgatgagcttataattgacacacatcctgatgaagttgaaatagtcaaggagcttctaaaatcaataatggaaaatatcataaagttgaaagttcctttagttgtagatatagggcaagggaaaaactggtatgatgcaaaataaaaggatcc

SEQ ID NO: 767 - DNA, 2678 bp, Artificial Sequence
  Description of Artificial Sequence: Synthetic Clostridium thermosulfurogenes DNA Polymerase F794H
atgaaatacctgctgccgaccgctgctgctggtctgctgctcctcgctgcccagccggcgatggccatggcgaaatttttgatcatagatggtaatagcttgatgtacagggcgtattttgccctgcctgatttgatgaacagcgaaggaatgcatacaaatgccatatacggtttttcaatgatgcttcttaaattgctggaggaggagaaaccagactacatagcaatagctttcgataaaaaggcttctacatttaggcacaaggagtacagtgcttataaaggaacccgccagtcgatgccagaagagctgatagaacaggtggatattttaaaagatgtgataaatgcatttaacataaagaccatcgagatagagggatttgaagcagatgatatcattggtacagtatcaaaaattgcttccgaaagtgggatggatgtgcttatcgtcacaggcgacagagatgcgcttcagcttgtgtcggcaaatgtaaaagtaaaaatatgtaaaaaaggcataacgcagatggatgagtacgatgaaaaggcggtctttgaaaagtatgaagtgacgccgcttcaattcatagacttgaaagggcttatgggagacaaatcagacaacattccaggagtgcccaatataggggagaagacggccataaagcttgttaaagaatttggatcaattgaaaatttactgatgaatacagataagttaaaagggaaaataaaagaaaatgtagaaaacaatgcagaattagctgttttaagcaaacggcttgctacgattgagagaaatgttcctattgatattgatttgaatgaatacgcggttaaaaattacgatgtcaataagcttacagagctatttgaaaaattggaattttcaagcctcatctcagatttaaaagatgatagtcgtgatacaaaggatattaaagaatggcctgtaagagattttacatacgttaaaaatgttttaggaaagtttgatgttttgtcattgtatccattcatatatgatggaaagataaaagcagtatcatttgcttgcggtgacggatcgttttttgtagagattgatgattatgacaattttaaattgcttaataatgataagcttacgttgataggacacgatctgaaagattttttagtaaacatttcatactgcggtattgaacttaattgtaagattttagatacggccataatgacttatcttttaaatccgtctgagtcgaattacgacataagtcgcgtattgaaaaaatacttgaaagaggatttgcaaaacatagatgatatagtaggcaagggcaggaataaaaagagctacgatgacattgacaaaaagcttttagtcgattatatgtgttcagccgcatcaaacttatctaagttaaaagataagctcatgtcatttataaaagagatggagatggaagatcttttaaaaaatgtggaaattccgcttattgaagtgctaaaatctatggaggtgtacggctttacattagataaagatgtacttagaagtatttctaaagaaatagatgaaaagacagataagattgtaaaagatatttacgatgctgctggatacgaatttaatattaactctacaaagcagttatcagaatttttgtttgataaactgaatttgccagcaataaaaaagactaaaacagggtattcgactgacatggaagtccttgcagaacttataccgtacaatgacatagtaggagaaataatagaatatagacagcttatgaagcttaaatctacgtacatagatggcttcattcccatcatggatgaaaataatagggtccactctacgtttaaacaaacagttgctgctacagggagaattagctcaacagagcctaatctgcagaacatacctgtaagagaagaatttggcaggaggataagaaaggcatttgtatcaagttatgaagatgggcttataatatctgctgattattctcagattgagctaagggttcttgcacatctttcagaggatgaaaaacttattgagtcatttttgaacaacgaagatatacatttaaggacggcatcggaggtttttaaggtttcgaaagaagaagtgacaagtgaaatgagaaggcgggcgaaagctgtcaactttggtattgtatatggtataagcgattacggcttatctaaagacttaaagatttcgcgaaaagaagcgaaagaatacatagacaattattttgacaggtacaagggcgtcaaaaattacatcgactcaattgtcaaatttgcaaaggaaaatgggtatgttacgactatcttaaataggagaagatacataccggaaatcaattcaaaaaatcataaccaaagatcttttggcgagagaatggcaatgaatacacctattcaaggtagcgctgcggatataataaagatgtcgatggttaaagtatacaatgaattaaaggaaagaggattgaaatcaagacttattcttcaggtgcacgatgagcttataattgacacacatcctgatgaagttgaaatagtcaaggagcttctaaaatcaataatggaaaatatcataaagttgaaagttcctttagttgtagatatagggcaagggaaaaactggtatgatgcaaaataaaaggatcc

SEQ ID NO: 768 - DNA, 2678 bp, Artificial Sequence
  Description of Artificial Sequence: Synthetic Clostridium thermosulfurogenes DNA Polymerase F794I
atgaaatacctgctgccgaccgctgctgctggtctgctgctcctcgctgcccagccggcgatggccatggcgaaatttttgatcatagatggtaatagcttgatgtacagggcgtattttgccctgcctgatttgatgaacagcgaaggaatgcatacaaatgccatatacggtttttcaatgatgcttcttaaattgctggaggaggagaaaccagactacatagcaatagctttcgataaaaaggcttctacatttaggcacaaggagtacagtgcttataaaggaacccgccagtcgatgccagaagagctgatagaacaggtggatattttaaaagatgtgataaatgcatttaacataaagaccatcgagatagagggatttgaagcagatgatatcattggtacagtatcaaaaattgcttccgaaagtgggatggatgtgcttatcgtcacaggcgacagagatgcgcttcagcttgtgtcggcaaatgtaaaagtaaaaatatgtaaaaaaggcataacgcagatggatgagtacgatgaaaaggcggtctttgaaaagtatgaagtgacgccgcttcaattcatagacttgaaagggcttatgggagacaaatcagacaacattccaggagtgcccaatataggggagaagacggccataaagcttgttaaagaatttggatcaattgaaaatttactgatgaatacagataagttaaaagggaaaataaaagaaaatgtagaaaacaatgcagaattagctgttttaagcaaacggcttgctacgattgagagaaatgttcctattgatattgatttgaatgaatacgcggttaaaaattacgatgtcaataagcttacagagctatttgaaaaattggaattttcaagcctcatctcagatttaaaagatgatagtcgtgatacaaaggatattaaagaatggcctgtaagagattttacatacgttaaaaatgttttaggaaagtttgatgttttgtcattgtatccattcatatatgatggaaagataaaagcagtatcatttgcttgcggtgacggatcgttttttgtagagattgatgattatgacaattttaaattgcttaataatgataagcttacgttgataggacacgatctgaaagattttttagtaaacatttcatactgcggtattgaacttaattgtaagattttagatacggccataatgacttatcttttaaatccgtctgagtcgaattacgacataagtcgcgtattgaaaaaatacttgaaagaggatttgcaaaacatagatgatatagtaggcaagggcaggaataaaaagagctacgatgacattgacaaaaagcttttagtcgattatatgtgttcagccgcatcaaacttatctaagttaaaagataagctcatgtcatttataaaagagatggagatggaagatcttttaaaaaatgtggaaattccgcttattgaagtgctaaaatctatggaggtgtacggctttacattagataaagatgtacttagaagtatttctaaagaaatagatgaaaagacagataagattgtaaaagatatttacgatgctgctggatacgaatttaatattaactctacaaagcagttatcagaatttttgtttgataaactgaatttgccagcaataaaaaagactaaaacagggtattcgactgacatggaagtccttgcagaacttataccgtacaatgacatagtaggagaaataatagaatatagacagcttatgaagcttaaatctacgtacatagatggcttcattcccatcatggatgaaaataatagggtccactctacgtttaaacaaacagttgctgctacagggagaattagctcaacagagcctaatctgcagaacatacctgtaagagaagaatttggcaggaggataagaaaggcatttgtatcaagttatgaagatgggcttataatatctgctgattattctcagattgagctaagggttcttgcacatctttcagaggatgaaaaacttattgagtcatttttgaacaacgaagatatacatttaaggacggcatcggaggtttttaaggtttcgaaagaagaagtgacaagtgaaatgagaaggcgggcgaaagctgtcaactttggtattgtatatggtataagcgattacggcttatctaaagacttaaagatttcgcgaaaagaagcgaaagaatacatagacaattattttgacaggtacaagggcgtcaaaaattacatcgactcaattgtcaaatttgcaaaggaaaatgggtatgttacgactatcttaaataggagaagatacataccggaaatcaattcaaaaaatattaaccaaagatcttttggcgagagaatggcaatgaatacacctattcaaggtagcgctgcggatataataaagatgtcgatggttaaagtatacaatgaattaaaggaaagaggattgaaatcaagacttattcttcaggtgcacgatgagcttataattgacacacatcctgatgaagttgaaatagtcaaggagcttctaaaatcaataatggaaaatatcataaagttgaaagttcctttagttgtagatatagggcaagggaaaaactggtatgatgcaaaataaaaggatcc

SEQ ID NO: 769 - DNA, 2678 bp, Artificial Sequence
  Description of Artificial Sequence: Synthetic Clostridium thermosulfurogenes DNA Polymerase F794L
atgaaatacctgctgccgaccgctgctgctggtctgctgctcctcgctgcccagccggcgatggccatggcgaaatttttgatcatagatggtaatagcttgatgtacagggcgtattttgccctgcctgatttgatgaacagcgaaggaatgcatacaaatgccatatacggtttttcaatgatgcttcttaaattgctggaggaggagaaaccagactacatagcaatagctttcgataaaaaggcttctacatttaggcacaaggagtacagtgcttataaaggaacccgccagtcgatgccagaagagctgatagaacaggtggatattttaaaagatgtgataaatgcatttaacataaagaccatcgagatagagggatttgaagcagatgatatcattggtacagtatcaaaaattgcttccgaaagtgggatggatgtgcttatcgtcacaggcgacagagatgcgcttcagcttgtgtcggcaaatgtaaaagtaaaaatatgtaaaaaaggcataacgcagatggatgagtacgatgaaaaggcggtctttgaaaagtatgaagtgacgccgcttcaattcatagacttgaaagggcttatgggagacaaatcagacaacattccaggagtgcccaatataggggagaagacggccataaagcttgttaaagaatttggatcaattgaaaatttactgatgaatacagataagttaaaagggaaaataaaagaaaatgtagaaaacaatgcagaattagctgttttaagcaaacggcttgctacgattgagagaaatgttcctattgatattgatttgaatgaatacgcggttaaaaattacgatgtcaataagcttacagagctatttgaaaaattggaattttcaagcctcatctcagatttaaaagatgatagtcgtgatacaaaggatattaaagaatggcctgtaagagattttacatacgttaaaaatgttttaggaaagtttgatgttttgtcattgtatccattcatatatgatggaaagataaaagcagtatcatttgcttgcggtgacggatcgttttttgtagagattgatgattatgacaattttaaattgcttaataatgataagcttacgttgataggacacgatctgaaagattttttagtaaacatttcatactgcggtattgaacttaattgtaagattttagatacggccataatgacttatcttttaaatccgtctgagtcgaattacgacataagtcgcgtattgaaaaaatacttgaaagaggatttgcaaaacatagatgatatagtaggcaagggcaggaataaaaagagctacgatgacattgacaaaaagcttttagtcgattatatgtgttcagccgcatcaaacttatctaagttaaaagataagctcatgtcatttataaaagagatggagatggaagatcttttaaaaaatgtggaaattccgcttattgaagtgctaaaatctatggaggtgtacggctttacattagataaagatgtacttagaagtatttctaaagaaatagatgaaaagacagataagattgtaaaagatatttacgatgctgctggatacgaatttaatattaactctacaaagcagttatcagaatttttgtttgataaactgaatttgccagcaataaaaaagactaaaacagggtattcgactgacatggaagtccttgcagaacttataccgtacaatgacatagtaggagaaataatagaatatagacagcttatgaagcttaaatctacgtacatagatggcttcattcccatcatggatgaaaataatagggtccactctacgtttaaacaaacagttgctgctacagggagaattagctcaacagagcctaatctgcagaacatacctgtaagagaagaatttggcaggaggataagaaaggcatttgtatcaagttatgaagatgggcttataatatctgctgattattctcagattgagctaagggttcttgcacatctttcagaggatgaaaaacttattgagtcatttttgaacaacgaagatatacatttaaggacggcatcggaggtttttaaggtttcgaaagaagaagtgacaagtgaaatgagaaggcgggcgaaagctgtcaactttggtattgtatatggtataagcgattacggcttatctaaagacttaaagatttcgcgaaaagaagcgaaagaatacatagacaattattttgacaggtacaagggcgtcaaaaattacatcgactcaattgtcaaatttgcaaaggaaaatgggtatgttacgactatcttaaataggagaagatacataccggaaatcaattcaaaaaatcttaaccaaagatcttttggcgagagaatggcaatgaatacacctattcaaggtagcgctgcggatataataaagatgtcgatggttaaagtatacaatgaattaaaggaaagaggattgaaatcaagacttattcttcaggtgcacgatgagcttataattgacacacatcctgatgaagttgaaatagtcaaggagcttctaaaatcaataatggaaaatatcataaagttgaaagttcctttagttgtagatatagggcaagggaaaaactggtatgatgcaaaataaaaggatcc

SEQ ID NO: 770 - DNA, 2678 bp, Artificial Sequence
  Description of Artificial Sequence: Synthetic Clostridium thermosulfurogenes DNA Polymerase F794K
atgaaatacctgctgccgaccgctgctgctggtctgctgctcctcgctgcccagccggcgatggccatggcgaaatttttgatcatagatggtaatagcttgatgtacagggcgtattttgccctgcctgatttgatgaacagcgaaggaatgcatacaaatgccatatacggtttttcaatgatgcttcttaaattgctggaggaggagaaaccagactacatagcaatagctttcgataaaaaggcttctacatttaggcacaaggagtacagtgcttataaaggaacccgccagtcgatgccagaagagctgatagaacaggtggatattttaaaagatgtgataaatgcatttaacataaagaccatcgagatagagggatttgaagcagatgatatcattggtacagtatcaaaaattgcttccgaaagtgggatggatgtgcttatcgtcacaggcgacagagatgcgcttcagcttgtgtcggcaaatgtaaaagtaaaaatatgtaaaaaaggcataacgcagatggatgagtacgatgaaaaggcggtctttgaaaagtatgaagtgacgccgcttcaattcatagacttgaaagggcttatgggagacaaatcagacaacattccaggagtgcccaatataggggagaagacggccataaagcttgttaaagaatttggatcaattgaaaatttactgatgaatacagataagttaaaagggaaaataaaagaaaatgtagaaaacaatgcagaattagctgttttaagcaaacggcttgctacgattgagagaaatgttcctattgatattgatttgaatgaatacgcggttaaaaattacgatgtcaataagcttacagagctatttgaaaaattggaattttcaagcctcatctcagatttaaaagatgatagtcgtgatacaaaggatattaaagaatggcctgtaagagattttacatacgttaaaaatgttttaggaaagtttgatgttttgtcattgtatccattcatatatgatggaaagataaaagcagtatcatttgcttgcggtgacggatcgttttttgtagagattgatgattatgacaattttaaattgcttaataatgataagcttacgttgataggacacgatctgaaagattttttagtaaacatttcatactgcggtattgaacttaattgtaagattttagatacggccataatgacttatcttttaaatccgtctgagtcgaattacgacataagtcgcgtattgaaaaaatacttgaaagaggatttgcaaaacatagatgatatagtaggcaagggcaggaataaaaagagctacgatgacattgacaaaaagcttttagtcgattatatgtgttcagccgcatcaaacttatctaagttaaaagataagctcatgtcatttataaaagagatggagatggaagatcttttaaaaaatgtggaaattccgcttattgaagtgctaaaatctatggaggtgtacggctttacattagataaagatgtacttagaagtatttctaaagaaatagatgaaaagacagataagattgtaaaagatatttacgatgctgctggatacgaatttaatattaactctacaaagcagttatcagaatttttgtttgataaactgaatttgccagcaataaaaaagactaaaacagggtattcgactgacatggaagtccttgcagaacttataccgtacaatgacatagtaggagaaataatagaatatagacagcttatgaagcttaaatctacgtacatagatggcttcattcccatcatggatgaaaataatagggtccactctacgtttaaacaaacagttgctgctacagggagaattagctcaacagagcctaatctgcagaacatacctgtaagagaagaatttggcaggaggataagaaaggcatttgtatcaagttatgaagatgggcttataatatctgctgattattctcagattgagctaagggttcttgcacatctttcagaggatgaaaaacttattgagtcatttttgaacaacgaagatatacatttaaggacggcatcggaggtttttaaggtttcgaaagaagaagtgacaagtgaaatgagaaggcgggcgaaagctgtcaactttggtattgtatatggtataagcgattacggcttatctaaagacttaaagatttcgcgaaaagaagcgaaagaatacatagacaattattttgacaggtacaagggcgtcaaaaattacatcgactcaattgtcaaatttgcaaaggaaaatgggtatgttacgactatcttaaataggagaagatacataccggaaatcaattcaaaaaataaaaaccaaagatcttttggcgagagaatggcaatgaatacacctattcaaggtagcgctgcggatataataaagatgtcgatggttaaagtatacaatgaattaaaggaaagaggattgaaatcaagacttattcttcaggtgcacgatgagcttataattgacacacatcctgatgaagttgaaatagtcaaggagcttctaaaatcaataatggaaaatatcataaagttgaaagttcctttagttgtagatatagggcaagggaaaaactggtatgatgcaaaataaaaggatcc

SEQ ID NO: 771 - DNA, 2678 bp, Artificial Sequence
  Description of Artificial Sequence: Synthetic Clostridium thermosulfurogenes DNA Polymerase F794M
atgaaatacctgctgccgaccgctgctgctggtctgctgctcctcgctgcccagccggcgatggccatggcgaaatttttgatcatagatggtaatagcttgatgtacagggcgtattttgccctgcctgatttgatgaacagcgaaggaatgcatacaaatgccatatacggtttttcaatgatgcttcttaaattgctggaggaggagaaaccagactacatagcaatagctttcgataaaaaggcttctacatttaggcacaaggagtacagtgcttataaaggaacccgccagtcgatgccagaagagctgatagaacaggtggatattttaaaagatgtgataaatgcatttaacataaagaccatcgagatagagggatttgaagcagatgatatcattggtacagtatcaaaaattgcttccgaaagtgggatggatgtgcttatcgtcacaggcgacagagatgcgcttcagcttgtgtcggcaaatgtaaaagtaaaaatatgtaaaaaaggcataacgcagatggatgagtacgatgaaaaggcggtctttgaaaagtatgaagtgacgccgcttcaattcatagacttgaaagggcttatgggagacaaatcagacaacattccaggagtgcccaatataggggagaagacggccataaagcttgttaaagaatttggatcaattgaaaatttactgatgaatacagataagttaaaagggaaaataaaagaaaatgtagaaaacaatgcagaattagctgttttaagcaaacggcttgctacgattgagagaaatgttcctattgatattgatttgaatgaatacgcggttaaaaattacgatgtcaataagcttacagagctatttgaaaaattggaattttcaagcctcatctcagatttaaaagatgatagtcgtgatacaaaggatattaaagaatggcctgtaagagattttacatacgttaaaaatgttttaggaaagtttgatgttttgtcattgtatccattcatatatgatggaaagataaaagcagtatcatttgcttgcggtgacggatcgttttttgtagagattgatgattatgacaattttaaattgcttaataatgataagcttacgttgataggacacgatctgaaagattttttagtaaacatttcatactgcggtattgaacttaattgtaagattttagatacggccataatgacttatcttttaaatccgtctgagtcgaattacgacataagtcgcgtattgaaaaaatacttgaaagaggatttgcaaaacatagatgatatagtaggcaagggcaggaataaaaagagctacgatgacattgacaaaaagcttttagtcgattatatgtgttcagccgcatcaaacttatctaagttaaaagataagctcatgtcatttataaaagagatggagatggaagatcttttaaaaaatgtggaaattccgcttattgaagtgctaaaatctatggaggtgtacggctttacattagataaagatgtacttagaagtatttctaaagaaatagatgaaaagacagataagattgtaaaagatatttacgatgctgctggatacgaatttaatattaactctacaaagcagttatcagaatttttgtttgataaactgaatttgccagcaataaaaaagactaaaacagggtattcgactgacatggaagtccttgcagaacttataccgtacaatgacatagtaggagaaataatagaatatagacagcttatgaagcttaaatctacgtacatagatggcttcattcccatcatggatgaaaataatagggtccactctacgtttaaacaaacagttgctgctacagggagaattagctcaacagagcctaatctgcagaacatacctgtaagagaagaatttggcaggaggataagaaaggcatttgtatcaagttatgaagatgggcttataatatctgctgattattctcagattgagctaagggttcttgcacatctttcagaggatgaaaaacttattgagtcatttttgaacaacgaagatatacatttaaggacggcatcggaggtttttaaggtttcgaaagaagaagtgacaagtgaaatgagaaggcgggcgaaagctgtcaactttggtattgtatatggtataagcgattacggcttatctaaagacttaaagatttcgcgaaaagaagcgaaagaatacatagacaattattttgacaggtacaagggcgtcaaaaattacatcgactcaattgtcaaatttgcaaaggaaaatgggtatgttacgactatcttaaataggagaagatacataccggaaatcaattcaaaaaatatgaaccaaagatcttttggcgagagaatggcaatgaatacacctattcaaggtagcgctgcggatataataaagatgtcgatggttaaagtatacaatgaattaaaggaaagaggattgaaatcaagacttattcttcaggtgcacgatgagcttataattgacacacatcctgatgaagttgaaatagtcaaggagcttctaaaatcaataatggaaaatatcataaagttgaaagttcctttagttgtagatatagggcaagggaaaaactggtatgatgcaaaataaaaggatcc

SEQ ID NO: 772 - DNA, 2678 bp, Artificial Sequence
  Description of Artificial Sequence: Synthetic Clostridium thermosulfurogenes DNA Polymerase F794P
atgaaatacctgctgccgaccgctgctgctggtctgctgctcctcgctgcccagccggcgatggccatggcgaaatttttgatcatagatggtaatagcttgatgtacagggcgtattttgccctgcctgatttgatgaacagcgaaggaatgcatacaaatgccatatacggtttttcaatgatgcttcttaaattgctggaggaggagaaaccagactacatagcaatagctttcgataaaaaggcttctacatttaggcacaaggagtacagtgcttataaaggaacccgccagtcgatgccagaagagctgatagaacaggtggatattttaaaagatgtgataaatgcatttaacataaagaccatcgagatagagggatttgaagcagatgatatcattggtacagtatcaaaaattgcttccgaaagtgggatggatgtgcttatcgtcacaggcgacagagatgcgcttcagcttgtgtcggcaaatgtaaaagtaaaaatatgtaaaaaaggcataacgcagatggatgagtacgatgaaaaggcggtctttgaaaagtatgaagtgacgccgcttcaattcatagacttgaaagggcttatgggagacaaatcagacaacattccaggagtgcccaatataggggagaagacggccataaagcttgttaaagaatttggatcaattgaaaatttactgatgaatacagataagttaaaagggaaaataaaagaaaatgtagaaaacaatgcagaattagctgttttaagcaaacggcttgctacgattgagagaaatgttcctattgatattgatttgaatgaatacgcggttaaaaattacgatgtcaataagcttacagagctatttgaaaaattggaattttcaagcctcatctcagatttaaaagatgatagtcgtgatacaaaggatattaaagaatggcctgtaagagattttacatacgttaaaaatgttttaggaaagtttgatgttttgtcattgtatccattcatatatgatggaaagataaaagcagtatcatttgcttgcggtgacggatcgttttttgtagagattgatgattatgacaattttaaattgcttaataatgataagcttacgttgataggacacgatctgaaagattttttagtaaacatttcatactgcggtattgaacttaattgtaagattttagatacggccataatgacttatcttttaaatccgtctgagtcgaattacgacataagtcgcgtattgaaaaaatacttgaaagaggatttgcaaaacatagatgatatagtaggcaagggcaggaataaaaagagctacgatgacattgacaaaaagcttttagtcgattatatgtgttcagccgcatcaaacttatctaagttaaaagataagctcatgtcatttataaaagagatggagatggaagatcttttaaaaaatgtggaaattccgcttattgaagtgctaaaatctatggaggtgtacggctttacattagataaagatgtacttagaagtatttctaaagaaatagatgaaaagacagataagattgtaaaagatatttacgatgctgctggatacgaatttaatattaactctacaaagcagttatcagaatttttgtttgataaactgaatttgccagcaataaaaaagactaaaacagggtattcgactgacatggaagtccttgcagaacttataccgtacaatgacatagtaggagaaataatagaatatagacagcttatgaagcttaaatctacgtacatagatggcttcattcccatcatggatgaaaataatagggtccactctacgtttaaacaaacagttgctgctacagggagaattagctcaacagagcctaatctgcagaacatacctgtaagagaagaatttggcaggaggataagaaaggcatttgtatcaagttatgaagatgggcttataatatctgctgattattctcagattgagctaagggttcttgcacatctttcagaggatgaaaaacttattgagtcatttttgaacaacgaagatatacatttaaggacggcatcggaggtttttaaggtttcgaaagaagaagtgacaagtgaaatgagaaggcgggcgaaagctgtcaactttggtattgtatatggtataagcgattacggcttatctaaagacttaaagatttcgcgaaaagaagcgaaagaatacatagacaattattttgacaggtacaagggcgtcaaaaattacatcgactcaattgtcaaatttgcaaaggaaaatgggtatgttacgactatcttaaataggagaagatacataccggaaatcaattcaaaaaatcctaaccaaagatcttttggcgagagaatggcaatgaatacacctattcaaggtagcgctgcggatataataaagatgtcgatggttaaagtatacaatgaattaaaggaaagaggattgaaatcaagacttattcttcaggtgcacgatgagcttataattgacacacatcctgatgaagttgaaatagtcaaggagcttctaaaatcaataatggaaaatatcataaagttgaaagttcctttagttgtagatatagggcaagggaaaaactggtatgatgcaaaataaaaggatcc

SEQ ID NO: 773 - DNA, 2678 bp, Artificial Sequence
  Description of Artificial Sequence: Synthetic Clostridium thermosulfurogenes DNA Polymerase F794S
atgaaatacctgctgccgaccgctgctgctggtctgctgctcctcgctgcccagccggcgatggccatggcgaaatttttgatcatagatggtaatagcttgatgtacagggcgtattttgccctgcctgatttgatgaacagcgaaggaatgcatacaaatgccatatacggtttttcaatgatgcttcttaaattgctggaggaggagaaaccagactacatagcaatagctttcgataaaaaggcttctacatttaggcacaaggagtacagtgcttataaaggaacccgccagtcgatgccagaagagctgatagaacaggtggatattttaaaagatgtgataaatgcatttaacataaagaccatcgagatagagggatttgaagcagatgatatcattggtacagtatcaaaaattgcttccgaaagtgggatggatgtgcttatcgtcacaggcgacagagatgcgcttcagcttgtgtcggcaaatgtaaaagtaaaaatatgtaaaaaaggcataacgcagatggatgagtacgatgaaaaggcggtctttgaaaagtatgaagtgacgccgcttcaattcatagacttgaaagggcttatgggagacaaatcagacaacattccaggagtgcccaatataggggagaagacggccataaagcttgttaaagaatttggatcaattgaaaatttactgatgaatacagataagttaaaagggaaaataaaagaaaatgtagaaaacaatgcagaattagctgttttaagcaaacggcttgctacgattgagagaaatgttcctattgatattgatttgaatgaatacgcggttaaaaattacgatgtcaataagcttacagagctatttgaaaaattggaattttcaagcctcatctcagatttaaaagatgatagtcgtgatacaaaggatattaaagaatggcctgtaagagattttacatacgttaaaaatgttttaggaaagtttgatgttttgtcattgtatccattcatatatgatggaaagataaaagcagtatcatttgcttgcggtgacggatcgttttttgtagagattgatgattatgacaattttaaattgcttaataatgataagcttacgttgataggacacgatctgaaagattttttagtaaacatttcatactgcggtattgaacttaattgtaagattttagatacggccataatgacttatcttttaaatccgtctgagtcgaattacgacataagtcgcgtattgaaaaaatacttgaaagaggatttgcaaaacatagatgatatagtaggcaagggcaggaataaaaagagctacgatgacattgacaaaaagcttttagtcgattatatgtgttcagccgcatcaaacttatctaagttaaaagataagctcatgtcatttataaaagagatggagatggaagatcttttaaaaaatgtggaaattccgcttattgaagtgctaaaatctatggaggtgtacggctttacattagataaagatgtacttagaagtatttctaaagaaatagatgaaaagacagataagattgtaaaagatatttacgatgctgctggatacgaatttaatattaactctacaaagcagttatcagaatttttgtttgataaactgaatttgccagcaataaaaaagactaaaacagggtattcgactgacatggaagtccttgcagaacttataccgtacaatgacatagtaggagaaataatagaatatagacagcttatgaagcttaaatctacgtacatagatggcttcattcccatcatggatgaaaataatagggtccactctacgtttaaacaaacagttgctgctacagggagaattagctcaacagagcctaatctgcagaacatacctgtaagagaagaatttggcaggaggataagaaaggcatttgtatcaagttatgaagatgggcttataatatctgctgattattctcagattgagctaagggttcttgcacatctttcagaggatgaaaaacttattgagtcatttttgaacaacgaagatatacatttaaggacggcatcggaggtttttaaggtttcgaaagaagaagtgacaagtgaaatgagaaggcgggcgaaagctgtcaactttggtattgtatatggtataagcgattacggcttatctaaagacttaaagatttcgcgaaaagaagcgaaagaatacatagacaattattttgacaggtacaagggcgtcaaaaattacatcgactcaattgtcaaatttgcaaaggaaaatgggtatgttacgactatcttaaataggagaagatacataccggaaatcaattcaaaaaattctaaccaaagatcttttggcgagagaatggcaatgaatacacctattcaaggtagcgctgcggatataataaagatgtcgatggttaaagtatacaatgaattaaaggaaagaggattgaaatcaagacttattcttcaggtgcacgatgagcttataattgacacacatcctgatgaagttgaaatagtcaaggagcttctaaaatcaataatggaaaatatcataaagttgaaagttcctttagttgtagatatagggcaagggaaaaactggtatgatgcaaaataaaaggatcc

SEQ ID NO: 774 - DNA, 2678 bp, Artificial Sequence
  Description of Artificial Sequence: Synthetic Clostridium thermosulfurogenes DNA Polymerase F794T
atgaaatacctgctgccgaccgctgctgctggtctgctgctcctcgctgcccagccggcgatggccatggcgaaatttttgatcatagatggtaatagcttgatgtacagggcgtattttgccctgcctgatttgatgaacagcgaaggaatgcatacaaatgccatatacggtttttcaatgatgcttcttaaattgctggaggaggagaaaccagactacatagcaatagctttcgataaaaaggcttctacatttaggcacaaggagtacagtgcttataaaggaacccgccagtcgatgccagaagagctgatagaacaggtggatattttaaaagatgtgataaatgcatttaacataaagaccatcgagatagagggatttgaagcagatgatatcattggtacagtatcaaaaattgcttccgaaagtgggatggatgtgcttatcgtcacaggcgacagagatgcgcttcagcttgtgtcggcaaatgtaaaagtaaaaatatgtaaaaaaggcataacgcagatggatgagtacgatgaaaaggcggtctttgaaaagtatgaagtgacgccgcttcaattcatagacttgaaagggcttatgggagacaaatcagacaacattccaggagtgcccaatataggggagaagacggccataaagcttgttaaagaatttggatcaattgaaaatttactgatgaatacagataagttaaaagggaaaataaaagaaaatgtagaaaacaatgcagaattagctgttttaagcaaacggcttgctacgattgagagaaatgttcctattgatattgatttgaatgaatacgcggttaaaaattacgatgtcaataagcttacagagctatttgaaaaattggaattttcaagcctcatctcagatttaaaagatgatagtcgtgatacaaaggatattaaagaatggcctgtaagagattttacatacgttaaaaatgttttaggaaagtttgatgttttgtcattgtatccattcatatatgatggaaagataaaagcagtatcatttgcttgcggtgacggatcgttttttgtagagattgatgattatgacaattttaaattgcttaataatgataagcttacgttgataggacacgatctgaaagattttttagtaaacatttcatactgcggtattgaacttaattgtaagattttagatacggccataatgacttatcttttaaatccgtctgagtcgaattacgacataagtcgcgtattgaaaaaatacttgaaagaggatttgcaaaacatagatgatatagtaggcaagggcaggaataaaaagagctacgatgacattgacaaaaagcttttagtcgattatatgtgttcagccgcatcaaacttatctaagttaaaagataagctcatgtcatttataaaagagatggagatggaagatcttttaaaaaatgtggaaattccgcttattgaagtgctaaaatctatggaggtgtacggctttacattagataaagatgtacttagaagtatttctaaagaaatagatgaaaagacagataagattgtaaaagatatttacgatgctgctggatacgaatttaatattaactctacaaagcagttatcagaatttttgtttgataaactgaatttgccagcaataaaaaagactaaaacagggtattcgactgacatggaagtccttgcagaacttataccgtacaatgacatagtaggagaaataatagaatatagacagcttatgaagcttaaatctacgtacatagatggcttcattcccatcatggatgaaaataatagggtccactctacgtttaaacaaacagttgctgctacagggagaattagctcaacagagcctaatctgcagaacatacctgtaagagaagaatttggcaggaggataagaaaggcatttgtatcaagttatgaagatgggcttataatatctgctgattattctcagattgagctaagggttcttgcacatctttcagaggatgaaaaacttattgagtcatttttgaacaacgaagatatacatttaaggacggcatcggaggtttttaaggtttcgaaagaagaagtgacaagtgaaatgagaaggcgggcgaaagctgtcaactttggtattgtatatggtataagcgattacggcttatctaaagacttaaagatttcgcgaaaagaagcgaaagaatacatagacaattattttgacaggtacaagggcgtcaaaaattacatcgactcaattgtcaaatttgcaaaggaaaatgggtatgttacgactatcttaaataggagaagatacataccggaaatcaattcaaaaaatactaaccaaagatcttttggcgagagaatggcaatgaatacacctattcaaggtagcgctgcggatataataaagatgtcgatggttaaagtatacaatgaattaaaggaaagaggattgaaatcaagacttattcttcaggtgcacgatgagcttataattgacacacatcctgatgaagttgaaatagtcaaggagcttctaaaatcaataatggaaaatatcataaagttgaaagttcctttagttgtagatatagggcaagggaaaaactggtatgatgcaaaataaaaggatcc

SEQ ID NO: 775 - DNA, 2678 bp, Artificial Sequence
  Description of Artificial Sequence: Synthetic Clostridium thermosulfurogenes DNA Polymerase F794W
atgaaatacctgctgccgaccgctgctgctggtctgctgctcctcgctgcccagccggcgatggccatggcgaaatttttgatcatagatggtaatagcttgatgtacagggcgtattttgccctgcctgatttgatgaacagcgaaggaatgcatacaaatgccatatacggtttttcaatgatgcttcttaaattgctggaggaggagaaaccagactacatagcaatagctttcgataaaaaggcttctacatttaggcacaaggagtacagtgcttataaaggaacccgccagtcgatgccagaagagctgatagaacaggtggatattttaaaagatgtgataaatgcatttaacataaagaccatcgagatagagggatttgaagcagatgatatcattggtacagtatcaaaaattgcttccgaaagtgggatggatgtgcttatcgtcacaggcgacagagatgcgcttcagcttgtgtcggcaaatgtaaaagtaaaaatatgtaaaaaaggcataacgcagatggatgagtacgatgaaaaggcggtctttgaaaagtatgaagtgacgccgcttcaattcatagacttgaaagggcttatgggagacaaatcagacaacattccaggagtgcccaatataggggagaagacggccataaagcttgttaaagaatttggatcaattgaaaatttactgatgaatacagataagttaaaagggaaaataaaagaaaatgtagaaaacaatgcagaattagctgttttaagcaaacggcttgctacgattgagagaaatgttcctattgatattgatttgaatgaatacgcggttaaaaattacgatgtcaataagcttacagagctatttgaaaaattggaattttcaagcctcatctcagatttaaaagatgatagtcgtgatacaaaggatattaaagaatggcctgtaagagattttacatacgttaaaaatgttttaggaaagtttgatgttttgtcattgtatccattcatatatgatggaaagataaaagcagtatcatttgcttgcggtgacggatcgttttttgtagagattgatgattatgacaattttaaattgcttaataatgataagcttacgttgataggacacgatctgaaagattttttagtaaacatttcatactgcggtattgaacttaattgtaagattttagatacggccataatgacttatcttttaaatccgtctgagtcgaattacgacataagtcgcgtattgaaaaaatacttgaaagaggatttgcaaaacatagatgatatagtaggcaagggcaggaataaaaagagctacgatgacattgacaaaaagcttttagtcgattatatgtgttcagccgcatcaaacttatctaagttaaaagataagctcatgtcatttataaaagagatggagatggaagatcttttaaaaaatgtggaaattccgcttattgaagtgctaaaatctatggaggtgtacggctttacattagataaagatgtacttagaagtatttctaaagaaatagatgaaaagacagataagattgtaaaagatatttacgatgctgctggatacgaatttaatattaactctacaaagcagttatcagaatttttgtttgataaactgaatttgccagcaataaaaaagactaaaacagggtattcgactgacatggaagtccttgcagaacttataccgtacaatgacatagtaggagaaataatagaatatagacagcttatgaagcttaaatctacgtacatagatggcttcattcccatcatggatgaaaataatagggtccactctacgtttaaacaaacagttgctgctacagggagaattagctcaacagagcctaatctgcagaacatacctgtaagagaagaatttggcaggaggataagaaaggcatttgtatcaagttatgaagatgggcttataatatctgctgattattctcagattgagctaagggttcttgcacatctttcagaggatgaaaaacttattgagtcatttttgaacaacgaagatatacatttaaggacggcatcggaggtttttaaggtttcgaaagaagaagtgacaagtgaaatgagaaggcgggcgaaagctgtcaactttggtattgtatatggtataagcgattacggcttatctaaagacttaaagatttcgcgaaaagaagcgaaagaatacatagacaattattttgacaggtacaagggcgtcaaaaattacatcgactcaattgtcaaatttgcaaaggaaaatgggtatgttacgactatcttaaataggagaagatacataccggaaatcaattcaaaaaattggaaccaaagatcttttggcgagagaatggcaatgaatacacctattcaaggtagcgctgcggatataataaagatgtcgatggttaaagtatacaatgaattaaaggaaagaggattgaaatcaagacttattcttcaggtgcacgatgagcttataattgacacacatcctgatgaagttgaaatagtcaaggagcttctaaaatcaataatggaaaatatcataaagttgaaagttcctttagttgtagatatagggcaagggaaaaactggtatgatgcaaaataaaaggatcc

SEQ ID NO: 776 - DNA, 2678 bp, Artificial Sequence
  Description of Artificial Sequence: Synthetic Clostridium thermosulfurogenes DNA Polymerase F794Y
atgaaatacctgctgccgaccgctgctgctggtctgctgctcctcgctgcccagccggcgatggccatggcgaaatttttgatcatagatggtaatagcttgatgtacagggcgtattttgccctgcctgatttgatgaacagcgaaggaatgcatacaaatgccatatacggtttttcaatgatgcttcttaaattgctggaggaggagaaaccagactacatagcaatagctttcgataaaaaggcttctacatttaggcacaaggagtacagtgcttataaaggaacccgccagtcgatgccagaagagctgatagaacaggtggatattttaaaagatgtgataaatgcatttaacataaagaccatcgagatagagggatttgaagcagatgatatcattggtacagtatcaaaaattgcttccgaaagtgggatggatgtgcttatcgtcacaggcgacagagatgcgcttcagcttgtgtcggcaaatgtaaaagtaaaaatatgtaaaaaaggcataacgcagatggatgagtacgatgaaaaggcggtctttgaaaagtatgaagtgacgccgcttcaattcatagacttgaaagggcttatgggagacaaatcagacaacattccaggagtgcccaatataggggagaagacggccataaagcttgttaaagaatttggatcaattgaaaatttactgatgaatacagataagttaaaagggaaaataaaagaaaatgtagaaaacaatgcagaattagctgttttaagcaaacggcttgctacgattgagagaaatgttcctattgatattgatttgaatgaatacgcggttaaaaattacgatgtcaataagcttacagagctatttgaaaaattggaattttcaagcctcatctcagatttaaaagatgatagtcgtgatacaaaggatattaaagaatggcctgtaagagattttacatacgttaaaaatgttttaggaaagtttgatgttttgtcattgtatccattcatatatgatggaaagataaaagcagtatcatttgcttgcggtgacggatcgttttttgtagagattgatgattatgacaattttaaattgcttaataatgataagcttacgttgataggacacgatctgaaagattttttagtaaacatttcatactgcggtattgaacttaattgtaagattttagatacggccataatgacttatcttttaaatccgtctgagtcgaattacgacataagtcgcgtattgaaaaaatacttgaaagaggatttgcaaaacatagatgatatagtaggcaagggcaggaataaaaagagctacgatgacattgacaaaaagcttttagtcgattatatgtgttcagccgcatcaaacttatctaagttaaaagataagctcatgtcatttataaaagagatggagatggaagatcttttaaaaaatgtggaaattccgcttattgaagtgctaaaatctatggaggtgtacggctttacattagataaagatgtacttagaagtatttctaaagaaatagatgaaaagacagataagattgtaaaagatatttacgatgctgctggatacgaatttaatattaactctacaaagcagttatcagaatttttgtttgataaactgaatttgccagcaataaaaaagactaaaacagggtattcgactgacatggaagtccttgcagaacttataccgtacaatgacatagtaggagaaataatagaatatagacagcttatgaagcttaaatctacgtacatagatggcttcattcccatcatggatgaaaataatagggtccactctacgtttaaacaaacagttgctgctacagggagaattagctcaacagagcctaatctgcagaacatacctgtaagagaagaatttggcaggaggataagaaaggcatttgtatcaagttatgaagatgggcttataatatctgctgattattctcagattgagctaagggttcttgcacatctttcagaggatgaaaaacttattgagtcatttttgaacaacgaagatatacatttaaggacggcatcggaggtttttaaggtttcgaaagaagaagtgacaagtgaaatgagaaggcgggcgaaagctgtcaactttggtattgtatatggtataagcgattacggcttatctaaagacttaaagatttcgcgaaaagaagcgaaagaatacatagacaattattttgacaggtacaagggcgtcaaaaattacatcgactcaattgtcaaatttgcaaaggaaaatgggtatgttacgactatcttaaataggagaagatacataccggaaatcaattcaaaaaattataaccaaagatcttttggcgagagaatggcaatgaatacacctattcaaggtagcgctgcggatataataaagatgtcgatggttaaagtatacaatgaattaaaggaaagaggattgaaatcaagacttattcttcaggtgcacgatgagcttataattgacacacatcctgatgaagttgaaatagtcaaggagcttctaaaatcaataatggaaaatatcataaagttgaaagttcctttagttgtagatatagggcaagggaaaaactggtatgatgcaaaataaaaggatcc

SEQ ID NO: 777 - DNA, 2678 bp, Artificial Sequence
  Description of Artificial Sequence: Synthetic Clostridium thermosulfurogenes DNA Polymerase F794V
atgaaatacctgctgccgaccgctgctgctggtctgctgctcctcgctgcccagccggcgatggccatggcgaaatttttgatcatagatggtaatagcttgatgtacagggcgtattttgccctgcctgatttgatgaacagcgaaggaatgcatacaaatgccatatacggtttttcaatgatgcttcttaaattgctggaggaggagaaaccagactacatagcaatagctttcgataaaaaggcttctacatttaggcacaaggagtacagtgcttataaaggaacccgccagtcgatgccagaagagctgatagaacaggtggatattttaaaagatgtgataaatgcatttaacataaagaccatcgagatagagggatttgaagcagatgatatcattggtacagtatcaaaaattgcttccgaaagtgggatggatgtgcttatcgtcacaggcgacagagatgcgcttcagcttgtgtcggcaaatgtaaaagtaaaaatatgtaaaaaaggcataacgcagatggatgagtacgatgaaaaggcggtctttgaaaagtatgaagtgacgccgcttcaattcatagacttgaaagggcttatgggagacaaatcagacaacattccaggagtgcccaatataggggagaagacggccataaagcttgttaaagaatttggatcaattgaaaatttactgatgaatacagataagttaaaagggaaaataaaagaaaatgtagaaaacaatgcagaattagctgttttaagcaaacggcttgctacgattgagagaaatgttcctattgatattgatttgaatgaatacgcggttaaaaattacgatgtcaataagcttacagagctatttgaaaaattggaattttcaagcctcatctcagatttaaaagatgatagtcgtgatacaaaggatattaaagaatggcctgtaagagattttacatacgttaaaaatgttttaggaaagtttgatgttttgtcattgtatccattcatatatgatggaaagataaaagcagtatcatttgcttgcggtgacggatcgttttttgtagagattgatgattatgacaattttaaattgcttaataatgataagcttacgttgataggacacgatctgaaagattttttagtaaacatttcatactgcggtattgaacttaattgtaagattttagatacggccataatgacttatcttttaaatccgtctgagtcgaattacgacataagtcgcgtattgaaaaaatacttgaaagaggatttgcaaaacatagatgatatagtaggcaagggcaggaataaaaagagctacgatgacattgacaaaaagcttttagtcgattatatgtgttcagccgcatcaaacttatctaagttaaaagataagctcatgtcatttataaaagagatggagatggaagatcttttaaaaaatgtggaaattccgcttattgaagtgctaaaatctatggaggtgtacggctttacattagataaagatgtacttagaagtatttctaaagaaatagatgaaaagacagataagattgtaaaagatatttacgatgctgctggatacgaatttaatattaactctacaaagcagttatcagaatttttgtttgataaactgaatttgccagcaataaaaaagactaaaacagggtattcgactgacatggaagtccttgcagaacttataccgtacaatgacatagtaggagaaataatagaatatagacagcttatgaagcttaaatctacgtacatagatggcttcattcccatcatggatgaaaataatagggtccactctacgtttaaacaaacagttgctgctacagggagaattagctcaacagagcctaatctgcagaacatacctgtaagagaagaatttggcaggaggataagaaaggcatttgtatcaagttatgaagatgggcttataatatctgctgattattctcagattgagctaagggttcttgcacatctttcagaggatgaaaaacttattgagtcatttttgaacaacgaagatatacatttaaggacggcatcggaggtttttaaggtttcgaaagaagaagtgacaagtgaaatgagaaggcgggcgaaagctgtcaactttggtattgtatatggtataagcgattacggcttatctaaagacttaaagatttcgcgaaaagaagcgaaagaatacatagacaattattttgacaggtacaagggcgtcaaaaattacatcgactcaattgtcaaatttgcaaaggaaaatgggtatgttacgactatcttaaataggagaagatacataccggaaatcaattcaaaaaatgttaaccaaagatcttttggcgagagaatggcaatgaatacacctattcaaggtagcgctgcggatataataaagatgtcgatggttaaagtatacaatgaattaaaggaaagaggattgaaatcaagacttattcttcaggtgcacgatgagcttataattgacacacatcctgatgaagttgaaatagtcaaggagcttctaaaatcaataatggaaaatatcataaagttgaaagttcctttagttgtagatatagggcaagggaaaaactggtatgatgcaaaataaaaggatcc

SEQ ID NO: 778 - DNA, 2678 bp, Artificial Sequence
  Description of Artificial Sequence: Synthetic Clostridium thermosulfurogenes DNA Polymerase N795A
atgaaatacctgctgccgaccgctgctgctggtctgctgctcctcgctgcccagccggcgatggccatggcgaaatttttgatcatagatggtaatagcttgatgtacagggcgtattttgccctgcctgatttgatgaacagcgaaggaatgcatacaaatgccatatacggtttttcaatgatgcttcttaaattgctggaggaggagaaaccagactacatagcaatagctttcgataaaaaggcttctacatttaggcacaaggagtacagtgcttataaaggaacccgccagtcgatgccagaagagctgatagaacaggtggatattttaaaagatgtgataaatgcatttaacataaagaccatcgagatagagggatttgaagcagatgatatcattggtacagtatcaaaaattgcttccgaaagtgggatggatgtgcttatcgtcacaggcgacagagatgcgcttcagcttgtgtcggcaaatgtaaaagtaaaaatatgtaaaaaaggcataacgcagatggatgagtacgatgaaaaggcggtctttgaaaagtatgaagtgacgccgcttcaattcatagacttgaaagggcttatgggagacaaatcagacaacattccaggagtgcccaatataggggagaagacggccataaagcttgttaaagaatttggatcaattgaaaatttactgatgaatacagataagttaaaagggaaaataaaagaaaatgtagaaaacaatgcagaattagctgttttaagcaaacggcttgctacgattgagagaaatgttcctattgatattgatttgaatgaatacgcggttaaaaattacgatgtcaataagcttacagagctatttgaaaaattggaattttcaagcctcatctcagatttaaaagatgatagtcgtgatacaaaggatattaaagaatggcctgtaagagattttacatacgttaaaaatgttttaggaaagtttgatgttttgtcattgtatccattcatatatgatggaaagataaaagcagtatcatttgcttgcggtgacggatcgttttttgtagagattgatgattatgacaattttaaattgcttaataatgataagcttacgttgataggacacgatctgaaagattttttagtaaacatttcatactgcggtattgaacttaattgtaagattttagatacggccataatgacttatcttttaaatccgtctgagtcgaattacgacataagtcgcgtattgaaaaaatacttgaaagaggatttgcaaaacatagatgatatagtaggcaagggcaggaataaaaagagctacgatgacattgacaaaaagcttttagtcgattatatgtgttcagccgcatcaaacttatctaagttaaaagataagctcatgtcatttataaaagagatggagatggaagatcttttaaaaaatgtggaaattccgcttattgaagtgctaaaatctatggaggtgtacggctttacattagataaagatgtacttagaagtatttctaaagaaatagatgaaaagacagataagattgtaaaagatatttacgatgctgctggatacgaatttaatattaactctacaaagcagttatcagaatttttgtttgataaactgaatttgccagcaataaaaaagactaaaacagggtattcgactgacatggaagtccttgcagaacttataccgtacaatgacatagtaggagaaataatagaatatagacagcttatgaagcttaaatctacgtacatagatggcttcattcccatcatggatgaaaataatagggtccactctacgtttaaacaaacagttgctgctacagggagaattagctcaacagagcctaatctgcagaacatacctgtaagagaagaatttggcaggaggataagaaaggcatttgtatcaagttatgaagatgggcttataatatctgctgattattctcagattgagctaagggttcttgcacatctttcagaggatgaaaaacttattgagtcatttttgaacaacgaagatatacatttaaggacggcatcggaggtttttaaggtttcgaaagaagaagtgacaagtgaaatgagaaggcgggcgaaagctgtcaactttggtattgtatatggtataagcgattacggcttatctaaagacttaaagatttcgcgaaaagaagcgaaagaatacatagacaattattttgacaggtacaagggcgtcaaaaattacatcgactcaattgtcaaatttgcaaaggaaaatgggtatgttacgactatcttaaataggagaagatacataccggaaatcaattcaaaaaattttgctcaaagatcttttggcgagagaatggcaatgaatacacctattcaaggtagcgctgcggatataataaagatgtcgatggttaaagtatacaatgaattaaaggaaagaggattgaaatcaagacttattcttcaggtgcacgatgagcttataattgacacacatcctgatgaagttgaaatagtcaaggagcttctaaaatcaataatggaaaatatcataaagttgaaagttcctttagttgtagatatagggcaagggaaaaactggtatgatgcaaaataaaaggatcc

SEQ ID NO: 779 - DNA, 2678 bp, Artificial Sequence
  Description of Artificial Sequence: Synthetic Clostridium thermosulfurogenes DNA Polymerase N795R
atgaaatacctgctgccgaccgctgctgctggtctgctgctcctcgctgcccagccggcgatggccatggcgaaatttttgatcatagatggtaatagcttgatgtacagggcgtattttgccctgcctgatttgatgaacagcgaaggaatgcatacaaatgccatatacggtttttcaatgatgcttcttaaattgctggaggaggagaaaccagactacatagcaatagctttcgataaaaaggcttctacatttaggcacaaggagtacagtgcttataaaggaacccgccagtcgatgccagaagagctgatagaacaggtggatattttaaaagatgtgataaatgcatttaacataaagaccatcgagatagagggatttgaagcagatgatatcattggtacagtatcaaaaattgcttccgaaagtgggatggatgtgcttatcgtcacaggcgacagagatgcgcttcagcttgtgtcggcaaatgtaaaagtaaaaatatgtaaaaaaggcataacgcagatggatgagtacgatgaaaaggcggtctttgaaaagtatgaagtgacgccgcttcaattcatagacttgaaagggcttatgggagacaaatcagacaacattccaggagtgcccaatataggggagaagacggccataaagcttgttaaagaatttggatcaattgaaaatttactgatgaatacagataagttaaaagggaaaataaaagaaaatgtagaaaacaatgcagaattagctgttttaagcaaacggcttgctacgattgagagaaatgttcctattgatattgatttgaatgaatacgcggttaaaaattacgatgtcaataagcttacagagctatttgaaaaattggaattttcaagcctcatctcagatttaaaagatgatagtcgtgatacaaaggatattaaagaatggcctgtaagagattttacatacgttaaaaatgttttaggaaagtttgatgttttgtcattgtatccattcatatatgatggaaagataaaagcagtatcatttgcttgcggtgacggatcgttttttgtagagattgatgattatgacaattttaaattgcttaataatgataagcttacgttgataggacacgatctgaaagattttttagtaaacatttcatactgcggtattgaacttaattgtaagattttagatacggccataatgacttatcttttaaatccgtctgagtcgaattacgacataagtcgcgtattgaaaaaatacttgaaagaggatttgcaaaacatagatgatatagtaggcaagggcaggaataaaaagagctacgatgacattgacaaaaagcttttagtcgattatatgtgttcagccgcatcaaacttatctaagttaaaagataagctcatgtcatttataaaagagatggagatggaagatcttttaaaaaatgtggaaattccgcttattgaagtgctaaaatctatggaggtgtacggctttacattagataaagatgtacttagaagtatttctaaagaaatagatgaaaagacagataagattgtaaaagatatttacgatgctgctggatacgaatttaatattaactctacaaagcagttatcagaatttttgtttgataaactgaatttgccagcaataaaaaagactaaaacagggtattcgactgacatggaagtccttgcagaacttataccgtacaatgacatagtaggagaaataatagaatatagacagcttatgaagcttaaatctacgtacatagatggcttcattcccatcatggatgaaaataatagggtccactctacgtttaaacaaacagttgctgctacagggagaattagctcaacagagcctaatctgcagaacatacctgtaagagaagaatttggcaggaggataagaaaggcatttgtatcaagttatgaagatgggcttataatatctgctgattattctcagattgagctaagggttcttgcacatctttcagaggatgaaaaacttattgagtcatttttgaacaacgaagatatacatttaaggacggcatcggaggtttttaaggtttcgaaagaagaagtgacaagtgaaatgagaaggcgggcgaaagctgtcaactttggtattgtatatggtataagcgattacggcttatctaaagacttaaagatttcgcgaaaagaagcgaaagaatacatagacaattattttgacaggtacaagggcgtcaaaaattacatcgactcaattgtcaaatttgcaaaggaaaatgggtatgttacgactatcttaaataggagaagatacataccggaaatcaattcaaaaaattttcgtcaaagatcttttggcgagagaatggcaatgaatacacctattcaaggtagcgctgcggatataataaagatgtcgatggttaaagtatacaatgaattaaaggaaagaggattgaaatcaagacttattcttcaggtgcacgatgagcttataattgacacacatcctgatgaagttgaaatagtcaaggagcttctaaaatcaataatggaaaatatcataaagttgaaagttcctttagttgtagatatagggcaagggaaaaactggtatgatgcaaaataaaaggatcc

SEQ ID NO: 780 - DNA, 2678 bp, Artificial Sequence
  Description of Artificial Sequence: Synthetic Clostridium thermosulfurogenes DNA Polymerase N795D
atgaaatacctgctgccgaccgctgctgctggtctgctgctcctcgctgcccagccggcgatggccatggcgaaatttttgatcatagatggtaatagcttgatgtacagggcgtattttgccctgcctgatttgatgaacagcgaaggaatgcatacaaatgccatatacggtttttcaatgatgcttcttaaattgctggaggaggagaaaccagactacatagcaatagctttcgataaaaaggcttctacatttaggcacaaggagtacagtgcttataaaggaacccgccagtcgatgccagaagagctgatagaacaggtggatattttaaaagatgtgataaatgcatttaacataaagaccatcgagatagagggatttgaagcagatgatatcattggtacagtatcaaaaattgcttccgaaagtgggatggatgtgcttatcgtcacaggcgacagagatgcgcttcagcttgtgtcggcaaatgtaaaagtaaaaatatgtaaaaaaggcataacgcagatggatgagtacgatgaaaaggcggtctttgaaaagtatgaagtgacgccgcttcaattcatagacttgaaagggcttatgggagacaaatcagacaacattccaggagtgcccaatataggggagaagacggccataaagcttgttaaagaatttggatcaattgaaaatttactgatgaatacagataagttaaaagggaaaataaaagaaaatgtagaaaacaatgcagaattagctgttttaagcaaacggcttgctacgattgagagaaatgttcctattgatattgatttgaatgaatacgcggttaaaaattacgatgtcaataagcttacagagctatttgaaaaattggaattttcaagcctcatctcagatttaaaagatgatagtcgtgatacaaaggatattaaagaatggcctgtaagagattttacatacgttaaaaatgttttaggaaagtttgatgttttgtcattgtatccattcatatatgatggaaagataaaagcagtatcatttgcttgcggtgacggatcgttttttgtagagattgatgattatgacaattttaaattgcttaataatgataagcttacgttgataggacacgatctgaaagattttttagtaaacatttcatactgcggtattgaacttaattgtaagattttagatacggccataatgacttatcttttaaatccgtctgagtcgaattacgacataagtcgcgtattgaaaaaatacttgaaagaggatttgcaaaacatagatgatatagtaggcaagggcaggaataaaaagagctacgatgacattgacaaaaagcttttagtcgattatatgtgttcagccgcatcaaacttatctaagttaaaagataagctcatgtcatttataaaagagatggagatggaagatcttttaaaaaatgtggaaattccgcttattgaagtgctaaaatctatggaggtgtacggctttacattagataaagatgtacttagaagtatttctaaagaaatagatgaaaagacagataagattgtaaaagatatttacgatgctgctggatacgaatttaatattaactctacaaagcagttatcagaatttttgtttgataaactgaatttgccagcaataaaaaagactaaaacagggtattcgactgacatggaagtccttgcagaacttataccgtacaatgacatagtaggagaaataatagaatatagacagcttatgaagcttaaatctacgtacatagatggcttcattcccatcatggatgaaaataatagggtccactctacgtttaaacaaacagttgctgctacagggagaattagctcaacagagcctaatctgcagaacatacctgtaagagaagaatttggcaggaggataagaaaggcatttgtatcaagttatgaagatgggcttataatatctgctgattattctcagattgagctaagggttcttgcacatctttcagaggatgaaaaacttattgagtcatttttgaacaacgaagatatacatttaaggacggcatcggaggtttttaaggtttcgaaagaagaagtgacaagtgaaatgagaaggcgggcgaaagctgtcaactttggtattgtatatggtataagcgattacggcttatctaaagacttaaagatttcgcgaaaagaagcgaaagaatacatagacaattattttgacaggtacaagggcgtcaaaaattacatcgactcaattgtcaaatttgcaaaggaaaatgggtatgttacgactatcttaaataggagaagatacataccggaaatcaattcaaaaaattttgatcaaagatcttttggcgagagaatggcaatgaatacacctattcaaggtagcgctgcggatataataaagatgtcgatggttaaagtatacaatgaattaaaggaaagaggattgaaatcaagacttattcttcaggtgcacgatgagcttataattgacacacatcctgatgaagttgaaatagtcaaggagcttctaaaatcaataatggaaaatatcataaagttgaaagttcctttagttgtagatatagggcaagggaaaaactggtatgatgcaaaataaaaggatcc

SEQ ID NO: 781 - DNA, 2678 bp, Artificial Sequence
  Description of Artificial Sequence: Synthetic Clostridium thermosulfurogenes DNA Polymerase N795C
atgaaatacctgctgccgaccgctgctgctggtctgctgctcctcgctgcccagccggcgatggccatggcgaaatttttgatcatagatggtaatagcttgatgtacagggcgtattttgccctgcctgatttgatgaacagcgaaggaatgcatacaaatgccatatacggtttttcaatgatgcttcttaaattgctggaggaggagaaaccagactacatagcaatagctttcgataaaaaggcttctacatttaggcacaaggagtacagtgcttataaaggaacccgccagtcgatgccagaagagctgatagaacaggtggatattttaaaagatgtgataaatgcatttaacataaagaccatcgagatagagggatttgaagcagatgatatcattggtacagtatcaaaaattgcttccgaaagtgggatggatgtgcttatcgtcacaggcgacagagatgcgcttcagcttgtgtcggcaaatgtaaaagtaaaaatatgtaaaaaaggcataacgcagatggatgagtacgatgaaaaggcggtctttgaaaagtatgaagtgacgccgcttcaattcatagacttgaaagggcttatgggagacaaatcagacaacattccaggagtgcccaatataggggagaagacggccataaagcttgttaaagaatttggatcaattgaaaatttactgatgaatacagataagttaaaagggaaaataaaagaaaatgtagaaaacaatgcagaattagctgttttaagcaaacggcttgctacgattgagagaaatgttcctattgatattgatttgaatgaatacgcggttaaaaattacgatgtcaataagcttacagagctatttgaaaaattggaattttcaagcctcatctcagatttaaaagatgatagtcgtgatacaaaggatattaaagaatggcctgtaagagattttacatacgttaaaaatgttttaggaaagtttgatgttttgtcattgtatccattcatatatgatggaaagataaaagcagtatcatttgcttgcggtgacggatcgttttttgtagagattgatgattatgacaattttaaattgcttaataatgataagcttacgttgataggacacgatctgaaagattttttagtaaacatttcatactgcggtattgaacttaattgtaagattttagatacggccataatgacttatcttttaaatccgtctgagtcgaattacgacataagtcgcgtattgaaaaaatacttgaaagaggatttgcaaaacatagatgatatagtaggcaagggcaggaataaaaagagctacgatgacattgacaaaaagcttttagtcgattatatgtgttcagccgcatcaaacttatctaagttaaaagataagctcatgtcatttataaaagagatggagatggaagatcttttaaaaaatgtggaaattccgcttattgaagtgctaaaatctatggaggtgtacggctttacattagataaagatgtacttagaagtatttctaaagaaatagatgaaaagacagataagattgtaaaagatatttacgatgctgctggatacgaatttaatattaactctacaaagcagttatcagaatttttgtttgataaactgaatttgccagcaataaaaaagactaaaacagggtattcgactgacatggaagtccttgcagaacttataccgtacaatgacatagtaggagaaataatagaatatagacagcttatgaagcttaaatctacgtacatagatggcttcattcccatcatggatgaaaataatagggtccactctacgtttaaacaaacagttgctgctacagggagaattagctcaacagagcctaatctgcagaacatacctgtaagagaagaatttggcaggaggataagaaaggcatttgtatcaagttatgaagatgggcttataatatctgctgattattctcagattgagctaagggttcttgcacatctttcagaggatgaaaaacttattgagtcatttttgaacaacgaagatatacatttaaggacggcatcggaggtttttaaggtttcgaaagaagaagtgacaagtgaaatgagaaggcgggcgaaagctgtcaactttggtattgtatatggtataagcgattacggcttatctaaagacttaaagatttcgcgaaaagaagcgaaagaatacatagacaattattttgacaggtacaagggcgtcaaaaattacatcgactcaattgtcaaatttgcaaaggaaaatgggtatgttacgactatcttaaataggagaagatacataccggaaatcaattcaaaaaatttttgtcaaagatcttttggcgagagaatggcaatgaatacacctattcaaggtagcgctgcggatataataaagatgtcgatggttaaagtatacaatgaattaaaggaaagaggattgaaatcaagacttattcttcaggtgcacgatgagcttataattgacacacatcctgatgaagttgaaatagtcaaggagcttctaaaatcaataatggaaaatatcataaagttgaaagttcctttagttgtagatatagggcaagggaaaaactggtatgatgcaaaataaaaggatcc

SEQ ID NO: 782 - DNA, 2678 bp, Artificial Sequence
  Description of Artificial Sequence: Synthetic Clostridium thermosulfurogenes DNA Polymerase N795E
atgaaatacctgctgccgaccgctgctgctggtctgctgctcctcgctgcccagccggcgatggccatggcgaaatttttgatcatagatggtaatagcttgatgtacagggcgtattttgccctgcctgatttgatgaacagcgaaggaatgcatacaaatgccatatacggtttttcaatgatgcttcttaaattgctggaggaggagaaaccagactacatagcaatagctttcgataaaaaggcttctacatttaggcacaaggagtacagtgcttataaaggaacccgccagtcgatgccagaagagctgatagaacaggtggatattttaaaagatgtgataaatgcatttaacataaagaccatcgagatagagggatttgaagcagatgatatcattggtacagtatcaaaaattgcttccgaaagtgggatggatgtgcttatcgtcacaggcgacagagatgcgcttcagcttgtgtcggcaaatgtaaaagtaaaaatatgtaaaaaaggcataacgcagatggatgagtacgatgaaaaggcggtctttgaaaagtatgaagtgacgccgcttcaattcatagacttgaaagggcttatgggagacaaatcagacaacattccaggagtgcccaatataggggagaagacggccataaagcttgttaaagaatttggatcaattgaaaatttactgatgaatacagataagttaaaagggaaaataaaagaaaatgtagaaaacaatgcagaattagctgttttaagcaaacggcttgctacgattgagagaaatgttcctattgatattgatttgaatgaatacgcggttaaaaattacgatgtcaataagcttacagagctatttgaaaaattggaattttcaagcctcatctcagatttaaaagatgatagtcgtgatacaaaggatattaaagaatggcctgtaagagattttacatacgttaaaaatgttttaggaaagtttgatgttttgtcattgtatccattcatatatgatggaaagataaaagcagtatcatttgcttgcggtgacggatcgttttttgtagagattgatgattatgacaattttaaattgcttaataatgataagcttacgttgataggacacgatctgaaagattttttagtaaacatttcatactgcggtattgaacttaattgtaagattttagatacggccataatgacttatcttttaaatccgtctgagtcgaattacgacataagtcgcgtattgaaaaaatacttgaaagaggatttgcaaaacatagatgatatagtaggcaagggcaggaataaaaagagctacgatgacattgacaaaaagcttttagtcgattatatgtgttcagccgcatcaaacttatctaagttaaaagataagctcatgtcatttataaaagagatggagatggaagatcttttaaaaaatgtggaaattccgcttattgaagtgctaaaatctatggaggtgtacggctttacattagataaagatgtacttagaagtatttctaaagaaatagatgaaaagacagataagattgtaaaagatatttacgatgctgctggatacgaatttaatattaactctacaaagcagttatcagaatttttgtttgataaactgaatttgccagcaataaaaaagactaaaacagggtattcgactgacatggaagtccttgcagaacttataccgtacaatgacatagtaggagaaataatagaatatagacagcttatgaagcttaaatctacgtacatagatggcttcattcccatcatggatgaaaataatagggtccactctacgtttaaacaaacagttgctgctacagggagaattagctcaacagagcctaatctgcagaacatacctgtaagagaagaatttggcaggaggataagaaaggcatttgtatcaagttatgaagatgggcttataatatctgctgattattctcagattgagctaagggttcttgcacatctttcagaggatgaaaaacttattgagtcatttttgaacaacgaagatatacatttaaggacggcatcggaggtttttaaggtttcgaaagaagaagtgacaagtgaaatgagaaggcgggcgaaagctgtcaactttggtattgtatatggtataagcgattacggcttatctaaagacttaaagatttcgcgaaaagaagcgaaagaatacatagacaattattttgacaggtacaagggcgtcaaaaattacatcgactcaattgtcaaatttgcaaaggaaaatgggtatgttacgactatcttaaataggagaagatacataccggaaatcaattcaaaaaattttgaacaaagatcttttggcgagagaatggcaatgaatacacctattcaaggtagcgctgcggatataataaagatgtcgatggttaaagtatacaatgaattaaaggaaagaggattgaaatcaagacttattcttcaggtgcacgatgagcttataattgacacacatcctgatgaagttgaaatagtcaaggagcttctaaaatcaataatggaaaatatcataaagttgaaagttcctttagttgtagatatagggcaagggaaaaactggtatgatgcaaaataaaaggatcc

SEQ ID NO: 783 - DNA, 2678 bp, Artificial Sequence
  Description of Artificial Sequence: Synthetic Clostridium thermosulfurogenes DNA Polymerase N795Q
atgaaatacctgctgccgaccgctgctgctggtctgctgctcctcgctgcccagccggcgatggccatggcgaaatttttgatcatagatggtaatagcttgatgtacagggcgtattttgccctgcctgatttgatgaacagcgaaggaatgcatacaaatgccatatacggtttttcaatgatgcttcttaaattgctggaggaggagaaaccagactacatagcaatagctttcgataaaaaggcttctacatttaggcacaaggagtacagtgcttataaaggaacccgccagtcgatgccagaagagctgatagaacaggtggatattttaaaagatgtgataaatgcatttaacataaagaccatcgagatagagggatttgaagcagatgatatcattggtacagtatcaaaaattgcttccgaaagtgggatggatgtgcttatcgtcacaggcgacagagatgcgcttcagcttgtgtcggcaaatgtaaaagtaaaaatatgtaaaaaaggcataacgcagatggatgagtacgatgaaaaggcggtctttgaaaagtatgaagtgacgccgcttcaattcatagacttgaaagggcttatgggagacaaatcagacaacattccaggagtgcccaatataggggagaagacggccataaagcttgttaaagaatttggatcaattgaaaatttactgatgaatacagataagttaaaagggaaaataaaagaaaatgtagaaaacaatgcagaattagctgttttaagcaaacggcttgctacgattgagagaaatgttcctattgatattgatttgaatgaatacgcggttaaaaattacgatgtcaataagcttacagagctatttgaaaaattggaattttcaagcctcatctcagatttaaaagatgatagtcgtgatacaaaggatattaaagaatggcctgtaagagattttacatacgttaaaaatgttttaggaaagtttgatgttttgtcattgtatccattcatatatgatggaaagataaaagcagtatcatttgcttgcggtgacggatcgttttttgtagagattgatgattatgacaattttaaattgcttaataatgataagcttacgttgataggacacgatctgaaagattttttagtaaacatttcatactgcggtattgaacttaattgtaagattttagatacggccataatgacttatcttttaaatccgtctgagtcgaattacgacataagtcgcgtattgaaaaaatacttgaaagaggatttgcaaaacatagatgatatagtaggcaagggcaggaataaaaagagctacgatgacattgacaaaaagcttttagtcgattatatgtgttcagccgcatcaaacttatctaagttaaaagataagctcatgtcatttataaaagagatggagatggaagatcttttaaaaaatgtggaaattccgcttattgaagtgctaaaatctatggaggtgtacggctttacattagataaagatgtacttagaagtatttctaaagaaatagatgaaaagacagataagattgtaaaagatatttacgatgctgctggatacgaatttaatattaactctacaaagcagttatcagaatttttgtttgataaactgaatttgccagcaataaaaaagactaaaacagggtattcgactgacatggaagtccttgcagaacttataccgtacaatgacatagtaggagaaataatagaatatagacagcttatgaagcttaaatctacgtacatagatggcttcattcccatcatggatgaaaataatagggtccactctacgtttaaacaaacagttgctgctacagggagaattagctcaacagagcctaatctgcagaacatacctgtaagagaagaatttggcaggaggataagaaaggcatttgtatcaagttatgaagatgggcttataatatctgctgattattctcagattgagctaagggttcttgcacatctttcagaggatgaaaaacttattgagtcatttttgaacaacgaagatatacatttaaggacggcatcggaggtttttaaggtttcgaaagaagaagtgacaagtgaaatgagaaggcgggcgaaagctgtcaactttggtattgtatatggtataagcgattacggcttatctaaagacttaaagatttcgcgaaaagaagcgaaagaatacatagacaattattttgacaggtacaagggcgtcaaaaattacatcgactcaattgtcaaatttgcaaaggaaaatgggtatgttacgactatcttaaataggagaagatacataccggaaatcaattcaaaaaattttcaacaaagatcttttggcgagagaatggcaatgaatacacctattcaaggtagcgctgcggatataataaagatgtcgatggttaaagtatacaatgaattaaaggaaagaggattgaaatcaagacttattcttcaggtgcacgatgagcttataattgacacacatcctgatgaagttgaaatagtcaaggagcttctaaaatcaataatggaaaatatcataaagttgaaagttcctttagttgtagatatagggcaagggaaaaactggtatgatgcaaaataaaaggatcc

SEQ ID NO: 784 - DNA, 2678 bp, Artificial Sequence
  Description of Artificial Sequence: Synthetic Clostridium thermosulfurogenes DNA Polymerase N795G
atgaaatacctgctgccgaccgctgctgctggtctgctgctcctcgctgcccagccggcgatggccatggcgaaatttttgatcatagatggtaatagcttgatgtacagggcgtattttgccctgcctgatttgatgaacagcgaaggaatgcatacaaatgccatatacggtttttcaatgatgcttcttaaattgctggaggaggagaaaccagactacatagcaatagctttcgataaaaaggcttctacatttaggcacaaggagtacagtgcttataaaggaacccgccagtcgatgccagaagagctgatagaacaggtggatattttaaaagatgtgataaatgcatttaacataaagaccatcgagatagagggatttgaagcagatgatatcattggtacagtatcaaaaattgcttccgaaagtgggatggatgtgcttatcgtcacaggcgacagagatgcgcttcagcttgtgtcggcaaatgtaaaagtaaaaatatgtaaaaaaggcataacgcagatggatgagtacgatgaaaaggcggtctttgaaaagtatgaagtgacgccgcttcaattcatagacttgaaagggcttatgggagacaaatcagacaacattccaggagtgcccaatataggggagaagacggccataaagcttgttaaagaatttggatcaattgaaaatttactgatgaatacagataagttaaaagggaaaataaaagaaaatgtagaaaacaatgcagaattagctgttttaagcaaacggcttgctacgattgagagaaatgttcctattgatattgatttgaatgaatacgcggttaaaaattacgatgtcaataagcttacagagctatttgaaaaattggaattttcaagcctcatctcagatttaaaagatgatagtcgtgatacaaaggatattaaagaatggcctgtaagagattttacatacgttaaaaatgttttaggaaagtttgatgttttgtcattgtatccattcatatatgatggaaagataaaagcagtatcatttgcttgcggtgacggatcgttttttgtagagattgatgattatgacaattttaaattgcttaataatgataagcttacgttgataggacacgatctgaaagattttttagtaaacatttcatactgcggtattgaacttaattgtaagattttagatacggccataatgacttatcttttaaatccgtctgagtcgaattacgacataagtcgcgtattgaaaaaatacttgaaagaggatttgcaaaacatagatgatatagtaggcaagggcaggaataaaaagagctacgatgacattgacaaaaagcttttagtcgattatatgtgttcagccgcatcaaacttatctaagttaaaagataagctcatgtcatttataaaagagatggagatggaagatcttttaaaaaatgtggaaattccgcttattgaagtgctaaaatctatggaggtgtacggctttacattagataaagatgtacttagaagtatttctaaagaaatagatgaaaagacagataagattgtaaaagatatttacgatgctgctggatacgaatttaatattaactctacaaagcagttatcagaatttttgtttgataaactgaatttgccagcaataaaaaagactaaaacagggtattcgactgacatggaagtccttgcagaacttataccgtacaatgacatagtaggagaaataatagaatatagacagcttatgaagcttaaatctacgtacatagatggcttcattcccatcatggatgaaaataatagggtccactctacgtttaaacaaacagttgctgctacagggagaattagctcaacagagcctaatctgcagaacatacctgtaagagaagaatttggcaggaggataagaaaggcatttgtatcaagttatgaagatgggcttataatatctgctgattattctcagattgagctaagggttcttgcacatctttcagaggatgaaaaacttattgagtcatttttgaacaacgaagatatacatttaaggacggcatcggaggtttttaaggtttcgaaagaagaagtgacaagtgaaatgagaaggcgggcgaaagctgtcaactttggtattgtatatggtataagcgattacggcttatctaaagacttaaagatttcgcgaaaagaagcgaaagaatacatagacaattattttgacaggtacaagggcgtcaaaaattacatcgactcaattgtcaaatttgcaaaggaaaatgggtatgttacgactatcttaaataggagaagatacataccggaaatcaattcaaaaaattttggtcaaagatcttttggcgagagaatggcaatgaatacacctattcaaggtagcgctgcggatataataaagatgtcgatggttaaagtatacaatgaattaaaggaaagaggattgaaatcaagacttattcttcaggtgcacgatgagcttataattgacacacatcctgatgaagttgaaatagtcaaggagcttctaaaatcaataatggaaaatatcataaagttgaaagttcctttagttgtagatatagggcaagggaaaaactggtatgatgcaaaataaaaggatcc

SEQ ID NO: 785 - DNA, 2678 bp, Artificial Sequence
  Description of Artificial Sequence: Synthetic Clostridium thermosulfurogenes DNA Polymerase N795H
atgaaatacctgctgccgaccgctgctgctggtctgctgctcctcgctgcccagccggcgatggccatggcgaaatttttgatcatagatggtaatagcttgatgtacagggcgtattttgccctgcctgatttgatgaacagcgaaggaatgcatacaaatgccatatacggtttttcaatgatgcttcttaaattgctggaggaggagaaaccagactacatagcaatagctttcgataaaaaggcttctacatttaggcacaaggagtacagtgcttataaaggaacccgccagtcgatgccagaagagctgatagaacaggtggatattttaaaagatgtgataaatgcatttaacataaagaccatcgagatagagggatttgaagcagatgatatcattggtacagtatcaaaaattgcttccgaaagtgggatggatgtgcttatcgtcacaggcgacagagatgcgcttcagcttgtgtcggcaaatgtaaaagtaaaaatatgtaaaaaaggcataacgcagatggatgagtacgatgaaaaggcggtctttgaaaagtatgaagtgacgccgcttcaattcatagacttgaaagggcttatgggagacaaatcagacaacattccaggagtgcccaatataggggagaagacggccataaagcttgttaaagaatttggatcaattgaaaatttactgatgaatacagataagttaaaagggaaaataaaagaaaatgtagaaaacaatgcagaattagctgttttaagcaaacggcttgctacgattgagagaaatgttcctattgatattgatttgaatgaatacgcggttaaaaattacgatgtcaataagcttacagagctatttgaaaaattggaattttcaagcctcatctcagatttaaaagatgatagtcgtgatacaaaggatattaaagaatggcctgtaagagattttacatacgttaaaaatgttttaggaaagtttgatgttttgtcattgtatccattcatatatgatggaaagataaaagcagtatcatttgcttgcggtgacggatcgttttttgtagagattgatgattatgacaattttaaattgcttaataatgataagcttacgttgataggacacgatctgaaagattttttagtaaacatttcatactgcggtattgaacttaattgtaagattttagatacggccataatgacttatcttttaaatccgtctgagtcgaattacgacataagtcgcgtattgaaaaaatacttgaaagaggatttgcaaaacatagatgatatagtaggcaagggcaggaataaaaagagctacgatgacattgacaaaaagcttttagtcgattatatgtgttcagccgcatcaaacttatctaagttaaaagataagctcatgtcatttataaaagagatggagatggaagatcttttaaaaaatgtggaaattccgcttattgaagtgctaaaatctatggaggtgtacggctttacattagataaagatgtacttagaagtatttctaaagaaatagatgaaaagacagataagattgtaaaagatatttacgatgctgctggatacgaatttaatattaactctacaaagcagttatcagaatttttgtttgataaactgaatttgccagcaataaaaaagactaaaacagggtattcgactgacatggaagtccttgcagaacttataccgtacaatgacatagtaggagaaataatagaatatagacagcttatgaagcttaaatctacgtacatagatggcttcattcccatcatggatgaaaataatagggtccactctacgtttaaacaaacagttgctgctacagggagaattagctcaacagagcctaatctgcagaacatacctgtaagagaagaatttggcaggaggataagaaaggcatttgtatcaagttatgaagatgggcttataatatctgctgattattctcagattgagctaagggttcttgcacatctttcagaggatgaaaaacttattgagtcatttttgaacaacgaagatatacatttaaggacggcatcggaggtttttaaggtttcgaaagaagaagtgacaagtgaaatgagaaggcgggcgaaagctgtcaactttggtattgtatatggtataagcgattacggcttatctaaagacttaaagatttcgcgaaaagaagcgaaagaatacatagacaattattttgacaggtacaagggcgtcaaaaattacatcgactcaattgtcaaatttgcaaaggaaaatgggtatgttacgactatcttaaataggagaagatacataccggaaatcaattcaaaaaattttcatcaaagatcttttggcgagagaatggcaatgaatacacctattcaaggtagcgctgcggatataataaagatgtcgatggttaaagtatacaatgaattaaaggaaagaggattgaaatcaagacttattcttcaggtgcacgatgagcttataattgacacacatcctgatgaagttgaaatagtcaaggagcttctaaaatcaataatggaaaatatcataaagttgaaagttcctttagttgtagatatagggcaagggaaaaactggtatgatgcaaaataaaaggatcc

SEQ ID NO: 786 - DNA, 2678 bp, Artificial Sequence
  Description of Artificial Sequence: Synthetic Clostridium thermosulfurogenes DNA Polymerase N795I
atgaaatacctgctgccgaccgctgctgctggtctgctgctcctcgctgcccagccggcgatggccatggcgaaatttttgatcatagatggtaatagcttgatgtacagggcgtattttgccctgcctgatttgatgaacagcgaaggaatgcatacaaatgccatatacggtttttcaatgatgcttcttaaattgctggaggaggagaaaccagactacatagcaatagctttcgataaaaaggcttctacatttaggcacaaggagtacagtgcttataaaggaacccgccagtcgatgccagaagagctgatagaacaggtggatattttaaaagatgtgataaatgcatttaacataaagaccatcgagatagagggatttgaagcagatgatatcattggtacagtatcaaaaattgcttccgaaagtgggatggatgtgcttatcgtcacaggcgacagagatgcgcttcagcttgtgtcggcaaatgtaaaagtaaaaatatgtaaaaaaggcataacgcagatggatgagtacgatgaaaaggcggtctttgaaaagtatgaagtgacgccgcttcaattcatagacttgaaagggcttatgggagacaaatcagacaacattccaggagtgcccaatataggggagaagacggccataaagcttgttaaagaatttggatcaattgaaaatttactgatgaatacagataagttaaaagggaaaataaaagaaaatgtagaaaacaatgcagaattagctgttttaagcaaacggcttgctacgattgagagaaatgttcctattgatattgatttgaatgaatacgcggttaaaaattacgatgtcaataagcttacagagctatttgaaaaattggaattttcaagcctcatctcagatttaaaagatgatagtcgtgatacaaaggatattaaagaatggcctgtaagagattttacatacgttaaaaatgttttaggaaagtttgatgttttgtcattgtatccattcatatatgatggaaagataaaagcagtatcatttgcttgcggtgacggatcgttttttgtagagattgatgattatgacaattttaaattgcttaataatgataagcttacgttgataggacacgatctgaaagattttttagtaaacatttcatactgcggtattgaacttaattgtaagattttagatacggccataatgacttatcttttaaatccgtctgagtcgaattacgacataagtcgcgtattgaaaaaatacttgaaagaggatttgcaaaacatagatgatatagtaggcaagggcaggaataaaaagagctacgatgacattgacaaaaagcttttagtcgattatatgtgttcagccgcatcaaacttatctaagttaaaagataagctcatgtcatttataaaagagatggagatggaagatcttttaaaaaatgtggaaattccgcttattgaagtgctaaaatctatggaggtgtacggctttacattagataaagatgtacttagaagtatttctaaagaaatagatgaaaagacagataagattgtaaaagatatttacgatgctgctggatacgaatttaatattaactctacaaagcagttatcagaatttttgtttgataaactgaatttgccagcaataaaaaagactaaaacagggtattcgactgacatggaagtccttgcagaacttataccgtacaatgacatagtaggagaaataatagaatatagacagcttatgaagcttaaatctacgtacatagatggcttcattcccatcatggatgaaaataatagggtccactctacgtttaaacaaacagttgctgctacagggagaattagctcaacagagcctaatctgcagaacatacctgtaagagaagaatttggcaggaggataagaaaggcatttgtatcaagttatgaagatgggcttataatatctgctgattattctcagattgagctaagggttcttgcacatctttcagaggatgaaaaacttattgagtcatttttgaacaacgaagatatacatttaaggacggcatcggaggtttttaaggtttcgaaagaagaagtgacaagtgaaatgagaaggcgggcgaaagctgtcaactttggtattgtatatggtataagcgattacggcttatctaaagacttaaagatttcgcgaaaagaagcgaaagaatacatagacaattattttgacaggtacaagggcgtcaaaaattacatcgactcaattgtcaaatttgcaaaggaaaatgggtatgttacgactatcttaaataggagaagatacataccggaaatcaattcaaaaaattttattcaaagatcttttggcgagagaatggcaatgaatacacctattcaaggtagcgctgcggatataataaagatgtcgatggttaaagtatacaatgaattaaaggaaagaggattgaaatcaagacttattcttcaggtgcacgatgagcttataattgacacacatcctgatgaagttgaaatagtcaaggagcttctaaaatcaataatggaaaatatcataaagttgaaagttcctttagttgtagatatagggcaagggaaaaactggtatgatgcaaaataaaaggatcc

SEQ ID NO: 787 - DNA, 2678 bp, Artificial Sequence
  Description of Artificial Sequence: Synthetic Clostridium thermosulfurogenes DNA Polymerase N795L
atgaaatacctgctgccgaccgctgctgctggtctgctgctcctcgctgcccagccggcgatggccatggcgaaatttttgatcatagatggtaatagcttgatgtacagggcgtattttgccctgcctgatttgatgaacagcgaaggaatgcatacaaatgccatatacggtttttcaatgatgcttcttaaattgctggaggaggagaaaccagactacatagcaatagctttcgataaaaaggcttctacatttaggcacaaggagtacagtgcttataaaggaacccgccagtcgatgccagaagagctgatagaacaggtggatattttaaaagatgtgataaatgcatttaacataaagaccatcgagatagagggatttgaagcagatgatatcattggtacagtatcaaaaattgcttccgaaagtgggatggatgtgcttatcgtcacaggcgacagagatgcgcttcagcttgtgtcggcaaatgtaaaagtaaaaatatgtaaaaaaggcataacgcagatggatgagtacgatgaaaaggcggtctttgaaaagtatgaagtgacgccgcttcaattcatagacttgaaagggcttatgggagacaaatcagacaacattccaggagtgcccaatataggggagaagacggccataaagcttgttaaagaatttggatcaattgaaaatttactgatgaatacagataagttaaaagggaaaataaaagaaaatgtagaaaacaatgcagaattagctgttttaagcaaacggcttgctacgattgagagaaatgttcctattgatattgatttgaatgaatacgcggttaaaaattacgatgtcaataagcttacagagctatttgaaaaattggaattttcaagcctcatctcagatttaaaagatgatagtcgtgatacaaaggatattaaagaatggcctgtaagagattttacatacgttaaaaatgttttaggaaagtttgatgttttgtcattgtatccattcatatatgatggaaagataaaagcagtatcatttgcttgcggtgacggatcgttttttgtagagattgatgattatgacaattttaaattgcttaataatgataagcttacgttgataggacacgatctgaaagattttttagtaaacatttcatactgcggtattgaacttaattgtaagattttagatacggccataatgacttatcttttaaatccgtctgagtcgaattacgacataagtcgcgtattgaaaaaatacttgaaagaggatttgcaaaacatagatgatatagtaggcaagggcaggaataaaaagagctacgatgacattgacaaaaagcttttagtcgattatatgtgttcagccgcatcaaacttatctaagttaaaagataagctcatgtcatttataaaagagatggagatggaagatcttttaaaaaatgtggaaattccgcttattgaagtgctaaaatctatggaggtgtacggctttacattagataaagatgtacttagaagtatttctaaagaaatagatgaaaagacagataagattgtaaaagatatttacgatgctgctggatacgaatttaatattaactctacaaagcagttatcagaatttttgtttgataaactgaatttgccagcaataaaaaagactaaaacagggtattcgactgacatggaagtccttgcagaacttataccgtacaatgacatagtaggagaaataatagaatatagacagcttatgaagcttaaatctacgtacatagatggcttcattcccatcatggatgaaaataatagggtccactctacgtttaaacaaacagttgctgctacagggagaattagctcaacagagcctaatctgcagaacatacctgtaagagaagaatttggcaggaggataagaaaggcatttgtatcaagttatgaagatgggcttataatatctgctgattattctcagattgagctaagggttcttgcacatctttcagaggatgaaaaacttattgagtcatttttgaacaacgaagatatacatttaaggacggcatcggaggtttttaaggtttcgaaagaagaagtgacaagtgaaatgagaaggcgggcgaaagctgtcaactttggtattgtatatggtataagcgattacggcttatctaaagacttaaagatttcgcgaaaagaagcgaaagaatacatagacaattattttgacaggtacaagggcgtcaaaaattacatcgactcaattgtcaaatttgcaaaggaaaatgggtatgttacgactatcttaaataggagaagatacataccggaaatcaattcaaaaaattttcttcaaagatcttttggcgagagaatggcaatgaatacacctattcaaggtagcgctgcggatataataaagatgtcgatggttaaagtatacaatgaattaaaggaaagaggattgaaatcaagacttattcttcaggtgcacgatgagcttataattgacacacatcctgatgaagttgaaatagtcaaggagcttctaaaatcaataatggaaaatatcataaagttgaaagttcctttagttgtagatatagggcaagggaaaaactggtatgatgcaaaataaaaggatcc

SEQ ID NO: 788 - DNA, 2678 bp, Artificial Sequence
  Description of Artificial Sequence: Synthetic Clostridium thermosulfurogenes DNA Polymerase N795K
atgaaatacctgctgccgaccgctgctgctggtctgctgctcctcgctgcccagccggcgatggccatggcgaaatttttgatcatagatggtaatagcttgatgtacagggcgtattttgccctgcctgatttgatgaacagcgaaggaatgcatacaaatgccatatacggtttttcaatgatgcttcttaaattgctggaggaggagaaaccagactacatagcaatagctttcgataaaaaggcttctacatttaggcacaaggagtacagtgcttataaaggaacccgccagtcgatgccagaagagctgatagaacaggtggatattttaaaagatgtgataaatgcatttaacataaagaccatcgagatagagggatttgaagcagatgatatcattggtacagtatcaaaaattgcttccgaaagtgggatggatgtgcttatcgtcacaggcgacagagatgcgcttcagcttgtgtcggcaaatgtaaaagtaaaaatatgtaaaaaaggcataacgcagatggatgagtacgatgaaaaggcggtctttgaaaagtatgaagtgacgccgcttcaattcatagacttgaaagggcttatgggagacaaatcagacaacattccaggagtgcccaatataggggagaagacggccataaagcttgttaaagaatttggatcaattgaaaatttactgatgaatacagataagttaaaagggaaaataaaagaaaatgtagaaaacaatgcagaattagctgttttaagcaaacggcttgctacgattgagagaaatgttcctattgatattgatttgaatgaatacgcggttaaaaattacgatgtcaataagcttacagagctatttgaaaaattggaattttcaagcctcatctcagatttaaaagatgatagtcgtgatacaaaggatattaaagaatggcctgtaagagattttacatacgttaaaaatgttttaggaaagtttgatgttttgtcattgtatccattcatatatgatggaaagataaaagcagtatcatttgcttgcggtgacggatcgttttttgtagagattgatgattatgacaattttaaattgcttaataatgataagcttacgttgataggacacgatctgaaagattttttagtaaacatttcatactgcggtattgaacttaattgtaagattttagatacggccataatgacttatcttttaaatccgtctgagtcgaattacgacataagtcgcgtattgaaaaaatacttgaaagaggatttgcaaaacatagatgatatagtaggcaagggcaggaataaaaagagctacgatgacattgacaaaaagcttttagtcgattatatgtgttcagccgcatcaaacttatctaagttaaaagataagctcatgtcatttataaaagagatggagatggaagatcttttaaaaaatgtggaaattccgcttattgaagtgctaaaatctatggaggtgtacggctttacattagataaagatgtacttagaagtatttctaaagaaatagatgaaaagacagataagattgtaaaagatatttacgatgctgctggatacgaatttaatattaactctacaaagcagttatcagaatttttgtttgataaactgaatttgccagcaataaaaaagactaaaacagggtattcgactgacatggaagtccttgcagaacttataccgtacaatgacatagtaggagaaataatagaatatagacagcttatgaagcttaaatctacgtacatagatggcttcattcccatcatggatgaaaataatagggtccactctacgtttaaacaaacagttgctgctacagggagaattagctcaacagagcctaatctgcagaacatacctgtaagagaagaatttggcaggaggataagaaaggcatttgtatcaagttatgaagatgggcttataatatctgctgattattctcagattgagctaagggttcttgcacatctttcagaggatgaaaaacttattgagtcatttttgaacaacgaagatatacatttaaggacggcatcggaggtttttaaggtttcgaaagaagaagtgacaagtgaaatgagaaggcgggcgaaagctgtcaactttggtattgtatatggtataagcgattacggcttatctaaagacttaaagatttcgcgaaaagaagcgaaagaatacatagacaattattttgacaggtacaagggcgtcaaaaattacatcgactcaattgtcaaatttgcaaaggaaaatgggtatgttacgactatcttaaataggagaagatacataccggaaatcaattcaaaaaattttaaacaaagatcttttggcgagagaatggcaatgaatacacctattcaaggtagcgctgcggatataataaagatgtcgatggttaaagtatacaatgaattaaaggaaagaggattgaaatcaagacttattcttcaggtgcacgatgagcttataattgacacacatcctgatgaagttgaaatagtcaaggagcttctaaaatcaataatggaaaatatcataaagttgaaagttcctttagttgtagatatagggcaagggaaaaactggtatgatgcaaaataaaaggatcc

SEQ ID NO: 789 - DNA, 2678 bp, Artificial Sequence
  Description of Artificial Sequence: Synthetic Clostridium thermosulfurogenes DNA Polymerase N795M
atgaaatacctgctgccgaccgctgctgctggtctgctgctcctcgctgcccagccggcgatggccatggcgaaatttttgatcatagatggtaatagcttgatgtacagggcgtattttgccctgcctgatttgatgaacagcgaaggaatgcatacaaatgccatatacggtttttcaatgatgcttcttaaattgctggaggaggagaaaccagactacatagcaatagctttcgataaaaaggcttctacatttaggcacaaggagtacagtgcttataaaggaacccgccagtcgatgccagaagagctgatagaacaggtggatattttaaaagatgtgataaatgcatttaacataaagaccatcgagatagagggatttgaagcagatgatatcattggtacagtatcaaaaattgcttccgaaagtgggatggatgtgcttatcgtcacaggcgacagagatgcgcttcagcttgtgtcggcaaatgtaaaagtaaaaatatgtaaaaaaggcataacgcagatggatgagtacgatgaaaaggcggtctttgaaaagtatgaagtgacgccgcttcaattcatagacttgaaagggcttatgggagacaaatcagacaacattccaggagtgcccaatataggggagaagacggccataaagcttgttaaagaatttggatcaattgaaaatttactgatgaatacagataagttaaaagggaaaataaaagaaaatgtagaaaacaatgcagaattagctgttttaagcaaacggcttgctacgattgagagaaatgttcctattgatattgatttgaatgaatacgcggttaaaaattacgatgtcaataagcttacagagctatttgaaaaattggaattttcaagcctcatctcagatttaaaagatgatagtcgtgatacaaaggatattaaagaatggcctgtaagagattttacatacgttaaaaatgttttaggaaagtttgatgttttgtcattgtatccattcatatatgatggaaagataaaagcagtatcatttgcttgcggtgacggatcgttttttgtagagattgatgattatgacaattttaaattgcttaataatgataagcttacgttgataggacacgatctgaaagattttttagtaaacatttcatactgcggtattgaacttaattgtaagattttagatacggccataatgacttatcttttaaatccgtctgagtcgaattacgacataagtcgcgtattgaaaaaatacttgaaagaggatttgcaaaacatagatgatatagtaggcaagggcaggaataaaaagagctacgatgacattgacaaaaagcttttagtcgattatatgtgttcagccgcatcaaacttatctaagttaaaagataagctcatgtcatttataaaagagatggagatggaagatcttttaaaaaatgtggaaattccgcttattgaagtgctaaaatctatggaggtgtacggctttacattagataaagatgtacttagaagtatttctaaagaaatagatgaaaagacagataagattgtaaaagatatttacgatgctgctggatacgaatttaatattaactctacaaagcagttatcagaatttttgtttgataaactgaatttgccagcaataaaaaagactaaaacagggtattcgactgacatggaagtccttgcagaacttataccgtacaatgacatagtaggagaaataatagaatatagacagcttatgaagcttaaatctacgtacatagatggcttcattcccatcatggatgaaaataatagggtccactctacgtttaaacaaacagttgctgctacagggagaattagctcaacagagcctaatctgcagaacatacctgtaagagaagaatttggcaggaggataagaaaggcatttgtatcaagttatgaagatgggcttataatatctgctgattattctcagattgagctaagggttcttgcacatctttcagaggatgaaaaacttattgagtcatttttgaacaacgaagatatacatttaaggacggcatcggaggtttttaaggtttcgaaagaagaagtgacaagtgaaatgagaaggcgggcgaaagctgtcaactttggtattgtatatggtataagcgattacggcttatctaaagacttaaagatttcgcgaaaagaagcgaaagaatacatagacaattattttgacaggtacaagggcgtcaaaaattacatcgactcaattgtcaaatttgcaaaggaaaatgggtatgttacgactatcttaaataggagaagatacataccggaaatcaattcaaaaaattttatgcaaagatcttttggcgagagaatggcaatgaatacacctattcaaggtagcgctgcggatataataaagatgtcgatggttaaagtatacaatgaattaaaggaaagaggattgaaatcaagacttattcttcaggtgcacgatgagcttataattgacacacatcctgatgaagttgaaatagtcaaggagcttctaaaatcaataatggaaaatatcataaagttgaaagttcctttagttgtagatatagggcaagggaaaaactggtatgatgcaaaataaaaggatcc

SEQ ID NO: 790 - DNA, 2678 bp, Artificial Sequence
  Description of Artificial Sequence: Synthetic Clostridium thermosulfurogenes DNA Polymerase N795F
atgaaatacctgctgccgaccgctgctgctggtctgctgctcctcgctgcccagccggcgatggccatggcgaaatttttgatcatagatggtaatagcttgatgtacagggcgtattttgccctgcctgatttgatgaacagcgaaggaatgcatacaaatgccatatacggtttttcaatgatgcttcttaaattgctggaggaggagaaaccagactacatagcaatagctttcgataaaaaggcttctacatttaggcacaaggagtacagtgcttataaaggaacccgccagtcgatgccagaagagctgatagaacaggtggatattttaaaagatgtgataaatgcatttaacataaagaccatcgagatagagggatttgaagcagatgatatcattggtacagtatcaaaaattgcttccgaaagtgggatggatgtgcttatcgtcacaggcgacagagatgcgcttcagcttgtgtcggcaaatgtaaaagtaaaaatatgtaaaaaaggcataacgcagatggatgagtacgatgaaaaggcggtctttgaaaagtatgaagtgacgccgcttcaattcatagacttgaaagggcttatgggagacaaatcagacaacattccaggagtgcccaatataggggagaagacggccataaagcttgttaaagaatttggatcaattgaaaatttactgatgaatacagataagttaaaagggaaaataaaagaaaatgtagaaaacaatgcagaattagctgttttaagcaaacggcttgctacgattgagagaaatgttcctattgatattgatttgaatgaatacgcggttaaaaattacgatgtcaataagcttacagagctatttgaaaaattggaattttcaagcctcatctcagatttaaaagatgatagtcgtgatacaaaggatattaaagaatggcctgtaagagattttacatacgttaaaaatgttttaggaaagtttgatgttttgtcattgtatccattcatatatgatggaaagataaaagcagtatcatttgcttgcggtgacggatcgttttttgtagagattgatgattatgacaattttaaattgcttaataatgataagcttacgttgataggacacgatctgaaagattttttagtaaacatttcatactgcggtattgaacttaattgtaagattttagatacggccataatgacttatcttttaaatccgtctgagtcgaattacgacataagtcgcgtattgaaaaaatacttgaaagaggatttgcaaaacatagatgatatagtaggcaagggcaggaataaaaagagctacgatgacattgacaaaaagcttttagtcgattatatgtgttcagccgcatcaaacttatctaagttaaaagataagctcatgtcatttataaaagagatggagatggaagatcttttaaaaaatgtggaaattccgcttattgaagtgctaaaatctatggaggtgtacggctttacattagataaagatgtacttagaagtatttctaaagaaatagatgaaaagacagataagattgtaaaagatatttacgatgctgctggatacgaatttaatattaactctacaaagcagttatcagaatttttgtttgataaactgaatttgccagcaataaaaaagactaaaacagggtattcgactgacatggaagtccttgcagaacttataccgtacaatgacatagtaggagaaataatagaatatagacagcttatgaagcttaaatctacgtacatagatggcttcattcccatcatggatgaaaataatagggtccactctacgtttaaacaaacagttgctgctacagggagaattagctcaacagagcctaatctgcagaacatacctgtaagagaagaatttggcaggaggataagaaaggcatttgtatcaagttatgaagatgggcttataatatctgctgattattctcagattgagctaagggttcttgcacatctttcagaggatgaaaaacttattgagtcatttttgaacaacgaagatatacatttaaggacggcatcggaggtttttaaggtttcgaaagaagaagtgacaagtgaaatgagaaggcgggcgaaagctgtcaactttggtattgtatatggtataagcgattacggcttatctaaagacttaaagatttcgcgaaaagaagcgaaagaatacatagacaattattttgacaggtacaagggcgtcaaaaattacatcgactcaattgtcaaatttgcaaaggaaaatgggtatgttacgactatcttaaataggagaagatacataccggaaatcaattcaaaaaatttttttcaaagatcttttggcgagagaatggcaatgaatacacctattcaaggtagcgctgcggatataataaagatgtcgatggttaaagtatacaatgaattaaaggaaagaggattgaaatcaagacttattcttcaggtgcacgatgagcttataattgacacacatcctgatgaagttgaaatagtcaaggagcttctaaaatcaataatggaaaatatcataaagttgaaagttcctttagttgtagatatagggcaagggaaaaactggtatgatgcaaaataaaaggatcc

SEQ ID NO: 791 - DNA, 2678 bp, Artificial Sequence
  Description of Artificial Sequence: Synthetic Clostridium thermosulfurogenes DNA Polymerase N795P
atgaaatacctgctgccgaccgctgctgctggtctgctgctcctcgctgcccagccggcgatggccatggcgaaatttttgatcatagatggtaatagcttgatgtacagggcgtattttgccctgcctgatttgatgaacagcgaaggaatgcatacaaatgccatatacggtttttcaatgatgcttcttaaattgctggaggaggagaaaccagactacatagcaatagctttcgataaaaaggcttctacatttaggcacaaggagtacagtgcttataaaggaacccgccagtcgatgccagaagagctgatagaacaggtggatattttaaaagatgtgataaatgcatttaacataaagaccatcgagatagagggatttgaagcagatgatatcattggtacagtatcaaaaattgcttccgaaagtgggatggatgtgcttatcgtcacaggcgacagagatgcgcttcagcttgtgtcggcaaatgtaaaagtaaaaatatgtaaaaaaggcataacgcagatggatgagtacgatgaaaaggcggtctttgaaaagtatgaagtgacgccgcttcaattcatagacttgaaagggcttatgggagacaaatcagacaacattccaggagtgcccaatataggggagaagacggccataaagcttgttaaagaatttggatcaattgaaaatttactgatgaatacagataagttaaaagggaaaataaaagaaaatgtagaaaacaatgcagaattagctgttttaagcaaacggcttgctacgattgagagaaatgttcctattgatattgatttgaatgaatacgcggttaaaaattacgatgtcaataagcttacagagctatttgaaaaattggaattttcaagcctcatctcagatttaaaagatgatagtcgtgatacaaaggatattaaagaatggcctgtaagagattttacatacgttaaaaatgttttaggaaagtttgatgttttgtcattgtatccattcatatatgatggaaagataaaagcagtatcatttgcttgcggtgacggatcgttttttgtagagattgatgattatgacaattttaaattgcttaataatgataagcttacgttgataggacacgatctgaaagattttttagtaaacatttcatactgcggtattgaacttaattgtaagattttagatacggccataatgacttatcttttaaatccgtctgagtcgaattacgacataagtcgcgtattgaaaaaatacttgaaagaggatttgcaaaacatagatgatatagtaggcaagggcaggaataaaaagagctacgatgacattgacaaaaagcttttagtcgattatatgtgttcagccgcatcaaacttatctaagttaaaagataagctcatgtcatttataaaagagatggagatggaagatcttttaaaaaatgtggaaattccgcttattgaagtgctaaaatctatggaggtgtacggctttacattagataaagatgtacttagaagtatttctaaagaaatagatgaaaagacagataagattgtaaaagatatttacgatgctgctggatacgaatttaatattaactctacaaagcagttatcagaatttttgtttgataaactgaatttgccagcaataaaaaagactaaaacagggtattcgactgacatggaagtccttgcagaacttataccgtacaatgacatagtaggagaaataatagaatatagacagcttatgaagcttaaatctacgtacatagatggcttcattcccatcatggatgaaaataatagggtccactctacgtttaaacaaacagttgctgctacagggagaattagctcaacagagcctaatctgcagaacatacctgtaagagaagaatttggcaggaggataagaaaggcatttgtatcaagttatgaagatgggcttataatatctgctgattattctcagattgagctaagggttcttgcacatctttcagaggatgaaaaacttattgagtcatttttgaacaacgaagatatacatttaaggacggcatcggaggtttttaaggtttcgaaagaagaagtgacaagtgaaatgagaaggcgggcgaaagctgtcaactttggtattgtatatggtataagcgattacggcttatctaaagacttaaagatttcgcgaaaagaagcgaaagaatacatagacaattattttgacaggtacaagggcgtcaaaaattacatcgactcaattgtcaaatttgcaaaggaaaatgggtatgttacgactatcttaaataggagaagatacataccggaaatcaattcaaaaaattttcctcaaagatcttttggcgagagaatggcaatgaatacacctattcaaggtagcgctgcggatataataaagatgtcgatggttaaagtatacaatgaattaaaggaaagaggattgaaatcaagacttattcttcaggtgcacgatgagcttataattgacacacatcctgatgaagttgaaatagtcaaggagcttctaaaatcaataatggaaaatatcataaagttgaaagttcctttagttgtagatatagggcaagggaaaaactggtatgatgcaaaataaaaggatcc

SEQ ID NO: 792 - DNA, 2678 bp, Artificial Sequence
  Description of Artificial Sequence: Synthetic Clostridium thermosulfurogenes DNA Polymerase N795S
atgaaatacctgctgccgaccgctgctgctggtctgctgctcctcgctgcccagccggcgatggccatggcgaaatttttgatcatagatggtaatagcttgatgtacagggcgtattttgccctgcctgatttgatgaacagcgaaggaatgcatacaaatgccatatacggtttttcaatgatgcttcttaaattgctggaggaggagaaaccagactacatagcaatagctttcgataaaaaggcttctacatttaggcacaaggagtacagtgcttataaaggaacccgccagtcgatgccagaagagctgatagaacaggtggatattttaaaagatgtgataaatgcatttaacataaagaccatcgagatagagggatttgaagcagatgatatcattggtacagtatcaaaaattgcttccgaaagtgggatggatgtgcttatcgtcacaggcgacagagatgcgcttcagcttgtgtcggcaaatgtaaaagtaaaaatatgtaaaaaaggcataacgcagatggatgagtacgatgaaaaggcggtctttgaaaagtatgaagtgacgccgcttcaattcatagacttgaaagggcttatgggagacaaatcagacaacattccaggagtgcccaatataggggagaagacggccataaagcttgttaaagaatttggatcaattgaaaatttactgatgaatacagataagttaaaagggaaaataaaagaaaatgtagaaaacaatgcagaattagctgttttaagcaaacggcttgctacgattgagagaaatgttcctattgatattgatttgaatgaatacgcggttaaaaattacgatgtcaataagcttacagagctatttgaaaaattggaattttcaagcctcatctcagatttaaaagatgatagtcgtgatacaaaggatattaaagaatggcctgtaagagattttacatacgttaaaaatgttttaggaaagtttgatgttttgtcattgtatccattcatatatgatggaaagataaaagcagtatcatttgcttgcggtgacggatcgttttttgtagagattgatgattatgacaattttaaattgcttaataatgataagcttacgttgataggacacgatctgaaagattttttagtaaacatttcatactgcggtattgaacttaattgtaagattttagatacggccataatgacttatcttttaaatccgtctgagtcgaattacgacataagtcgcgtattgaaaaaatacttgaaagaggatttgcaaaacatagatgatatagtaggcaagggcaggaataaaaagagctacgatgacattgacaaaaagcttttagtcgattatatgtgttcagccgcatcaaacttatctaagttaaaagataagctcatgtcatttataaaagagatggagatggaagatcttttaaaaaatgtggaaattccgcttattgaagtgctaaaatctatggaggtgtacggctttacattagataaagatgtacttagaagtatttctaaagaaatagatgaaaagacagataagattgtaaaagatatttacgatgctgctggatacgaatttaatattaactctacaaagcagttatcagaatttttgtttgataaactgaatttgccagcaataaaaaagactaaaacagggtattcgactgacatggaagtccttgcagaacttataccgtacaatgacatagtaggagaaataatagaatatagacagcttatgaagcttaaatctacgtacatagatggcttcattcccatcatggatgaaaataatagggtccactctacgtttaaacaaacagttgctgctacagggagaattagctcaacagagcctaatctgcagaacatacctgtaagagaagaatttggcaggaggataagaaaggcatttgtatcaagttatgaagatgggcttataatatctgctgattattctcagattgagctaagggttcttgcacatctttcagaggatgaaaaacttattgagtcatttttgaacaacgaagatatacatttaaggacggcatcggaggtttttaaggtttcgaaagaagaagtgacaagtgaaatgagaaggcgggcgaaagctgtcaactttggtattgtatatggtataagcgattacggcttatctaaagacttaaagatttcgcgaaaagaagcgaaagaatacatagacaattattttgacaggtacaagggcgtcaaaaattacatcgactcaattgtcaaatttgcaaaggaaaatgggtatgttacgactatcttaaataggagaagatacataccggaaatcaattcaaaaaatttttctcaaagatcttttggcgagagaatggcaatgaatacacctattcaaggtagcgctgcggatataataaagatgtcgatggttaaagtatacaatgaattaaaggaaagaggattgaaatcaagacttattcttcaggtgcacgatgagcttataattgacacacatcctgatgaagttgaaatagtcaaggagcttctaaaatcaataatggaaaatatcataaagttgaaagttcctttagttgtagatatagggcaagggaaaaactggtatgatgcaaaataaaaggatcc

SEQ ID NO: 793 - DNA, 2678 bp, Artificial Sequence
  Description of Artificial Sequence: Synthetic Clostridium thermosulfurogenes DNA Polymerase N795T
atgaaatacctgctgccgaccgctgctgctggtctgctgctcctcgctgcccagccggcgatggccatggcgaaatttttgatcatagatggtaatagcttgatgtacagggcgtattttgccctgcctgatttgatgaacagcgaaggaatgcatacaaatgccatatacggtttttcaatgatgcttcttaaattgctggaggaggagaaaccagactacatagcaatagctttcgataaaaaggcttctacatttaggcacaaggagtacagtgcttataaaggaacccgccagtcgatgccagaagagctgatagaacaggtggatattttaaaagatgtgataaatgcatttaacataaagaccatcgagatagagggatttgaagcagatgatatcattggtacagtatcaaaaattgcttccgaaagtgggatggatgtgcttatcgtcacaggcgacagagatgcgcttcagcttgtgtcggcaaatgtaaaagtaaaaatatgtaaaaaaggcataacgcagatggatgagtacgatgaaaaggcggtctttgaaaagtatgaagtgacgccgcttcaattcatagacttgaaagggcttatgggagacaaatcagacaacattccaggagtgcccaatataggggagaagacggccataaagcttgttaaagaatttggatcaattgaaaatttactgatgaatacagataagttaaaagggaaaataaaagaaaatgtagaaaacaatgcagaattagctgttttaagcaaacggcttgctacgattgagagaaatgttcctattgatattgatttgaatgaatacgcggttaaaaattacgatgtcaataagcttacagagctatttgaaaaattggaattttcaagcctcatctcagatttaaaagatgatagtcgtgatacaaaggatattaaagaatggcctgtaagagattttacatacgttaaaaatgttttaggaaagtttgatgttttgtcattgtatccattcatatatgatggaaagataaaagcagtatcatttgcttgcggtgacggatcgttttttgtagagattgatgattatgacaattttaaattgcttaataatgataagcttacgttgataggacacgatctgaaagattttttagtaaacatttcatactgcggtattgaacttaattgtaagattttagatacggccataatgacttatcttttaaatccgtctgagtcgaattacgacataagtcgcgtattgaaaaaatacttgaaagaggatttgcaaaacatagatgatatagtaggcaagggcaggaataaaaagagctacgatgacattgacaaaaagcttttagtcgattatatgtgttcagccgcatcaaacttatctaagttaaaagataagctcatgtcatttataaaagagatggagatggaagatcttttaaaaaatgtggaaattccgcttattgaagtgctaaaatctatggaggtgtacggctttacattagataaagatgtacttagaagtatttctaaagaaatagatgaaaagacagataagattgtaaaagatatttacgatgctgctggatacgaatttaatattaactctacaaagcagttatcagaatttttgtttgataaactgaatttgccagcaataaaaaagactaaaacagggtattcgactgacatggaagtccttgcagaacttataccgtacaatgacatagtaggagaaataatagaatatagacagcttatgaagcttaaatctacgtacatagatggcttcattcccatcatggatgaaaataatagggtccactctacgtttaaacaaacagttgctgctacagggagaattagctcaacagagcctaatctgcagaacatacctgtaagagaagaatttggcaggaggataagaaaggcatttgtatcaagttatgaagatgggcttataatatctgctgattattctcagattgagctaagggttcttgcacatctttcagaggatgaaaaacttattgagtcatttttgaacaacgaagatatacatttaaggacggcatcggaggtttttaaggtttcgaaagaagaagtgacaagtgaaatgagaaggcgggcgaaagctgtcaactttggtattgtatatggtataagcgattacggcttatctaaagacttaaagatttcgcgaaaagaagcgaaagaatacatagacaattattttgacaggtacaagggcgtcaaaaattacatcgactcaattgtcaaatttgcaaaggaaaatgggtatgttacgactatcttaaataggagaagatacataccggaaatcaattcaaaaaattttactcaaagatcttttggcgagagaatggcaatgaatacacctattcaaggtagcgctgcggatataataaagatgtcgatggttaaagtatacaatgaattaaaggaaagaggattgaaatcaagacttattcttcaggtgcacgatgagcttataattgacacacatcctgatgaagttgaaatagtcaaggagcttctaaaatcaataatggaaaatatcataaagttgaaagttcctttagttgtagatatagggcaagggaaaaactggtatgatgcaaaataaaaggatcc

SEQ ID NO: 794 - DNA, 2678 bp, Artificial Sequence
  Description of Artificial Sequence: Synthetic Clostridium thermosulfurogenes DNA Polymerase N795W
atgaaatacctgctgccgaccgctgctgctggtctgctgctcctcgctgcccagccggcgatggccatggcgaaatttttgatcatagatggtaatagcttgatgtacagggcgtattttgccctgcctgatttgatgaacagcgaaggaatgcatacaaatgccatatacggtttttcaatgatgcttcttaaattgctggaggaggagaaaccagactacatagcaatagctttcgataaaaaggcttctacatttaggcacaaggagtacagtgcttataaaggaacccgccagtcgatgccagaagagctgatagaacaggtggatattttaaaagatgtgataaatgcatttaacataaagaccatcgagatagagggatttgaagcagatgatatcattggtacagtatcaaaaattgcttccgaaagtgggatggatgtgcttatcgtcacaggcgacagagatgcgcttcagcttgtgtcggcaaatgtaaaagtaaaaatatgtaaaaaaggcataacgcagatggatgagtacgatgaaaaggcggtctttgaaaagtatgaagtgacgccgcttcaattcatagacttgaaagggcttatgggagacaaatcagacaacattccaggagtgcccaatataggggagaagacggccataaagcttgttaaagaatttggatcaattgaaaatttactgatgaatacagataagttaaaagggaaaataaaagaaaatgtagaaaacaatgcagaattagctgttttaagcaaacggcttgctacgattgagagaaatgttcctattgatattgatttgaatgaatacgcggttaaaaattacgatgtcaataagcttacagagctatttgaaaaattggaattttcaagcctcatctcagatttaaaagatgatagtcgtgatacaaaggatattaaagaatggcctgtaagagattttacatacgttaaaaatgttttaggaaagtttgatgttttgtcattgtatccattcatatatgatggaaagataaaagcagtatcatttgcttgcggtgacggatcgttttttgtagagattgatgattatgacaattttaaattgcttaataatgataagcttacgttgataggacacgatctgaaagattttttagtaaacatttcatactgcggtattgaacttaattgtaagattttagatacggccataatgacttatcttttaaatccgtctgagtcgaattacgacataagtcgcgtattgaaaaaatacttgaaagaggatttgcaaaacatagatgatatagtaggcaagggcaggaataaaaagagctacgatgacattgacaaaaagcttttagtcgattatatgtgttcagccgcatcaaacttatctaagttaaaagataagctcatgtcatttataaaagagatggagatggaagatcttttaaaaaatgtggaaattccgcttattgaagtgctaaaatctatggaggtgtacggctttacattagataaagatgtacttagaagtatttctaaagaaatagatgaaaagacagataagattgtaaaagatatttacgatgctgctggatacgaatttaatattaactctacaaagcagttatcagaatttttgtttgataaactgaatttgccagcaataaaaaagactaaaacagggtattcgactgacatggaagtccttgcagaacttataccgtacaatgacatagtaggagaaataatagaatatagacagcttatgaagcttaaatctacgtacatagatggcttcattcccatcatggatgaaaataatagggtccactctacgtttaaacaaacagttgctgctacagggagaattagctcaacagagcctaatctgcagaacatacctgtaagagaagaatttggcaggaggataagaaaggcatttgtatcaagttatgaagatgggcttataatatctgctgattattctcagattgagctaagggttcttgcacatctttcagaggatgaaaaacttattgagtcatttttgaacaacgaagatatacatttaaggacggcatcggaggtttttaaggtttcgaaagaagaagtgacaagtgaaatgagaaggcgggcgaaagctgtcaactttggtattgtatatggtataagcgattacggcttatctaaagacttaaagatttcgcgaaaagaagcgaaagaatacatagacaattattttgacaggtacaagggcgtcaaaaattacatcgactcaattgtcaaatttgcaaaggaaaatgggtatgttacgactatcttaaataggagaagatacataccggaaatcaattcaaaaaatttttggcaaagatcttttggcgagagaatggcaatgaatacacctattcaaggtagcgctgcggatataataaagatgtcgatggttaaagtatacaatgaattaaaggaaagaggattgaaatcaagacttattcttcaggtgcacgatgagcttataattgacacacatcctgatgaagttgaaatagtcaaggagcttctaaaatcaataatggaaaatatcataaagttgaaagttcctttagttgtagatatagggcaagggaaaaactggtatgatgcaaaataaaaggatcc

SEQ ID NO: 795 - DNA, 2678 bp, Artificial Sequence
  Description of Artificial Sequence: Synthetic Clostridium thermosulfurogenes DNA Polymerase N795Y
atgaaatacctgctgccgaccgctgctgctggtctgctgctcctcgctgcccagccggcgatggccatggcgaaatttttgatcatagatggtaatagcttgatgtacagggcgtattttgccctgcctgatttgatgaacagcgaaggaatgcatacaaatgccatatacggtttttcaatgatgcttcttaaattgctggaggaggagaaaccagactacatagcaatagctttcgataaaaaggcttctacatttaggcacaaggagtacagtgcttataaaggaacccgccagtcgatgccagaagagctgatagaacaggtggatattttaaaagatgtgataaatgcatttaacataaagaccatcgagatagagggatttgaagcagatgatatcattggtacagtatcaaaaattgcttccgaaagtgggatggatgtgcttatcgtcacaggcgacagagatgcgcttcagcttgtgtcggcaaatgtaaaagtaaaaatatgtaaaaaaggcataacgcagatggatgagtacgatgaaaaggcggtctttgaaaagtatgaagtgacgccgcttcaattcatagacttgaaagggcttatgggagacaaatcagacaacattccaggagtgcccaatataggggagaagacggccataaagcttgttaaagaatttggatcaattgaaaatttactgatgaatacagataagttaaaagggaaaataaaagaaaatgtagaaaacaatgcagaattagctgttttaagcaaacggcttgctacgattgagagaaatgttcctattgatattgatttgaatgaatacgcggttaaaaattacgatgtcaataagcttacagagctatttgaaaaattggaattttcaagcctcatctcagatttaaaagatgatagtcgtgatacaaaggatattaaagaatggcctgtaagagattttacatacgttaaaaatgttttaggaaagtttgatgttttgtcattgtatccattcatatatgatggaaagataaaagcagtatcatttgcttgcggtgacggatcgttttttgtagagattgatgattatgacaattttaaattgcttaataatgataagcttacgttgataggacacgatctgaaagattttttagtaaacatttcatactgcggtattgaacttaattgtaagattttagatacggccataatgacttatcttttaaatccgtctgagtcgaattacgacataagtcgcgtattgaaaaaatacttgaaagaggatttgcaaaacatagatgatatagtaggcaagggcaggaataaaaagagctacgatgacattgacaaaaagcttttagtcgattatatgtgttcagccgcatcaaacttatctaagttaaaagataagctcatgtcatttataaaagagatggagatggaagatcttttaaaaaatgtggaaattccgcttattgaagtgctaaaatctatggaggtgtacggctttacattagataaagatgtacttagaagtatttctaaagaaatagatgaaaagacagataagattgtaaaagatatttacgatgctgctggatacgaatttaatattaactctacaaagcagttatcagaatttttgtttgataaactgaatttgccagcaataaaaaagactaaaacagggtattcgactgacatggaagtccttgcagaacttataccgtacaatgacatagtaggagaaataatagaatatagacagcttatgaagcttaaatctacgtacatagatggcttcattcccatcatggatgaaaataatagggtccactctacgtttaaacaaacagttgctgctacagggagaattagctcaacagagcctaatctgcagaacatacctgtaagagaagaatttggcaggaggataagaaaggcatttgtatcaagttatgaagatgggcttataatatctgctgattattctcagattgagctaagggttcttgcacatctttcagaggatgaaaaacttattgagtcatttttgaacaacgaagatatacatttaaggacggcatcggaggtttttaaggtttcgaaagaagaagtgacaagtgaaatgagaaggcgggcgaaagctgtcaactttggtattgtatatggtataagcgattacggcttatctaaagacttaaagatttcgcgaaaagaagcgaaagaatacatagacaattattttgacaggtacaagggcgtcaaaaattacatcgactcaattgtcaaatttgcaaaggaaaatgggtatgttacgactatcttaaataggagaagatacataccggaaatcaattcaaaaaatttttatcaaagatcttttggcgagagaatggcaatgaatacacctattcaaggtagcgctgcggatataataaagatgtcgatggttaaagtatacaatgaattaaaggaaagaggattgaaatcaagacttattcttcaggtgcacgatgagcttataattgacacacatcctgatgaagttgaaatagtcaaggagcttctaaaatcaataatggaaaatatcataaagttgaaagttcctttagttgtagatatagggcaagggaaaaactggtatgatgcaaaataaaaggatcc

SEQ ID NO: 796 - DNA, 2678 bp, Artificial Sequence
  Description of Artificial Sequence: Synthetic Clostridium thermosulfurogenes DNA Polymerase N795V
atgaaatacctgctgccgaccgctgctgctggtctgctgctcctcgctgcccagccggcgatggccatggcgaaatttttgatcatagatggtaatagcttgatgtacagggcgtattttgccctgcctgatttgatgaacagcgaaggaatgcatacaaatgccatatacggtttttcaatgatgcttcttaaattgctggaggaggagaaaccagactacatagcaatagctttcgataaaaaggcttctacatttaggcacaaggagtacagtgcttataaaggaacccgccagtcgatgccagaagagctgatagaacaggtggatattttaaaagatgtgataaatgcatttaacataaagaccatcgagatagagggatttgaagcagatgatatcattggtacagtatcaaaaattgcttccgaaagtgggatggatgtgcttatcgtcacaggcgacagagatgcgcttcagcttgtgtcggcaaatgtaaaagtaaaaatatgtaaaaaaggcataacgcagatggatgagtacgatgaaaaggcggtctttgaaaagtatgaagtgacgccgcttcaattcatagacttgaaagggcttatgggagacaaatcagacaacattccaggagtgcccaatataggggagaagacggccataaagcttgttaaagaatttggatcaattgaaaatttactgatgaatacagataagttaaaagggaaaataaaagaaaatgtagaaaacaatgcagaattagctgttttaagcaaacggcttgctacgattgagagaaatgttcctattgatattgatttgaatgaatacgcggttaaaaattacgatgtcaataagcttacagagctatttgaaaaattggaattttcaagcctcatctcagatttaaaagatgatagtcgtgatacaaaggatattaaagaatggcctgtaagagattttacatacgttaaaaatgttttaggaaagtttgatgttttgtcattgtatccattcatatatgatggaaagataaaagcagtatcatttgcttgcggtgacggatcgttttttgtagagattgatgattatgacaattttaaattgcttaataatgataagcttacgttgataggacacgatctgaaagattttttagtaaacatttcatactgcggtattgaacttaattgtaagattttagatacggccataatgacttatcttttaaatccgtctgagtcgaattacgacataagtcgcgtattgaaaaaatacttgaaagaggatttgcaaaacatagatgatatagtaggcaagggcaggaataaaaagagctacgatgacattgacaaaaagcttttagtcgattatatgtgttcagccgcatcaaacttatctaagttaaaagataagctcatgtcatttataaaagagatggagatggaagatcttttaaaaaatgtggaaattccgcttattgaagtgctaaaatctatggaggtgtacggctttacattagataaagatgtacttagaagtatttctaaagaaatagatgaaaagacagataagattgtaaaagatatttacgatgctgctggatacgaatttaatattaactctacaaagcagttatcagaatttttgtttgataaactgaatttgccagcaataaaaaagactaaaacagggtattcgactgacatggaagtccttgcagaacttataccgtacaatgacatagtaggagaaataatagaatatagacagcttatgaagcttaaatctacgtacatagatggcttcattcccatcatggatgaaaataatagggtccactctacgtttaaacaaacagttgctgctacagggagaattagctcaacagagcctaatctgcagaacatacctgtaagagaagaatttggcaggaggataagaaaggcatttgtatcaagttatgaagatgggcttataatatctgctgattattctcagattgagctaagggttcttgcacatctttcagaggatgaaaaacttattgagtcatttttgaacaacgaagatatacatttaaggacggcatcggaggtttttaaggtttcgaaagaagaagtgacaagtgaaatgagaaggcgggcgaaagctgtcaactttggtattgtatatggtataagcgattacggcttatctaaagacttaaagatttcgcgaaaagaagcgaaagaatacatagacaattattttgacaggtacaagggcgtcaaaaattacatcgactcaattgtcaaatttgcaaaggaaaatgggtatgttacgactatcttaaataggagaagatacataccggaaatcaattcaaaaaattttgttcaaagatcttttggcgagagaatggcaatgaatacacctattcaaggtagcgctgcggatataataaagatgtcgatggttaaagtatacaatgaattaaaggaaagaggattgaaatcaagacttattcttcaggtgcacgatgagcttataattgacacacatcctgatgaagttgaaatagtcaaggagcttctaaaatcaataatggaaaatatcataaagttgaaagttcctttagttgtagatatagggcaagggaaaaactggtatgatgcaaaataaaaggatcc

SEQ ID NO: 797 - DNA, 2678 bp, Artificial Sequence
  Description of Artificial Sequence: Synthetic Clostridium thermosulfurogenes DNA Polymerase Q796A
atgaaatacctgctgccgaccgctgctgctggtctgctgctcctcgctgcccagccggcgatggccatggcgaaatttttgatcatagatggtaatagcttgatgtacagggcgtattttgccctgcctgatttgatgaacagcgaaggaatgcatacaaatgccatatacggtttttcaatgatgcttcttaaattgctggaggaggagaaaccagactacatagcaatagctttcgataaaaaggcttctacatttaggcacaaggagtacagtgcttataaaggaacccgccagtcgatgccagaagagctgatagaacaggtggatattttaaaagatgtgataaatgcatttaacataaagaccatcgagatagagggatttgaagcagatgatatcattggtacagtatcaaaaattgcttccgaaagtgggatggatgtgcttatcgtcacaggcgacagagatgcgcttcagcttgtgtcggcaaatgtaaaagtaaaaatatgtaaaaaaggcataacgcagatggatgagtacgatgaaaaggcggtctttgaaaagtatgaagtgacgccgcttcaattcatagacttgaaagggcttatgggagacaaatcagacaacattccaggagtgcccaatataggggagaagacggccataaagcttgttaaagaatttggatcaattgaaaatttactgatgaatacagataagttaaaagggaaaataaaagaaaatgtagaaaacaatgcagaattagctgttttaagcaaacggcttgctacgattgagagaaatgttcctattgatattgatttgaatgaatacgcggttaaaaattacgatgtcaataagcttacagagctatttgaaaaattggaattttcaagcctcatctcagatttaaaagatgatagtcgtgatacaaaggatattaaagaatggcctgtaagagattttacatacgttaaaaatgttttaggaaagtttgatgttttgtcattgtatccattcatatatgatggaaagataaaagcagtatcatttgcttgcggtgacggatcgttttttgtagagattgatgattatgacaattttaaattgcttaataatgataagcttacgttgataggacacgatctgaaagattttttagtaaacatttcatactgcggtattgaacttaattgtaagattttagatacggccataatgacttatcttttaaatccgtctgagtcgaattacgacataagtcgcgtattgaaaaaatacttgaaagaggatttgcaaaacatagatgatatagtaggcaagggcaggaataaaaagagctacgatgacattgacaaaaagcttttagtcgattatatgtgttcagccgcatcaaacttatctaagttaaaagataagctcatgtcatttataaaagagatggagatggaagatcttttaaaaaatgtggaaattccgcttattgaagtgctaaaatctatggaggtgtacggctttacattagataaagatgtacttagaagtatttctaaagaaatagatgaaaagacagataagattgtaaaagatatttacgatgctgctggatacgaatttaatattaactctacaaagcagttatcagaatttttgtttgataaactgaatttgccagcaataaaaaagactaaaacagggtattcgactgacatggaagtccttgcagaacttataccgtacaatgacatagtaggagaaataatagaatatagacagcttatgaagcttaaatctacgtacatagatggcttcattcccatcatggatgaaaataatagggtccactctacgtttaaacaaacagttgctgctacagggagaattagctcaacagagcctaatctgcagaacatacctgtaagagaagaatttggcaggaggataagaaaggcatttgtatcaagttatgaagatgggcttataatatctgctgattattctcagattgagctaagggttcttgcacatctttcagaggatgaaaaacttattgagtcatttttgaacaacgaagatatacatttaaggacggcatcggaggtttttaaggtttcgaaagaagaagtgacaagtgaaatgagaaggcgggcgaaagctgtcaactttggtattgtatatggtataagcgattacggcttatctaaagacttaaagatttcgcgaaaagaagcgaaagaatacatagacaattattttgacaggtacaagggcgtcaaaaattacatcgactcaattgtcaaatttgcaaaggaaaatgggtatgttacgactatcttaaataggagaagatacataccggaaatcaattcaaaaaattttaacgctagatcttttggcgagagaatggcaatgaatacacctattcaaggtagcgctgcggatataataaagatgtcgatggttaaagtatacaatgaattaaaggaaagaggattgaaatcaagacttattcttcaggtgcacgatgagcttataattgacacacatcctgatgaagttgaaatagtcaaggagcttctaaaatcaataatggaaaatatcataaagttgaaagttcctttagttgtagatatagggcaagggaaaaactggtatgatgcaaaataaaaggatcc

SEQ ID NO: 798 - DNA, 2678 bp, Artificial Sequence
  Description of Artificial Sequence: Synthetic Clostridium thermosulfurogenes DNA Polymerase Q796R
atgaaatacctgctgccgaccgctgctgctggtctgctgctcctcgctgcccagccggcgatggccatggcgaaatttttgatcatagatggtaatagcttgatgtacagggcgtattttgccctgcctgatttgatgaacagcgaaggaatgcatacaaatgccatatacggtttttcaatgatgcttcttaaattgctggaggaggagaaaccagactacatagcaatagctttcgataaaaaggcttctacatttaggcacaaggagtacagtgcttataaaggaacccgccagtcgatgccagaagagctgatagaacaggtggatattttaaaagatgtgataaatgcatttaacataaagaccatcgagatagagggatttgaagcagatgatatcattggtacagtatcaaaaattgcttccgaaagtgggatggatgtgcttatcgtcacaggcgacagagatgcgcttcagcttgtgtcggcaaatgtaaaagtaaaaatatgtaaaaaaggcataacgcagatggatgagtacgatgaaaaggcggtctttgaaaagtatgaagtgacgccgcttcaattcatagacttgaaagggcttatgggagacaaatcagacaacattccaggagtgcccaatataggggagaagacggccataaagcttgttaaagaatttggatcaattgaaaatttactgatgaatacagataagttaaaagggaaaataaaagaaaatgtagaaaacaatgcagaattagctgttttaagcaaacggcttgctacgattgagagaaatgttcctattgatattgatttgaatgaatacgcggttaaaaattacgatgtcaataagcttacagagctatttgaaaaattggaattttcaagcctcatctcagatttaaaagatgatagtcgtgatacaaaggatattaaagaatggcctgtaagagattttacatacgttaaaaatgttttaggaaagtttgatgttttgtcattgtatccattcatatatgatggaaagataaaagcagtatcatttgcttgcggtgacggatcgttttttgtagagattgatgattatgacaattttaaattgcttaataatgataagcttacgttgataggacacgatctgaaagattttttagtaaacatttcatactgcggtattgaacttaattgtaagattttagatacggccataatgacttatcttttaaatccgtctgagtcgaattacgacataagtcgcgtattgaaaaaatacttgaaagaggatttgcaaaacatagatgatatagtaggcaagggcaggaataaaaagagctacgatgacattgacaaaaagcttttagtcgattatatgtgttcagccgcatcaaacttatctaagttaaaagataagctcatgtcatttataaaagagatggagatggaagatcttttaaaaaatgtggaaattccgcttattgaagtgctaaaatctatggaggtgtacggctttacattagataaagatgtacttagaagtatttctaaagaaatagatgaaaagacagataagattgtaaaagatatttacgatgctgctggatacgaatttaatattaactctacaaagcagttatcagaatttttgtttgataaactgaatttgccagcaataaaaaagactaaaacagggtattcgactgacatggaagtccttgcagaacttataccgtacaatgacatagtaggagaaataatagaatatagacagcttatgaagcttaaatctacgtacatagatggcttcattcccatcatggatgaaaataatagggtccactctacgtttaaacaaacagttgctgctacagggagaattagctcaacagagcctaatctgcagaacatacctgtaagagaagaatttggcaggaggataagaaaggcatttgtatcaagttatgaagatgggcttataatatctgctgattattctcagattgagctaagggttcttgcacatctttcagaggatgaaaaacttattgagtcatttttgaacaacgaagatatacatttaaggacggcatcggaggtttttaaggtttcgaaagaagaagtgacaagtgaaatgagaaggcgggcgaaagctgtcaactttggtattgtatatggtataagcgattacggcttatctaaagacttaaagatttcgcgaaaagaagcgaaagaatacatagacaattattttgacaggtacaagggcgtcaaaaattacatcgactcaattgtcaaatttgcaaaggaaaatgggtatgttacgactatcttaaataggagaagatacataccggaaatcaattcaaaaaattttaaccgtagatcttttggcgagagaatggcaatgaatacacctattcaaggtagcgctgcggatataataaagatgtcgatggttaaagtatacaatgaattaaaggaaagaggattgaaatcaagacttattcttcaggtgcacgatgagcttataattgacacacatcctgatgaagttgaaatagtcaaggagcttctaaaatcaataatggaaaatatcataaagttgaaagttcctttagttgtagatatagggcaagggaaaaactggtatgatgcaaaataaaaggatcc

SEQ ID NO: 799 - DNA, 2678 bp, Artificial Sequence
  Description of Artificial Sequence: Synthetic Clostridium thermosulfurogenes DNA Polymerase Q796N
atgaaatacctgctgccgaccgctgctgctggtctgctgctcctcgctgcccagccggcgatggccatggcgaaatttttgatcatagatggtaatagcttgatgtacagggcgtattttgccctgcctgatttgatgaacagcgaaggaatgcatacaaatgccatatacggtttttcaatgatgcttcttaaattgctggaggaggagaaaccagactacatagcaatagctttcgataaaaaggcttctacatttaggcacaaggagtacagtgcttataaaggaacccgccagtcgatgccagaagagctgatagaacaggtggatattttaaaagatgtgataaatgcatttaacataaagaccatcgagatagagggatttgaagcagatgatatcattggtacagtatcaaaaattgcttccgaaagtgggatggatgtgcttatcgtcacaggcgacagagatgcgcttcagcttgtgtcggcaaatgtaaaagtaaaaatatgtaaaaaaggcataacgcagatggatgagtacgatgaaaaggcggtctttgaaaagtatgaagtgacgccgcttcaattcatagacttgaaagggcttatgggagacaaatcagacaacattccaggagtgcccaatataggggagaagacggccataaagcttgttaaagaatttggatcaattgaaaatttactgatgaatacagataagttaaaagggaaaataaaagaaaatgtagaaaacaatgcagaattagctgttttaagcaaacggcttgctacgattgagagaaatgttcctattgatattgatttgaatgaatacgcggttaaaaattacgatgtcaataagcttacagagctatttgaaaaattggaattttcaagcctcatctcagatttaaaagatgatagtcgtgatacaaaggatattaaagaatggcctgtaagagattttacatacgttaaaaatgttttaggaaagtttgatgttttgtcattgtatccattcatatatgatggaaagataaaagcagtatcatttgcttgcggtgacggatcgttttttgtagagattgatgattatgacaattttaaattgcttaataatgataagcttacgttgataggacacgatctgaaagattttttagtaaacatttcatactgcggtattgaacttaattgtaagattttagatacggccataatgacttatcttttaaatccgtctgagtcgaattacgacataagtcgcgtattgaaaaaatacttgaaagaggatttgcaaaacatagatgatatagtaggcaagggcaggaataaaaagagctacgatgacattgacaaaaagcttttagtcgattatatgtgttcagccgcatcaaacttatctaagttaaaagataagctcatgtcatttataaaagagatggagatggaagatcttttaaaaaatgtggaaattccgcttattgaagtgctaaaatctatggaggtgtacggctttacattagataaagatgtacttagaagtatttctaaagaaatagatgaaaagacagataagattgtaaaagatatttacgatgctgctggatacgaatttaatattaactctacaaagcagttatcagaatttttgtttgataaactgaatttgccagcaataaaaaagactaaaacagggtattcgactgacatggaagtccttgcagaacttataccgtacaatgacatagtaggagaaataatagaatatagacagcttatgaagcttaaatctacgtacatagatggcttcattcccatcatggatgaaaataatagggtccactctacgtttaaacaaacagttgctgctacagggagaattagctcaacagagcctaatctgcagaacatacctgtaagagaagaatttggcaggaggataagaaaggcatttgtatcaagttatgaagatgggcttataatatctgctgattattctcagattgagctaagggttcttgcacatctttcagaggatgaaaaacttattgagtcatttttgaacaacgaagatatacatttaaggacggcatcggaggtttttaaggtttcgaaagaagaagtgacaagtgaaatgagaaggcgggcgaaagctgtcaactttggtattgtatatggtataagcgattacggcttatctaaagacttaaagatttcgcgaaaagaagcgaaagaatacatagacaattattttgacaggtacaagggcgtcaaaaattacatcgactcaattgtcaaatttgcaaaggaaaatgggtatgttacgactatcttaaataggagaagatacataccggaaatcaattcaaaaaattttaacaatagatcttttggcgagagaatggcaatgaatacacctattcaaggtagcgctgcggatataataaagatgtcgatggttaaagtatacaatgaattaaaggaaagaggattgaaatcaagacttattcttcaggtgcacgatgagcttataattgacacacatcctgatgaagttgaaatagtcaaggagcttctaaaatcaataatggaaaatatcataaagttgaaagttcctttagttgtagatatagggcaagggaaaaactggtatgatgcaaaataaaaggatcc

SEQ ID NO: 800 - DNA, 2678 bp, Artificial Sequence
  Description of Artificial Sequence: Synthetic Clostridium thermosulfurogenes DNA Polymerase Q796D
atgaaatacctgctgccgaccgctgctgctggtctgctgctcctcgctgcccagccggcgatggccatggcgaaatttttgatcatagatggtaatagcttgatgtacagggcgtattttgccctgcctgatttgatgaacagcgaaggaatgcatacaaatgccatatacggtttttcaatgatgcttcttaaattgctggaggaggagaaaccagactacatagcaatagctttcgataaaaaggcttctacatttaggcacaaggagtacagtgcttataaaggaacccgccagtcgatgccagaagagctgatagaacaggtggatattttaaaagatgtgataaatgcatttaacataaagaccatcgagatagagggatttgaagcagatgatatcattggtacagtatcaaaaattgcttccgaaagtgggatggatgtgcttatcgtcacaggcgacagagatgcgcttcagcttgtgtcggcaaatgtaaaagtaaaaatatgtaaaaaaggcataacgcagatggatgagtacgatgaaaaggcggtctttgaaaagtatgaagtgacgccgcttcaattcatagacttgaaagggcttatgggagacaaatcagacaacattccaggagtgcccaatataggggagaagacggccataaagcttgttaaagaatttggatcaattgaaaatttactgatgaatacagataagttaaaagggaaaataaaagaaaatgtagaaaacaatgcagaattagctgttttaagcaaacggcttgctacgattgagagaaatgttcctattgatattgatttgaatgaatacgcggttaaaaattacgatgtcaataagcttacagagctatttgaaaaattggaattttcaagcctcatctcagatttaaaagatgatagtcgtgatacaaaggatattaaagaatggcctgtaagagattttacatacgttaaaaatgttttaggaaagtttgatgttttgtcattgtatccattcatatatgatggaaagataaaagcagtatcatttgcttgcggtgacggatcgttttttgtagagattgatgattatgacaattttaaattgcttaataatgataagcttacgttgataggacacgatctgaaagattttttagtaaacatttcatactgcggtattgaacttaattgtaagattttagatacggccataatgacttatcttttaaatccgtctgagtcgaattacgacataagtcgcgtattgaaaaaatacttgaaagaggatttgcaaaacatagatgatatagtaggcaagggcaggaataaaaagagctacgatgacattgacaaaaagcttttagtcgattatatgtgttcagccgcatcaaacttatctaagttaaaagataagctcatgtcatttataaaagagatggagatggaagatcttttaaaaaatgtggaaattccgcttattgaagtgctaaaatctatggaggtgtacggctttacattagataaagatgtacttagaagtatttctaaagaaatagatgaaaagacagataagattgtaaaagatatttacgatgctgctggatacgaatttaatattaactctacaaagcagttatcagaatttttgtttgataaactgaatttgccagcaataaaaaagactaaaacagggtattcgactgacatggaagtccttgcagaacttataccgtacaatgacatagtaggagaaataatagaatatagacagcttatgaagcttaaatctacgtacatagatggcttcattcccatcatggatgaaaataatagggtccactctacgtttaaacaaacagttgctgctacagggagaattagctcaacagagcctaatctgcagaacatacctgtaagagaagaatttggcaggaggataagaaaggcatttgtatcaagttatgaagatgggcttataatatctgctgattattctcagattgagctaagggttcttgcacatctttcagaggatgaaaaacttattgagtcatttttgaacaacgaagatatacatttaaggacggcatcggaggtttttaaggtttcgaaagaagaagtgacaagtgaaatgagaaggcgggcgaaagctgtcaactttggtattgtatatggtataagcgattacggcttatctaaagacttaaagatttcgcgaaaagaagcgaaagaatacatagacaattattttgacaggtacaagggcgtcaaaaattacatcgactcaattgtcaaatttgcaaaggaaaatgggtatgttacgactatcttaaataggagaagatacataccggaaatcaattcaaaaaattttaacgatagatcttttggcgagagaatggcaatgaatacacctattcaaggtagcgctgcggatataataaagatgtcgatggttaaagtatacaatgaattaaaggaaagaggattgaaatcaagacttattcttcaggtgcacgatgagcttataattgacacacatcctgatgaagttgaaatagtcaaggagcttctaaaatcaataatggaaaatatcataaagttgaaagttcctttagttgtagatatagggcaagggaaaaactggtatgatgcaaaataaaaggatcc

SEQ ID NO: 801 - DNA, 2678 bp, Artificial Sequence
  Description of Artificial Sequence: Synthetic Clostridium thermosulfurogenes DNA Polymerase Q796C
atgaaatacctgctgccgaccgctgctgctggtctgctgctcctcgctgcccagccggcgatggccatggcgaaatttttgatcatagatggtaatagcttgatgtacagggcgtattttgccctgcctgatttgatgaacagcgaaggaatgcatacaaatgccatatacggtttttcaatgatgcttcttaaattgctggaggaggagaaaccagactacatagcaatagctttcgataaaaaggcttctacatttaggcacaaggagtacagtgcttataaaggaacccgccagtcgatgccagaagagctgatagaacaggtggatattttaaaagatgtgataaatgcatttaacataaagaccatcgagatagagggatttgaagcagatgatatcattggtacagtatcaaaaattgcttccgaaagtgggatggatgtgcttatcgtcacaggcgacagagatgcgcttcagcttgtgtcggcaaatgtaaaagtaaaaatatgtaaaaaaggcataacgcagatggatgagtacgatgaaaaggcggtctttgaaaagtatgaagtgacgccgcttcaattcatagacttgaaagggcttatgggagacaaatcagacaacattccaggagtgcccaatataggggagaagacggccataaagcttgttaaagaatttggatcaattgaaaatttactgatgaatacagataagttaaaagggaaaataaaagaaaatgtagaaaacaatgcagaattagctgttttaagcaaacggcttgctacgattgagagaaatgttcctattgatattgatttgaatgaatacgcggttaaaaattacgatgtcaataagcttacagagctatttgaaaaattggaattttcaagcctcatctcagatttaaaagatgatagtcgtgatacaaaggatattaaagaatggcctgtaagagattttacatacgttaaaaatgttttaggaaagtttgatgttttgtcattgtatccattcatatatgatggaaagataaaagcagtatcatttgcttgcggtgacggatcgttttttgtagagattgatgattatgacaattttaaattgcttaataatgataagcttacgttgataggacacgatctgaaagattttttagtaaacatttcatactgcggtattgaacttaattgtaagattttagatacggccataatgacttatcttttaaatccgtctgagtcgaattacgacataagtcgcgtattgaaaaaatacttgaaagaggatttgcaaaacatagatgatatagtaggcaagggcaggaataaaaagagctacgatgacattgacaaaaagcttttagtcgattatatgtgttcagccgcatcaaacttatctaagttaaaagataagctcatgtcatttataaaagagatggagatggaagatcttttaaaaaatgtggaaattccgcttattgaagtgctaaaatctatggaggtgtacggctttacattagataaagatgtacttagaagtatttctaaagaaatagatgaaaagacagataagattgtaaaagatatttacgatgctgctggatacgaatttaatattaactctacaaagcagttatcagaatttttgtttgataaactgaatttgccagcaataaaaaagactaaaacagggtattcgactgacatggaagtccttgcagaacttataccgtacaatgacatagtaggagaaataatagaatatagacagcttatgaagcttaaatctacgtacatagatggcttcattcccatcatggatgaaaataatagggtccactctacgtttaaacaaacagttgctgctacagggagaattagctcaacagagcctaatctgcagaacatacctgtaagagaagaatttggcaggaggataagaaaggcatttgtatcaagttatgaagatgggcttataatatctgctgattattctcagattgagctaagggttcttgcacatctttcagaggatgaaaaacttattgagtcatttttgaacaacgaagatatacatttaaggacggcatcggaggtttttaaggtttcgaaagaagaagtgacaagtgaaatgagaaggcgggcgaaagctgtcaactttggtattgtatatggtataagcgattacggcttatctaaagacttaaagatttcgcgaaaagaagcgaaagaatacatagacaattattttgacaggtacaagggcgtcaaaaattacatcgactcaattgtcaaatttgcaaaggaaaatgggtatgttacgactatcttaaataggagaagatacataccggaaatcaattcaaaaaattttaactgtagatcttttggcgagagaatggcaatgaatacacctattcaaggtagcgctgcggatataataaagatgtcgatggttaaagtatacaatgaattaaaggaaagaggattgaaatcaagacttattcttcaggtgcacgatgagcttataattgacacacatcctgatgaagttgaaatagtcaaggagcttctaaaatcaataatggaaaatatcataaagttgaaagttcctttagttgtagatatagggcaagggaaaaactggtatgatgcaaaataaaaggatcc

SEQ ID NO: 802 - DNA, 2678 bp, Artificial Sequence
  Description of Artificial Sequence: Synthetic Clostridium thermosulfurogenes DNA Polymerase Q796E
atgaaatacctgctgccgaccgctgctgctggtctgctgctcctcgctgcccagccggcgatggccatggcgaaatttttgatcatagatggtaatagcttgatgtacagggcgtattttgccctgcctgatttgatgaacagcgaaggaatgcatacaaatgccatatacggtttttcaatgatgcttcttaaattgctggaggaggagaaaccagactacatagcaatagctttcgataaaaaggcttctacatttaggcacaaggagtacagtgcttataaaggaacccgccagtcgatgccagaagagctgatagaacaggtggatattttaaaagatgtgataaatgcatttaacataaagaccatcgagatagagggatttgaagcagatgatatcattggtacagtatcaaaaattgcttccgaaagtgggatggatgtgcttatcgtcacaggcgacagagatgcgcttcagcttgtgtcggcaaatgtaaaagtaaaaatatgtaaaaaaggcataacgcagatggatgagtacgatgaaaaggcggtctttgaaaagtatgaagtgacgccgcttcaattcatagacttgaaagggcttatgggagacaaatcagacaacattccaggagtgcccaatataggggagaagacggccataaagcttgttaaagaatttggatcaattgaaaatttactgatgaatacagataagttaaaagggaaaataaaagaaaatgtagaaaacaatgcagaattagctgttttaagcaaacggcttgctacgattgagagaaatgttcctattgatattgatttgaatgaatacgcggttaaaaattacgatgtcaataagcttacagagctatttgaaaaattggaattttcaagcctcatctcagatttaaaagatgatagtcgtgatacaaaggatattaaagaatggcctgtaagagattttacatacgttaaaaatgttttaggaaagtttgatgttttgtcattgtatccattcatatatgatggaaagataaaagcagtatcatttgcttgcggtgacggatcgttttttgtagagattgatgattatgacaattttaaattgcttaataatgataagcttacgttgataggacacgatctgaaagattttttagtaaacatttcatactgcggtattgaacttaattgtaagattttagatacggccataatgacttatcttttaaatccgtctgagtcgaattacgacataagtcgcgtattgaaaaaatacttgaaagaggatttgcaaaacatagatgatatagtaggcaagggcaggaataaaaagagctacgatgacattgacaaaaagcttttagtcgattatatgtgttcagccgcatcaaacttatctaagttaaaagataagctcatgtcatttataaaagagatggagatggaagatcttttaaaaaatgtggaaattccgcttattgaagtgctaaaatctatggaggtgtacggctttacattagataaagatgtacttagaagtatttctaaagaaatagatgaaaagacagataagattgtaaaagatatttacgatgctgctggatacgaatttaatattaactctacaaagcagttatcagaatttttgtttgataaactgaatttgccagcaataaaaaagactaaaacagggtattcgactgacatggaagtccttgcagaacttataccgtacaatgacatagtaggagaaataatagaatatagacagcttatgaagcttaaatctacgtacatagatggcttcattcccatcatggatgaaaataatagggtccactctacgtttaaacaaacagttgctgctacagggagaattagctcaacagagcctaatctgcagaacatacctgtaagagaagaatttggcaggaggataagaaaggcatttgtatcaagttatgaagatgggcttataatatctgctgattattctcagattgagctaagggttcttgcacatctttcagaggatgaaaaacttattgagtcatttttgaacaacgaagatatacatttaaggacggcatcggaggtttttaaggtttcgaaagaagaagtgacaagtgaaatgagaaggcgggcgaaagctgtcaactttggtattgtatatggtataagcgattacggcttatctaaagacttaaagatttcgcgaaaagaagcgaaagaatacatagacaattattttgacaggtacaagggcgtcaaaaattacatcgactcaattgtcaaatttgcaaaggaaaatgggtatgttacgactatcttaaataggagaagatacataccggaaatcaattcaaaaaattttaacgaaagatcttttggcgagagaatggcaatgaatacacctattcaaggtagcgctgcggatataataaagatgtcgatggttaaagtatacaatgaattaaaggaaagaggattgaaatcaagacttattcttcaggtgcacgatgagcttataattgacacacatcctgatgaagttgaaatagtcaaggagcttctaaaatcaataatggaaaatatcataaagttgaaagttcctttagttgtagatatagggcaagggaaaaactggtatgatgcaaaataaaaggatcc

SEQ ID NO: 803 - DNA, 2678 bp, Artificial Sequence
  Description of Artificial Sequence: Synthetic Clostridium thermosulfurogenes DNA Polymerase Q796G
atgaaatacctgctgccgaccgctgctgctggtctgctgctcctcgctgcccagccggcgatggccatggcgaaatttttgatcatagatggtaatagcttgatgtacagggcgtattttgccctgcctgatttgatgaacagcgaaggaatgcatacaaatgccatatacggtttttcaatgatgcttcttaaattgctggaggaggagaaaccagactacatagcaatagctttcgataaaaaggcttctacatttaggcacaaggagtacagtgcttataaaggaacccgccagtcgatgccagaagagctgatagaacaggtggatattttaaaagatgtgataaatgcatttaacataaagaccatcgagatagagggatttgaagcagatgatatcattggtacagtatcaaaaattgcttccgaaagtgggatggatgtgcttatcgtcacaggcgacagagatgcgcttcagcttgtgtcggcaaatgtaaaagtaaaaatatgtaaaaaaggcataacgcagatggatgagtacgatgaaaaggcggtctttgaaaagtatgaagtgacgccgcttcaattcatagacttgaaagggcttatgggagacaaatcagacaacattccaggagtgcccaatataggggagaagacggccataaagcttgttaaagaatttggatcaattgaaaatttactgatgaatacagataagttaaaagggaaaataaaagaaaatgtagaaaacaatgcagaattagctgttttaagcaaacggcttgctacgattgagagaaatgttcctattgatattgatttgaatgaatacgcggttaaaaattacgatgtcaataagcttacagagctatttgaaaaattggaattttcaagcctcatctcagatttaaaagatgatagtcgtgatacaaaggatattaaagaatggcctgtaagagattttacatacgttaaaaatgttttaggaaagtttgatgttttgtcattgtatccattcatatatgatggaaagataaaagcagtatcatttgcttgcggtgacggatcgttttttgtagagattgatgattatgacaattttaaattgcttaataatgataagcttacgttgataggacacgatctgaaagattttttagtaaacatttcatactgcggtattgaacttaattgtaagattttagatacggccataatgacttatcttttaaatccgtctgagtcgaattacgacataagtcgcgtattgaaaaaatacttgaaagaggatttgcaaaacatagatgatatagtaggcaagggcaggaataaaaagagctacgatgacattgacaaaaagcttttagtcgattatatgtgttcagccgcatcaaacttatctaagttaaaagataagctcatgtcatttataaaagagatggagatggaagatcttttaaaaaatgtggaaattccgcttattgaagtgctaaaatctatggaggtgtacggctttacattagataaagatgtacttagaagtatttctaaagaaatagatgaaaagacagataagattgtaaaagatatttacgatgctgctggatacgaatttaatattaactctacaaagcagttatcagaatttttgtttgataaactgaatttgccagcaataaaaaagactaaaacagggtattcgactgacatggaagtccttgcagaacttataccgtacaatgacatagtaggagaaataatagaatatagacagcttatgaagcttaaatctacgtacatagatggcttcattcccatcatggatgaaaataatagggtccactctacgtttaaacaaacagttgctgctacagggagaattagctcaacagagcctaatctgcagaacatacctgtaagagaagaatttggcaggaggataagaaaggcatttgtatcaagttatgaagatgggcttataatatctgctgattattctcagattgagctaagggttcttgcacatctttcagaggatgaaaaacttattgagtcatttttgaacaacgaagatatacatttaaggacggcatcggaggtttttaaggtttcgaaagaagaagtgacaagtgaaatgagaaggcgggcgaaagctgtcaactttggtattgtatatggtataagcgattacggcttatctaaagacttaaagatttcgcgaaaagaagcgaaagaatacatagacaattattttgacaggtacaagggcgtcaaaaattacatcgactcaattgtcaaatttgcaaaggaaaatgggtatgttacgactatcttaaataggagaagatacataccggaaatcaattcaaaaaattttaacggtagatcttttggcgagagaatggcaatgaatacacctattcaaggtagcgctgcggatataataaagatgtcgatggttaaagtatacaatgaattaaaggaaagaggattgaaatcaagacttattcttcaggtgcacgatgagcttataattgacacacatcctgatgaagttgaaatagtcaaggagcttctaaaatcaataatggaaaatatcataaagttgaaagttcctttagttgtagatatagggcaagggaaaaactggtatgatgcaaaataaaaggatcc

SEQ ID NO: 804 - DNA, 2678 bp, Artificial Sequence
  Description of Artificial Sequence: Synthetic Clostridium thermosulfurogenes DNA Polymerase Q796H
atgaaatacctgctgccgaccgctgctgctggtctgctgctcctcgctgcccagccggcgatggccatggcgaaatttttgatcatagatggtaatagcttgatgtacagggcgtattttgccctgcctgatttgatgaacagcgaaggaatgcatacaaatgccatatacggtttttcaatgatgcttcttaaattgctggaggaggagaaaccagactacatagcaatagctttcgataaaaaggcttctacatttaggcacaaggagtacagtgcttataaaggaacccgccagtcgatgccagaagagctgatagaacaggtggatattttaaaagatgtgataaatgcatttaacataaagaccatcgagatagagggatttgaagcagatgatatcattggtacagtatcaaaaattgcttccgaaagtgggatggatgtgcttatcgtcacaggcgacagagatgcgcttcagcttgtgtcggcaaatgtaaaagtaaaaatatgtaaaaaaggcataacgcagatggatgagtacgatgaaaaggcggtctttgaaaagtatgaagtgacgccgcttcaattcatagacttgaaagggcttatgggagacaaatcagacaacattccaggagtgcccaatataggggagaagacggccataaagcttgttaaagaatttggatcaattgaaaatttactgatgaatacagataagttaaaagggaaaataaaagaaaatgtagaaaacaatgcagaattagctgttttaagcaaacggcttgctacgattgagagaaatgttcctattgatattgatttgaatgaatacgcggttaaaaattacgatgtcaataagcttacagagctatttgaaaaattggaattttcaagcctcatctcagatttaaaagatgatagtcgtgatacaaaggatattaaagaatggcctgtaagagattttacatacgttaaaaatgttttaggaaagtttgatgttttgtcattgtatccattcatatatgatggaaagataaaagcagtatcatttgcttgcggtgacggatcgttttttgtagagattgatgattatgacaattttaaattgcttaataatgataagcttacgttgataggacacgatctgaaagattttttagtaaacatttcatactgcggtattgaacttaattgtaagattttagatacggccataatgacttatcttttaaatccgtctgagtcgaattacgacataagtcgcgtattgaaaaaatacttgaaagaggatttgcaaaacatagatgatatagtaggcaagggcaggaataaaaagagctacgatgacattgacaaaaagcttttagtcgattatatgtgttcagccgcatcaaacttatctaagttaaaagataagctcatgtcatttataaaagagatggagatggaagatcttttaaaaaatgtggaaattccgcttattgaagtgctaaaatctatggaggtgtacggctttacattagataaagatgtacttagaagtatttctaaagaaatagatgaaaagacagataagattgtaaaagatatttacgatgctgctggatacgaatttaatattaactctacaaagcagttatcagaatttttgtttgataaactgaatttgccagcaataaaaaagactaaaacagggtattcgactgacatggaagtccttgcagaacttataccgtacaatgacatagtaggagaaataatagaatatagacagcttatgaagcttaaatctacgtacatagatggcttcattcccatcatggatgaaaataatagggtccactctacgtttaaacaaacagttgctgctacagggagaattagctcaacagagcctaatctgcagaacatacctgtaagagaagaatttggcaggaggataagaaaggcatttgtatcaagttatgaagatgggcttataatatctgctgattattctcagattgagctaagggttcttgcacatctttcagaggatgaaaaacttattgagtcatttttgaacaacgaagatatacatttaaggacggcatcggaggtttttaaggtttcgaaagaagaagtgacaagtgaaatgagaaggcgggcgaaagctgtcaactttggtattgtatatggtataagcgattacggcttatctaaagacttaaagatttcgcgaaaagaagcgaaagaatacatagacaattattttgacaggtacaagggcgtcaaaaattacatcgactcaattgtcaaatttgcaaaggaaaatgggtatgttacgactatcttaaataggagaagatacataccggaaatcaattcaaaaaattttaaccatagatcttttggcgagagaatggcaatgaatacacctattcaaggtagcgctgcggatataataaagatgtcgatggttaaagtatacaatgaattaaaggaaagaggattgaaatcaagacttattcttcaggtgcacgatgagcttataattgacacacatcctgatgaagttgaaatagtcaaggagcttctaaaatcaataatggaaaatatcataaagttgaaagttcctttagttgtagatatagggcaagggaaaaactggtatgatgcaaaataaaaggatcc

SEQ ID NO: 805 - DNA, 2678 bp, Artificial Sequence
  Description of Artificial Sequence: Synthetic Clostridium thermosulfurogenes DNA Polymerase Q796I
atgaaatacctgctgccgaccgctgctgctggtctgctgctcctcgctgcccagccggcgatggccatggcgaaatttttgatcatagatggtaatagcttgatgtacagggcgtattttgccctgcctgatttgatgaacagcgaaggaatgcatacaaatgccatatacggtttttcaatgatgcttcttaaattgctggaggaggagaaaccagactacatagcaatagctttcgataaaaaggcttctacatttaggcacaaggagtacagtgcttataaaggaacccgccagtcgatgccagaagagctgatagaacaggtggatattttaaaagatgtgataaatgcatttaacataaagaccatcgagatagagggatttgaagcagatgatatcattggtacagtatcaaaaattgcttccgaaagtgggatggatgtgcttatcgtcacaggcgacagagatgcgcttcagcttgtgtcggcaaatgtaaaagtaaaaatatgtaaaaaaggcataacgcagatggatgagtacgatgaaaaggcggtctttgaaaagtatgaagtgacgccgcttcaattcatagacttgaaagggcttatgggagacaaatcagacaacattccaggagtgcccaatataggggagaagacggccataaagcttgttaaagaatttggatcaattgaaaatttactgatgaatacagataagttaaaagggaaaataaaagaaaatgtagaaaacaatgcagaattagctgttttaagcaaacggcttgctacgattgagagaaatgttcctattgatattgatttgaatgaatacgcggttaaaaattacgatgtcaataagcttacagagctatttgaaaaattggaattttcaagcctcatctcagatttaaaagatgatagtcgtgatacaaaggatattaaagaatggcctgtaagagattttacatacgttaaaaatgttttaggaaagtttgatgttttgtcattgtatccattcatatatgatggaaagataaaagcagtatcatttgcttgcggtgacggatcgttttttgtagagattgatgattatgacaattttaaattgcttaataatgataagcttacgttgataggacacgatctgaaagattttttagtaaacatttcatactgcggtattgaacttaattgtaagattttagatacggccataatgacttatcttttaaatccgtctgagtcgaattacgacataagtcgcgtattgaaaaaatacttgaaagaggatttgcaaaacatagatgatatagtaggcaagggcaggaataaaaagagctacgatgacattgacaaaaagcttttagtcgattatatgtgttcagccgcatcaaacttatctaagttaaaagataagctcatgtcatttataaaagagatggagatggaagatcttttaaaaaatgtggaaattccgcttattgaagtgctaaaatctatggaggtgtacggctttacattagataaagatgtacttagaagtatttctaaagaaatagatgaaaagacagataagattgtaaaagatatttacgatgctgctggatacgaatttaatattaactctacaaagcagttatcagaatttttgtttgataaactgaatttgccagcaataaaaaagactaaaacagggtattcgactgacatggaagtccttgcagaacttataccgtacaatgacatagtaggagaaataatagaatatagacagcttatgaagcttaaatctacgtacatagatggcttcattcccatcatggatgaaaataatagggtccactctacgtttaaacaaacagttgctgctacagggagaattagctcaacagagcctaatctgcagaacatacctgtaagagaagaatttggcaggaggataagaaaggcatttgtatcaagttatgaagatgggcttataatatctgctgattattctcagattgagctaagggttcttgcacatctttcagaggatgaaaaacttattgagtcatttttgaacaacgaagatatacatttaaggacggcatcggaggtttttaaggtttcgaaagaagaagtgacaagtgaaatgagaaggcgggcgaaagctgtcaactttggtattgtatatggtataagcgattacggcttatctaaagacttaaagatttcgcgaaaagaagcgaaagaatacatagacaattattttgacaggtacaagggcgtcaaaaattacatcgactcaattgtcaaatttgcaaaggaaaatgggtatgttacgactatcttaaataggagaagatacataccggaaatcaattcaaaaaattttaacattagatcttttggcgagagaatggcaatgaatacacctattcaaggtagcgctgcggatataataaagatgtcgatggttaaagtatacaatgaattaaaggaaagaggattgaaatcaagacttattcttcaggtgcacgatgagcttataattgacacacatcctgatgaagttgaaatagtcaaggagcttctaaaatcaataatggaaaatatcataaagttgaaagttcctttagttgtagatatagggcaagggaaaaactggtatgatgcaaaataaaaggatcc

SEQ ID NO: 806 - DNA, 2678 bp, Artificial Sequence
  Description of Artificial Sequence: Synthetic Clostridium thermosulfurogenes DNA Polymerase Q796L
atgaaatacctgctgccgaccgctgctgctggtctgctgctcctcgctgcccagccggcgatggccatggcgaaatttttgatcatagatggtaatagcttgatgtacagggcgtattttgccctgcctgatttgatgaacagcgaaggaatgcatacaaatgccatatacggtttttcaatgatgcttcttaaattgctggaggaggagaaaccagactacatagcaatagctttcgataaaaaggcttctacatttaggcacaaggagtacagtgcttataaaggaacccgccagtcgatgccagaagagctgatagaacaggtggatattttaaaagatgtgataaatgcatttaacataaagaccatcgagatagagggatttgaagcagatgatatcattggtacagtatcaaaaattgcttccgaaagtgggatggatgtgcttatcgtcacaggcgacagagatgcgcttcagcttgtgtcggcaaatgtaaaagtaaaaatatgtaaaaaaggcataacgcagatggatgagtacgatgaaaaggcggtctttgaaaagtatgaagtgacgccgcttcaattcatagacttgaaagggcttatgggagacaaatcagacaacattccaggagtgcccaatataggggagaagacggccataaagcttgttaaagaatttggatcaattgaaaatttactgatgaatacagataagttaaaagggaaaataaaagaaaatgtagaaaacaatgcagaattagctgttttaagcaaacggcttgctacgattgagagaaatgttcctattgatattgatttgaatgaatacgcggttaaaaattacgatgtcaataagcttacagagctatttgaaaaattggaattttcaagcctcatctcagatttaaaagatgatagtcgtgatacaaaggatattaaagaatggcctgtaagagattttacatacgttaaaaatgttttaggaaagtttgatgttttgtcattgtatccattcatatatgatggaaagataaaagcagtatcatttgcttgcggtgacggatcgttttttgtagagattgatgattatgacaattttaaattgcttaataatgataagcttacgttgataggacacgatctgaaagattttttagtaaacatttcatactgcggtattgaacttaattgtaagattttagatacggccataatgacttatcttttaaatccgtctgagtcgaattacgacataagtcgcgtattgaaaaaatacttgaaagaggatttgcaaaacatagatgatatagtaggcaagggcaggaataaaaagagctacgatgacattgacaaaaagcttttagtcgattatatgtgttcagccgcatcaaacttatctaagttaaaagataagctcatgtcatttataaaagagatggagatggaagatcttttaaaaaatgtggaaattccgcttattgaagtgctaaaatctatggaggtgtacggctttacattagataaagatgtacttagaagtatttctaaagaaatagatgaaaagacagataagattgtaaaagatatttacgatgctgctggatacgaatttaatattaactctacaaagcagttatcagaatttttgtttgataaactgaatttgccagcaataaaaaagactaaaacagggtattcgactgacatggaagtccttgcagaacttataccgtacaatgacatagtaggagaaataatagaatatagacagcttatgaagcttaaatctacgtacatagatggcttcattcccatcatggatgaaaataatagggtccactctacgtttaaacaaacagttgctgctacagggagaattagctcaacagagcctaatctgcagaacatacctgtaagagaagaatttggcaggaggataagaaaggcatttgtatcaagttatgaagatgggcttataatatctgctgattattctcagattgagctaagggttcttgcacatctttcagaggatgaaaaacttattgagtcatttttgaacaacgaagatatacatttaaggacggcatcggaggtttttaaggtttcgaaagaagaagtgacaagtgaaatgagaaggcgggcgaaagctgtcaactttggtattgtatatggtataagcgattacggcttatctaaagacttaaagatttcgcgaaaagaagcgaaagaatacatagacaattattttgacaggtacaagggcgtcaaaaattacatcgactcaattgtcaaatttgcaaaggaaaatgggtatgttacgactatcttaaataggagaagatacataccggaaatcaattcaaaaaattttaaccttagatcttttggcgagagaatggcaatgaatacacctattcaaggtagcgctgcggatataataaagatgtcgatggttaaagtatacaatgaattaaaggaaagaggattgaaatcaagacttattcttcaggtgcacgatgagcttataattgacacacatcctgatgaagttgaaatagtcaaggagcttctaaaatcaataatggaaaatatcataaagttgaaagttcctttagttgtagatatagggcaagggaaaaactggtatgatgcaaaataaaaggatcc

SEQ ID NO: 807 - DNA, 2678 bp, Artificial Sequence
  Description of Artificial Sequence: Synthetic Clostridium thermosulfurogenes DNA Polymerase Q796K
atgaaatacctgctgccgaccgctgctgctggtctgctgctcctcgctgcccagccggcgatggccatggcgaaatttttgatcatagatggtaatagcttgatgtacagggcgtattttgccctgcctgatttgatgaacagcgaaggaatgcatacaaatgccatatacggtttttcaatgatgcttcttaaattgctggaggaggagaaaccagactacatagcaatagctttcgataaaaaggcttctacatttaggcacaaggagtacagtgcttataaaggaacccgccagtcgatgccagaagagctgatagaacaggtggatattttaaaagatgtgataaatgcatttaacataaagaccatcgagatagagggatttgaagcagatgatatcattggtacagtatcaaaaattgcttccgaaagtgggatggatgtgcttatcgtcacaggcgacagagatgcgcttcagcttgtgtcggcaaatgtaaaagtaaaaatatgtaaaaaaggcataacgcagatggatgagtacgatgaaaaggcggtctttgaaaagtatgaagtgacgccgcttcaattcatagacttgaaagggcttatgggagacaaatcagacaacattccaggagtgcccaatataggggagaagacggccataaagcttgttaaagaatttggatcaattgaaaatttactgatgaatacagataagttaaaagggaaaataaaagaaaatgtagaaaacaatgcagaattagctgttttaagcaaacggcttgctacgattgagagaaatgttcctattgatattgatttgaatgaatacgcggttaaaaattacgatgtcaataagcttacagagctatttgaaaaattggaattttcaagcctcatctcagatttaaaagatgatagtcgtgatacaaaggatattaaagaatggcctgtaagagattttacatacgttaaaaatgttttaggaaagtttgatgttttgtcattgtatccattcatatatgatggaaagataaaagcagtatcatttgcttgcggtgacggatcgttttttgtagagattgatgattatgacaattttaaattgcttaataatgataagcttacgttgataggacacgatctgaaagattttttagtaaacatttcatactgcggtattgaacttaattgtaagattttagatacggccataatgacttatcttttaaatccgtctgagtcgaattacgacataagtcgcgtattgaaaaaatacttgaaagaggatttgcaaaacatagatgatatagtaggcaagggcaggaataaaaagagctacgatgacattgacaaaaagcttttagtcgattatatgtgttcagccgcatcaaacttatctaagttaaaagataagctcatgtcatttataaaagagatggagatggaagatcttttaaaaaatgtggaaattccgcttattgaagtgctaaaatctatggaggtgtacggctttacattagataaagatgtacttagaagtatttctaaagaaatagatgaaaagacagataagattgtaaaagatatttacgatgctgctggatacgaatttaatattaactctacaaagcagttatcagaatttttgtttgataaactgaatttgccagcaataaaaaagactaaaacagggtattcgactgacatggaagtccttgcagaacttataccgtacaatgacatagtaggagaaataatagaatatagacagcttatgaagcttaaatctacgtacatagatggcttcattcccatcatggatgaaaataatagggtccactctacgtttaaacaaacagttgctgctacagggagaattagctcaacagagcctaatctgcagaacatacctgtaagagaagaatttggcaggaggataagaaaggcatttgtatcaagttatgaagatgggcttataatatctgctgattattctcagattgagctaagggttcttgcacatctttcagaggatgaaaaacttattgagtcatttttgaacaacgaagatatacatttaaggacggcatcggaggtttttaaggtttcgaaagaagaagtgacaagtgaaatgagaaggcgggcgaaagctgtcaactttggtattgtatatggtataagcgattacggcttatctaaagacttaaagatttcgcgaaaagaagcgaaagaatacatagacaattattttgacaggtacaagggcgtcaaaaattacatcgactcaattgtcaaatttgcaaaggaaaatgggtatgttacgactatcttaaataggagaagatacataccggaaatcaattcaaaaaattttaacaaaagatcttttggcgagagaatggcaatgaatacacctattcaaggtagcgctgcggatataataaagatgtcgatggttaaagtatacaatgaattaaaggaaagaggattgaaatcaagacttattcttcaggtgcacgatgagcttataattgacacacatcctgatgaagttgaaatagtcaaggagcttctaaaatcaataatggaaaatatcataaagttgaaagttcctttagttgtagatatagggcaagggaaaaactggtatgatgcaaaataaaaggatcc

SEQ ID NO: 808 - DNA, 2678 bp, Artificial Sequence
  Description of Artificial Sequence: Synthetic Clostridium thermosulfurogenes DNA Polymerase Q796M
atgaaatacctgctgccgaccgctgctgctggtctgctgctcctcgctgcccagccggcgatggccatggcgaaatttttgatcatagatggtaatagcttgatgtacagggcgtattttgccctgcctgatttgatgaacagcgaaggaatgcatacaaatgccatatacggtttttcaatgatgcttcttaaattgctggaggaggagaaaccagactacatagcaatagctttcgataaaaaggcttctacatttaggcacaaggagtacagtgcttataaaggaacccgccagtcgatgccagaagagctgatagaacaggtggatattttaaaagatgtgataaatgcatttaacataaagaccatcgagatagagggatttgaagcagatgatatcattggtacagtatcaaaaattgcttccgaaagtgggatggatgtgcttatcgtcacaggcgacagagatgcgcttcagcttgtgtcggcaaatgtaaaagtaaaaatatgtaaaaaaggcataacgcagatggatgagtacgatgaaaaggcggtctttgaaaagtatgaagtgacgccgcttcaattcatagacttgaaagggcttatgggagacaaatcagacaacattccaggagtgcccaatataggggagaagacggccataaagcttgttaaagaatttggatcaattgaaaatttactgatgaatacagataagttaaaagggaaaataaaagaaaatgtagaaaacaatgcagaattagctgttttaagcaaacggcttgctacgattgagagaaatgttcctattgatattgatttgaatgaatacgcggttaaaaattacgatgtcaataagcttacagagctatttgaaaaattggaattttcaagcctcatctcagatttaaaagatgatagtcgtgatacaaaggatattaaagaatggcctgtaagagattttacatacgttaaaaatgttttaggaaagtttgatgttttgtcattgtatccattcatatatgatggaaagataaaagcagtatcatttgcttgcggtgacggatcgttttttgtagagattgatgattatgacaattttaaattgcttaataatgataagcttacgttgataggacacgatctgaaagattttttagtaaacatttcatactgcggtattgaacttaattgtaagattttagatacggccataatgacttatcttttaaatccgtctgagtcgaattacgacataagtcgcgtattgaaaaaatacttgaaagaggatttgcaaaacatagatgatatagtaggcaagggcaggaataaaaagagctacgatgacattgacaaaaagcttttagtcgattatatgtgttcagccgcatcaaacttatctaagttaaaagataagctcatgtcatttataaaagagatggagatggaagatcttttaaaaaatgtggaaattccgcttattgaagtgctaaaatctatggaggtgtacggctttacattagataaagatgtacttagaagtatttctaaagaaatagatgaaaagacagataagattgtaaaagatatttacgatgctgctggatacgaatttaatattaactctacaaagcagttatcagaatttttgtttgataaactgaatttgccagcaataaaaaagactaaaacagggtattcgactgacatggaagtccttgcagaacttataccgtacaatgacatagtaggagaaataatagaatatagacagcttatgaagcttaaatctacgtacatagatggcttcattcccatcatggatgaaaataatagggtccactctacgtttaaacaaacagttgctgctacagggagaattagctcaacagagcctaatctgcagaacatacctgtaagagaagaatttggcaggaggataagaaaggcatttgtatcaagttatgaagatgggcttataatatctgctgattattctcagattgagctaagggttcttgcacatctttcagaggatgaaaaacttattgagtcatttttgaacaacgaagatatacatttaaggacggcatcggaggtttttaaggtttcgaaagaagaagtgacaagtgaaatgagaaggcgggcgaaagctgtcaactttggtattgtatatggtataagcgattacggcttatctaaagacttaaagatttcgcgaaaagaagcgaaagaatacatagacaattattttgacaggtacaagggcgtcaaaaattacatcgactcaattgtcaaatttgcaaaggaaaatgggtatgttacgactatcttaaataggagaagatacataccggaaatcaattcaaaaaattttaacatgagatcttttggcgagagaatggcaatgaatacacctattcaaggtagcgctgcggatataataaagatgtcgatggttaaagtatacaatgaattaaaggaaagaggattgaaatcaagacttattcttcaggtgcacgatgagcttataattgacacacatcctgatgaagttgaaatagtcaaggagcttctaaaatcaataatggaaaatatcataaagttgaaagttcctttagttgtagatatagggcaagggaaaaactggtatgatgcaaaataaaaggatcc

SEQ ID NO: 809 - DNA, 2678 bp, Artificial Sequence
  Description of Artificial Sequence: Synthetic Clostridium thermosulfurogenes DNA Polymerase Q796F
atgaaatacctgctgccgaccgctgctgctggtctgctgctcctcgctgcccagccggcgatggccatggcgaaatttttgatcatagatggtaatagcttgatgtacagggcgtattttgccctgcctgatttgatgaacagcgaaggaatgcatacaaatgccatatacggtttttcaatgatgcttcttaaattgctggaggaggagaaaccagactacatagcaatagctttcgataaaaaggcttctacatttaggcacaaggagtacagtgcttataaaggaacccgccagtcgatgccagaagagctgatagaacaggtggatattttaaaagatgtgataaatgcatttaacataaagaccatcgagatagagggatttgaagcagatgatatcattggtacagtatcaaaaattgcttccgaaagtgggatggatgtgcttatcgtcacaggcgacagagatgcgcttcagcttgtgtcggcaaatgtaaaagtaaaaatatgtaaaaaaggcataacgcagatggatgagtacgatgaaaaggcggtctttgaaaagtatgaagtgacgccgcttcaattcatagacttgaaagggcttatgggagacaaatcagacaacattccaggagtgcccaatataggggagaagacggccataaagcttgttaaagaatttggatcaattgaaaatttactgatgaatacagataagttaaaagggaaaataaaagaaaatgtagaaaacaatgcagaattagctgttttaagcaaacggcttgctacgattgagagaaatgttcctattgatattgatttgaatgaatacgcggttaaaaattacgatgtcaataagcttacagagctatttgaaaaattggaattttcaagcctcatctcagatttaaaagatgatagtcgtgatacaaaggatattaaagaatggcctgtaagagattttacatacgttaaaaatgttttaggaaagtttgatgttttgtcattgtatccattcatatatgatggaaagataaaagcagtatcatttgcttgcggtgacggatcgttttttgtagagattgatgattatgacaattttaaattgcttaataatgataagcttacgttgataggacacgatctgaaagattttttagtaaacatttcatactgcggtattgaacttaattgtaagattttagatacggccataatgacttatcttttaaatccgtctgagtcgaattacgacataagtcgcgtattgaaaaaatacttgaaagaggatttgcaaaacatagatgatatagtaggcaagggcaggaataaaaagagctacgatgacattgacaaaaagcttttagtcgattatatgtgttcagccgcatcaaacttatctaagttaaaagataagctcatgtcatttataaaagagatggagatggaagatcttttaaaaaatgtggaaattccgcttattgaagtgctaaaatctatggaggtgtacggctttacattagataaagatgtacttagaagtatttctaaagaaatagatgaaaagacagataagattgtaaaagatatttacgatgctgctggatacgaatttaatattaactctacaaagcagttatcagaatttttgtttgataaactgaatttgccagcaataaaaaagactaaaacagggtattcgactgacatggaagtccttgcagaacttataccgtacaatgacatagtaggagaaataatagaatatagacagcttatgaagcttaaatctacgtacatagatggcttcattcccatcatggatgaaaataatagggtccactctacgtttaaacaaacagttgctgctacagggagaattagctcaacagagcctaatctgcagaacatacctgtaagagaagaatttggcaggaggataagaaaggcatttgtatcaagttatgaagatgggcttataatatctgctgattattctcagattgagctaagggttcttgcacatctttcagaggatgaaaaacttattgagtcatttttgaacaacgaagatatacatttaaggacggcatcggaggtttttaaggtttcgaaagaagaagtgacaagtgaaatgagaaggcgggcgaaagctgtcaactttggtattgtatatggtataagcgattacggcttatctaaagacttaaagatttcgcgaaaagaagcgaaagaatacatagacaattattttgacaggtacaagggcgtcaaaaattacatcgactcaattgtcaaatttgcaaaggaaaatgggtatgttacgactatcttaaataggagaagatacataccggaaatcaattcaaaaaattttaactttagatcttttggcgagagaatggcaatgaatacacctattcaaggtagcgctgcggatataataaagatgtcgatggttaaagtatacaatgaattaaaggaaagaggattgaaatcaagacttattcttcaggtgcacgatgagcttataattgacacacatcctgatgaagttgaaatagtcaaggagcttctaaaatcaataatggaaaatatcataaagttgaaagttcctttagttgtagatatagggcaagggaaaaactggtatgatgcaaaataaaaggatcc

SEQ ID NO: 810 - DNA, 2678 bp, Artificial Sequence
  Description of Artificial Sequence: Synthetic Clostridium thermosulfurogenes DNA Polymerase Q796P
atgaaatacctgctgccgaccgctgctgctggtctgctgctcctcgctgcccagccggcgatggccatggcgaaatttttgatcatagatggtaatagcttgatgtacagggcgtattttgccctgcctgatttgatgaacagcgaaggaatgcatacaaatgccatatacggtttttcaatgatgcttcttaaattgctggaggaggagaaaccagactacatagcaatagctttcgataaaaaggcttctacatttaggcacaaggagtacagtgcttataaaggaacccgccagtcgatgccagaagagctgatagaacaggtggatattttaaaagatgtgataaatgcatttaacataaagaccatcgagatagagggatttgaagcagatgatatcattggtacagtatcaaaaattgcttccgaaagtgggatggatgtgcttatcgtcacaggcgacagagatgcgcttcagcttgtgtcggcaaatgtaaaagtaaaaatatgtaaaaaaggcataacgcagatggatgagtacgatgaaaaggcggtctttgaaaagtatgaagtgacgccgcttcaattcatagacttgaaagggcttatgggagacaaatcagacaacattccaggagtgcccaatataggggagaagacggccataaagcttgttaaagaatttggatcaattgaaaatttactgatgaatacagataagttaaaagggaaaataaaagaaaatgtagaaaacaatgcagaattagctgttttaagcaaacggcttgctacgattgagagaaatgttcctattgatattgatttgaatgaatacgcggttaaaaattacgatgtcaataagcttacagagctatttgaaaaattggaattttcaagcctcatctcagatttaaaagatgatagtcgtgatacaaaggatattaaagaatggcctgtaagagattttacatacgttaaaaatgttttaggaaagtttgatgttttgtcattgtatccattcatatatgatggaaagataaaagcagtatcatttgcttgcggtgacggatcgttttttgtagagattgatgattatgacaattttaaattgcttaataatgataagcttacgttgataggacacgatctgaaagattttttagtaaacatttcatactgcggtattgaacttaattgtaagattttagatacggccataatgacttatcttttaaatccgtctgagtcgaattacgacataagtcgcgtattgaaaaaatacttgaaagaggatttgcaaaacatagatgatatagtaggcaagggcaggaataaaaagagctacgatgacattgacaaaaagcttttagtcgattatatgtgttcagccgcatcaaacttatctaagttaaaagataagctcatgtcatttataaaagagatggagatggaagatcttttaaaaaatgtggaaattccgcttattgaagtgctaaaatctatggaggtgtacggctttacattagataaagatgtacttagaagtatttctaaagaaatagatgaaaagacagataagattgtaaaagatatttacgatgctgctggatacgaatttaatattaactctacaaagcagttatcagaatttttgtttgataaactgaatttgccagcaataaaaaagactaaaacagggtattcgactgacatggaagtccttgcagaacttataccgtacaatgacatagtaggagaaataatagaatatagacagcttatgaagcttaaatctacgtacatagatggcttcattcccatcatggatgaaaataatagggtccactctacgtttaaacaaacagttgctgctacagggagaattagctcaacagagcctaatctgcagaacatacctgtaagagaagaatttggcaggaggataagaaaggcatttgtatcaagttatgaagatgggcttataatatctgctgattattctcagattgagctaagggttcttgcacatctttcagaggatgaaaaacttattgagtcatttttgaacaacgaagatatacatttaaggacggcatcggaggtttttaaggtttcgaaagaagaagtgacaagtgaaatgagaaggcgggcgaaagctgtcaactttggtattgtatatggtataagcgattacggcttatctaaagacttaaagatttcgcgaaaagaagcgaaagaatacatagacaattattttgacaggtacaagggcgtcaaaaattacatcgactcaattgtcaaatttgcaaaggaaaatgggtatgttacgactatcttaaataggagaagatacataccggaaatcaattcaaaaaattttaaccctagatcttttggcgagagaatggcaatgaatacacctattcaaggtagcgctgcggatataataaagatgtcgatggttaaagtatacaatgaattaaaggaaagaggattgaaatcaagacttattcttcaggtgcacgatgagcttataattgacacacatcctgatgaagttgaaatagtcaaggagcttctaaaatcaataatggaaaatatcataaagttgaaagttcctttagttgtagatatagggcaagggaaaaactggtatgatgcaaaataaaaggatcc

SEQ ID NO: 811 - DNA, 2678 bp, Artificial Sequence
  Description of Artificial Sequence: Synthetic Clostridium thermosulfurogenes DNA Polymerase Q796S
atgaaatacctgctgccgaccgctgctgctggtctgctgctcctcgctgcccagccggcgatggccatggcgaaatttttgatcatagatggtaatagcttgatgtacagggcgtattttgccctgcctgatttgatgaacagcgaaggaatgcatacaaatgccatatacggtttttcaatgatgcttcttaaattgctggaggaggagaaaccagactacatagcaatagctttcgataaaaaggcttctacatttaggcacaaggagtacagtgcttataaaggaacccgccagtcgatgccagaagagctgatagaacaggtggatattttaaaagatgtgataaatgcatttaacataaagaccatcgagatagagggatttgaagcagatgatatcattggtacagtatcaaaaattgcttccgaaagtgggatggatgtgcttatcgtcacaggcgacagagatgcgcttcagcttgtgtcggcaaatgtaaaagtaaaaatatgtaaaaaaggcataacgcagatggatgagtacgatgaaaaggcggtctttgaaaagtatgaagtgacgccgcttcaattcatagacttgaaagggcttatgggagacaaatcagacaacattccaggagtgcccaatataggggagaagacggccataaagcttgttaaagaatttggatcaattgaaaatttactgatgaatacagataagttaaaagggaaaataaaagaaaatgtagaaaacaatgcagaattagctgttttaagcaaacggcttgctacgattgagagaaatgttcctattgatattgatttgaatgaatacgcggttaaaaattacgatgtcaataagcttacagagctatttgaaaaattggaattttcaagcctcatctcagatttaaaagatgatagtcgtgatacaaaggatattaaagaatggcctgtaagagattttacatacgttaaaaatgttttaggaaagtttgatgttttgtcattgtatccattcatatatgatggaaagataaaagcagtatcatttgcttgcggtgacggatcgttttttgtagagattgatgattatgacaattttaaattgcttaataatgataagcttacgttgataggacacgatctgaaagattttttagtaaacatttcatactgcggtattgaacttaattgtaagattttagatacggccataatgacttatcttttaaatccgtctgagtcgaattacgacataagtcgcgtattgaaaaaatacttgaaagaggatttgcaaaacatagatgatatagtaggcaagggcaggaataaaaagagctacgatgacattgacaaaaagcttttagtcgattatatgtgttcagccgcatcaaacttatctaagttaaaagataagctcatgtcatttataaaagagatggagatggaagatcttttaaaaaatgtggaaattccgcttattgaagtgctaaaatctatggaggtgtacggctttacattagataaagatgtacttagaagtatttctaaagaaatagatgaaaagacagataagattgtaaaagatatttacgatgctgctggatacgaatttaatattaactctacaaagcagttatcagaatttttgtttgataaactgaatttgccagcaataaaaaagactaaaacagggtattcgactgacatggaagtccttgcagaacttataccgtacaatgacatagtaggagaaataatagaatatagacagcttatgaagcttaaatctacgtacatagatggcttcattcccatcatggatgaaaataatagggtccactctacgtttaaacaaacagttgctgctacagggagaattagctcaacagagcctaatctgcagaacatacctgtaagagaagaatttggcaggaggataagaaaggcatttgtatcaagttatgaagatgggcttataatatctgctgattattctcagattgagctaagggttcttgcacatctttcagaggatgaaaaacttattgagtcatttttgaacaacgaagatatacatttaaggacggcatcggaggtttttaaggtttcgaaagaagaagtgacaagtgaaatgagaaggcgggcgaaagctgtcaactttggtattgtatatggtataagcgattacggcttatctaaagacttaaagatttcgcgaaaagaagcgaaagaatacatagacaattattttgacaggtacaagggcgtcaaaaattacatcgactcaattgtcaaatttgcaaaggaaaatgggtatgttacgactatcttaaataggagaagatacataccggaaatcaattcaaaaaattttaactctagatcttttggcgagagaatggcaatgaatacacctattcaaggtagcgctgcggatataataaagatgtcgatggttaaagtatacaatgaattaaaggaaagaggattgaaatcaagacttattcttcaggtgcacgatgagcttataattgacacacatcctgatgaagttgaaatagtcaaggagcttctaaaatcaataatggaaaatatcataaagttgaaagttcctttagttgtagatatagggcaagggaaaaactggtatgatgcaaaataaaaggatcc

SEQ ID NO: 812 - DNA, 2678 bp, Artificial Sequence
  Description of Artificial Sequence: Synthetic Clostridium thermosulfurogenes DNA Polymerase Q796T
atgaaatacctgctgccgaccgctgctgctggtctgctgctcctcgctgcccagccggcgatggccatggcgaaatttttgatcatagatggtaatagcttgatgtacagggcgtattttgccctgcctgatttgatgaacagcgaaggaatgcatacaaatgccatatacggtttttcaatgatgcttcttaaattgctggaggaggagaaaccagactacatagcaatagctttcgataaaaaggcttctacatttaggcacaaggagtacagtgcttataaaggaacccgccagtcgatgccagaagagctgatagaacaggtggatattttaaaagatgtgataaatgcatttaacataaagaccatcgagatagagggatttgaagcagatgatatcattggtacagtatcaaaaattgcttccgaaagtgggatggatgtgcttatcgtcacaggcgacagagatgcgcttcagcttgtgtcggcaaatgtaaaagtaaaaatatgtaaaaaaggcataacgcagatggatgagtacgatgaaaaggcggtctttgaaaagtatgaagtgacgccgcttcaattcatagacttgaaagggcttatgggagacaaatcagacaacattccaggagtgcccaatataggggagaagacggccataaagcttgttaaagaatttggatcaattgaaaatttactgatgaatacagataagttaaaagggaaaataaaagaaaatgtagaaaacaatgcagaattagctgttttaagcaaacggcttgctacgattgagagaaatgttcctattgatattgatttgaatgaatacgcggttaaaaattacgatgtcaataagcttacagagctatttgaaaaattggaattttcaagcctcatctcagatttaaaagatgatagtcgtgatacaaaggatattaaagaatggcctgtaagagattttacatacgttaaaaatgttttaggaaagtttgatgttttgtcattgtatccattcatatatgatggaaagataaaagcagtatcatttgcttgcggtgacggatcgttttttgtagagattgatgattatgacaattttaaattgcttaataatgataagcttacgttgataggacacgatctgaaagattttttagtaaacatttcatactgcggtattgaacttaattgtaagattttagatacggccataatgacttatcttttaaatccgtctgagtcgaattacgacataagtcgcgtattgaaaaaatacttgaaagaggatttgcaaaacatagatgatatagtaggcaagggcaggaataaaaagagctacgatgacattgacaaaaagcttttagtcgattatatgtgttcagccgcatcaaacttatctaagttaaaagataagctcatgtcatttataaaagagatggagatggaagatcttttaaaaaatgtggaaattccgcttattgaagtgctaaaatctatggaggtgtacggctttacattagataaagatgtacttagaagtatttctaaagaaatagatgaaaagacagataagattgtaaaagatatttacgatgctgctggatacgaatttaatattaactctacaaagcagttatcagaatttttgtttgataaactgaatttgccagcaataaaaaagactaaaacagggtattcgactgacatggaagtccttgcagaacttataccgtacaatgacatagtaggagaaataatagaatatagacagcttatgaagcttaaatctacgtacatagatggcttcattcccatcatggatgaaaataatagggtccactctacgtttaaacaaacagttgctgctacagggagaattagctcaacagagcctaatctgcagaacatacctgtaagagaagaatttggcaggaggataagaaaggcatttgtatcaagttatgaagatgggcttataatatctgctgattattctcagattgagctaagggttcttgcacatctttcagaggatgaaaaacttattgagtcatttttgaacaacgaagatatacatttaaggacggcatcggaggtttttaaggtttcgaaagaagaagtgacaagtgaaatgagaaggcgggcgaaagctgtcaactttggtattgtatatggtataagcgattacggcttatctaaagacttaaagatttcgcgaaaagaagcgaaagaatacatagacaattattttgacaggtacaagggcgtcaaaaattacatcgactcaattgtcaaatttgcaaaggaaaatgggtatgttacgactatcttaaataggagaagatacataccggaaatcaattcaaaaaattttaacactagatcttttggcgagagaatggcaatgaatacacctattcaaggtagcgctgcggatataataaagatgtcgatggttaaagtatacaatgaattaaaggaaagaggattgaaatcaagacttattcttcaggtgcacgatgagcttataattgacacacatcctgatgaagttgaaatagtcaaggagcttctaaaatcaataatggaaaatatcataaagttgaaagttcctttagttgtagatatagggcaagggaaaaactggtatgatgcaaaataaaaggatcc

SEQ ID NO: 813 - DNA, 2678 bp, Artificial Sequence
  Description of Artificial Sequence: Synthetic Clostridium thermosulfurogenes DNA Polymerase Q796W
atgaaatacctgctgccgaccgctgctgctggtctgctgctcctcgctgcccagccggcgatggccatggcgaaatttttgatcatagatggtaatagcttgatgtacagggcgtattttgccctgcctgatttgatgaacagcgaaggaatgcatacaaatgccatatacggtttttcaatgatgcttcttaaattgctggaggaggagaaaccagactacatagcaatagctttcgataaaaaggcttctacatttaggcacaaggagtacagtgcttataaaggaacccgccagtcgatgccagaagagctgatagaacaggtggatattttaaaagatgtgataaatgcatttaacataaagaccatcgagatagagggatttgaagcagatgatatcattggtacagtatcaaaaattgcttccgaaagtgggatggatgtgcttatcgtcacaggcgacagagatgcgcttcagcttgtgtcggcaaatgtaaaagtaaaaatatgtaaaaaaggcataacgcagatggatgagtacgatgaaaaggcggtctttgaaaagtatgaagtgacgccgcttcaattcatagacttgaaagggcttatgggagacaaatcagacaacattccaggagtgcccaatataggggagaagacggccataaagcttgttaaagaatttggatcaattgaaaatttactgatgaatacagataagttaaaagggaaaataaaagaaaatgtagaaaacaatgcagaattagctgttttaagcaaacggcttgctacgattgagagaaatgttcctattgatattgatttgaatgaatacgcggttaaaaattacgatgtcaataagcttacagagctatttgaaaaattggaattttcaagcctcatctcagatttaaaagatgatagtcgtgatacaaaggatattaaagaatggcctgtaagagattttacatacgttaaaaatgttttaggaaagtttgatgttttgtcattgtatccattcatatatgatggaaagataaaagcagtatcatttgcttgcggtgacggatcgttttttgtagagattgatgattatgacaattttaaattgcttaataatgataagcttacgttgataggacacgatctgaaagattttttagtaaacatttcatactgcggtattgaacttaattgtaagattttagatacggccataatgacttatcttttaaatccgtctgagtcgaattacgacataagtcgcgtattgaaaaaatacttgaaagaggatttgcaaaacatagatgatatagtaggcaagggcaggaataaaaagagctacgatgacattgacaaaaagcttttagtcgattatatgtgttcagccgcatcaaacttatctaagttaaaagataagctcatgtcatttataaaagagatggagatggaagatcttttaaaaaatgtggaaattccgcttattgaagtgctaaaatctatggaggtgtacggctttacattagataaagatgtacttagaagtatttctaaagaaatagatgaaaagacagataagattgtaaaagatatttacgatgctgctggatacgaatttaatattaactctacaaagcagttatcagaatttttgtttgataaactgaatttgccagcaataaaaaagactaaaacagggtattcgactgacatggaagtccttgcagaacttataccgtacaatgacatagtaggagaaataatagaatatagacagcttatgaagcttaaatctacgtacatagatggcttcattcccatcatggatgaaaataatagggtccactctacgtttaaacaaacagttgctgctacagggagaattagctcaacagagcctaatctgcagaacatacctgtaagagaagaatttggcaggaggataagaaaggcatttgtatcaagttatgaagatgggcttataatatctgctgattattctcagattgagctaagggttcttgcacatctttcagaggatgaaaaacttattgagtcatttttgaacaacgaagatatacatttaaggacggcatcggaggtttttaaggtttcgaaagaagaagtgacaagtgaaatgagaaggcgggcgaaagctgtcaactttggtattgtatatggtataagcgattacggcttatctaaagacttaaagatttcgcgaaaagaagcgaaagaatacatagacaattattttgacaggtacaagggcgtcaaaaattacatcgactcaattgtcaaatttgcaaaggaaaatgggtatgttacgactatcttaaataggagaagatacataccggaaatcaattcaaaaaattttaactggagatcttttggcgagagaatggcaatgaatacacctattcaaggtagcgctgcggatataataaagatgtcgatggttaaagtatacaatgaattaaaggaaagaggattgaaatcaagacttattcttcaggtgcacgatgagcttataattgacacacatcctgatgaagttgaaatagtcaaggagcttctaaaatcaataatggaaaatatcataaagttgaaagttcctttagttgtagatatagggcaagggaaaaactggtatgatgcaaaataaaaggatcc

SEQ ID NO: 814 - DNA, 2678 bp, Artificial Sequence
  Description of Artificial Sequence: Synthetic Clostridium thermosulfurogenes DNA Polymerase Q796Y
atgaaatacctgctgccgaccgctgctgctggtctgctgctcctcgctgcccagccggcgatggccatggcgaaatttttgatcatagatggtaatagcttgatgtacagggcgtattttgccctgcctgatttgatgaacagcgaaggaatgcatacaaatgccatatacggtttttcaatgatgcttcttaaattgctggaggaggagaaaccagactacatagcaatagctttcgataaaaaggcttctacatttaggcacaaggagtacagtgcttataaaggaacccgccagtcgatgccagaagagctgatagaacaggtggatattttaaaagatgtgataaatgcatttaacataaagaccatcgagatagagggatttgaagcagatgatatcattggtacagtatcaaaaattgcttccgaaagtgggatggatgtgcttatcgtcacaggcgacagagatgcgcttcagcttgtgtcggcaaatgtaaaagtaaaaatatgtaaaaaaggcataacgcagatggatgagtacgatgaaaaggcggtctttgaaaagtatgaagtgacgccgcttcaattcatagacttgaaagggcttatgggagacaaatcagacaacattccaggagtgcccaatataggggagaagacggccataaagcttgttaaagaatttggatcaattgaaaatttactgatgaatacagataagttaaaagggaaaataaaagaaaatgtagaaaacaatgcagaattagctgttttaagcaaacggcttgctacgattgagagaaatgttcctattgatattgatttgaatgaatacgcggttaaaaattacgatgtcaataagcttacagagctatttgaaaaattggaattttcaagcctcatctcagatttaaaagatgatagtcgtgatacaaaggatattaaagaatggcctgtaagagattttacatacgttaaaaatgttttaggaaagtttgatgttttgtcattgtatccattcatatatgatggaaagataaaagcagtatcatttgcttgcggtgacggatcgttttttgtagagattgatgattatgacaattttaaattgcttaataatgataagcttacgttgataggacacgatctgaaagattttttagtaaacatttcatactgcggtattgaacttaattgtaagattttagatacggccataatgacttatcttttaaatccgtctgagtcgaattacgacataagtcgcgtattgaaaaaatacttgaaagaggatttgcaaaacatagatgatatagtaggcaagggcaggaataaaaagagctacgatgacattgacaaaaagcttttagtcgattatatgtgttcagccgcatcaaacttatctaagttaaaagataagctcatgtcatttataaaagagatggagatggaagatcttttaaaaaatgtggaaattccgcttattgaagtgctaaaatctatggaggtgtacggctttacattagataaagatgtacttagaagtatttctaaagaaatagatgaaaagacagataagattgtaaaagatatttacgatgctgctggatacgaatttaatattaactctacaaagcagttatcagaatttttgtttgataaactgaatttgccagcaataaaaaagactaaaacagggtattcgactgacatggaagtccttgcagaacttataccgtacaatgacatagtaggagaaataatagaatatagacagcttatgaagcttaaatctacgtacatagatggcttcattcccatcatggatgaaaataatagggtccactctacgtttaaacaaacagttgctgctacagggagaattagctcaacagagcctaatctgcagaacatacctgtaagagaagaatttggcaggaggataagaaaggcatttgtatcaagttatgaagatgggcttataatatctgctgattattctcagattgagctaagggttcttgcacatctttcagaggatgaaaaacttattgagtcatttttgaacaacgaagatatacatttaaggacggcatcggaggtttttaaggtttcgaaagaagaagtgacaagtgaaatgagaaggcgggcgaaagctgtcaactttggtattgtatatggtataagcgattacggcttatctaaagacttaaagatttcgcgaaaagaagcgaaagaatacatagacaattattttgacaggtacaagggcgtcaaaaattacatcgactcaattgtcaaatttgcaaaggaaaatgggtatgttacgactatcttaaataggagaagatacataccggaaatcaattcaaaaaattttaactatagatcttttggcgagagaatggcaatgaatacacctattcaaggtagcgctgcggatataataaagatgtcgatggttaaagtatacaatgaattaaaggaaagaggattgaaatcaagacttattcttcaggtgcacgatgagcttataattgacacacatcctgatgaagttgaaatagtcaaggagcttctaaaatcaataatggaaaatatcataaagttgaaagttcctttagttgtagatatagggcaagggaaaaactggtatgatgcaaaataaaaggatcc

SEQ ID NO: 815 - DNA, 2678 bp, Artificial Sequence
  Description of Artificial Sequence: Synthetic Clostridium thermosulfurogenes DNA Polymerase Q796V
atgaaatacctgctgccgaccgctgctgctggtctgctgctcctcgctgcccagccggcgatggccatggcgaaatttttgatcatagatggtaatagcttgatgtacagggcgtattttgccctgcctgatttgatgaacagcgaaggaatgcatacaaatgccatatacggtttttcaatgatgcttcttaaattgctggaggaggagaaaccagactacatagcaatagctttcgataaaaaggcttctacatttaggcacaaggagtacagtgcttataaaggaacccgccagtcgatgccagaagagctgatagaacaggtggatattttaaaagatgtgataaatgcatttaacataaagaccatcgagatagagggatttgaagcagatgatatcattggtacagtatcaaaaattgcttccgaaagtgggatggatgtgcttatcgtcacaggcgacagagatgcgcttcagcttgtgtcggcaaatgtaaaagtaaaaatatgtaaaaaaggcataacgcagatggatgagtacgatgaaaaggcggtctttgaaaagtatgaagtgacgccgcttcaattcatagacttgaaagggcttatgggagacaaatcagacaacattccaggagtgcccaatataggggagaagacggccataaagcttgttaaagaatttggatcaattgaaaatttactgatgaatacagataagttaaaagggaaaataaaagaaaatgtagaaaacaatgcagaattagctgttttaagcaaacggcttgctacgattgagagaaatgttcctattgatattgatttgaatgaatacgcggttaaaaattacgatgtcaataagcttacagagctatttgaaaaattggaattttcaagcctcatctcagatttaaaagatgatagtcgtgatacaaaggatattaaagaatggcctgtaagagattttacatacgttaaaaatgttttaggaaagtttgatgttttgtcattgtatccattcatatatgatggaaagataaaagcagtatcatttgcttgcggtgacggatcgttttttgtagagattgatgattatgacaattttaaattgcttaataatgataagcttacgttgataggacacgatctgaaagattttttagtaaacatttcatactgcggtattgaacttaattgtaagattttagatacggccataatgacttatcttttaaatccgtctgagtcgaattacgacataagtcgcgtattgaaaaaatacttgaaagaggatttgcaaaacatagatgatatagtaggcaagggcaggaataaaaagagctacgatgacattgacaaaaagcttttagtcgattatatgtgttcagccgcatcaaacttatctaagttaaaagataagctcatgtcatttataaaagagatggagatggaagatcttttaaaaaatgtggaaattccgcttattgaagtgctaaaatctatggaggtgtacggctttacattagataaagatgtacttagaagtatttctaaagaaatagatgaaaagacagataagattgtaaaagatatttacgatgctgctggatacgaatttaatattaactctacaaagcagttatcagaatttttgtttgataaactgaatttgccagcaataaaaaagactaaaacagggtattcgactgacatggaagtccttgcagaacttataccgtacaatgacatagtaggagaaataatagaatatagacagcttatgaagcttaaatctacgtacatagatggcttcattcccatcatggatgaaaataatagggtccactctacgtttaaacaaacagttgctgctacagggagaattagctcaacagagcctaatctgcagaacatacctgtaagagaagaatttggcaggaggataagaaaggcatttgtatcaagttatgaagatgggcttataatatctgctgattattctcagattgagctaagggttcttgcacatctttcagaggatgaaaaacttattgagtcatttttgaacaacgaagatatacatttaaggacggcatcggaggtttttaaggtttcgaaagaagaagtgacaagtgaaatgagaaggcgggcgaaagctgtcaactttggtattgtatatggtataagcgattacggcttatctaaagacttaaagatttcgcgaaaagaagcgaaagaatacatagacaattattttgacaggtacaagggcgtcaaaaattacatcgactcaattgtcaaatttgcaaaggaaaatgggtatgttacgactatcttaaataggagaagatacataccggaaatcaattcaaaaaattttaacgttagatcttttggcgagagaatggcaatgaatacacctattcaaggtagcgctgcggatataataaagatgtcgatggttaaagtatacaatgaattaaaggaaagaggattgaaatcaagacttattcttcaggtgcacgatgagcttataattgacacacatcctgatgaagttgaaatagtcaaggagcttctaaaatcaataatggaaaatatcataaagttgaaagttcctttagttgtagatatagggcaagggaaaaactggtatgatgcaaaataaaaggatcc

SEQ ID NO: 816 - DNA, 2678 bp, Artificial Sequence
  Description of Artificial Sequence: Synthetic Clostridium thermosulfurogenes DNA Polymerase R797A
atgaaatacctgctgccgaccgctgctgctggtctgctgctcctcgctgcccagccggcgatggccatggcgaaatttttgatcatagatggtaatagcttgatgtacagggcgtattttgccctgcctgatttgatgaacagcgaaggaatgcatacaaatgccatatacggtttttcaatgatgcttcttaaattgctggaggaggagaaaccagactacatagcaatagctttcgataaaaaggcttctacatttaggcacaaggagtacagtgcttataaaggaacccgccagtcgatgccagaagagctgatagaacaggtggatattttaaaagatgtgataaatgcatttaacataaagaccatcgagatagagggatttgaagcagatgatatcattggtacagtatcaaaaattgcttccgaaagtgggatggatgtgcttatcgtcacaggcgacagagatgcgcttcagcttgtgtcggcaaatgtaaaagtaaaaatatgtaaaaaaggcataacgcagatggatgagtacgatgaaaaggcggtctttgaaaagtatgaagtgacgccgcttcaattcatagacttgaaagggcttatgggagacaaatcagacaacattccaggagtgcccaatataggggagaagacggccataaagcttgttaaagaatttggatcaattgaaaatttactgatgaatacagataagttaaaagggaaaataaaagaaaatgtagaaaacaatgcagaattagctgttttaagcaaacggcttgctacgattgagagaaatgttcctattgatattgatttgaatgaatacgcggttaaaaattacgatgtcaataagcttacagagctatttgaaaaattggaattttcaagcctcatctcagatttaaaagatgatagtcgtgatacaaaggatattaaagaatggcctgtaagagattttacatacgttaaaaatgttttaggaaagtttgatgttttgtcattgtatccattcatatatgatggaaagataaaagcagtatcatttgcttgcggtgacggatcgttttttgtagagattgatgattatgacaattttaaattgcttaataatgataagcttacgttgataggacacgatctgaaagattttttagtaaacatttcatactgcggtattgaacttaattgtaagattttagatacggccataatgacttatcttttaaatccgtctgagtcgaattacgacataagtcgcgtattgaaaaaatacttgaaagaggatttgcaaaacatagatgatatagtaggcaagggcaggaataaaaagagctacgatgacattgacaaaaagcttttagtcgattatatgtgttcagccgcatcaaacttatctaagttaaaagataagctcatgtcatttataaaagagatggagatggaagatcttttaaaaaatgtggaaattccgcttattgaagtgctaaaatctatggaggtgtacggctttacattagataaagatgtacttagaagtatttctaaagaaatagatgaaaagacagataagattgtaaaagatatttacgatgctgctggatacgaatttaatattaactctacaaagcagttatcagaatttttgtttgataaactgaatttgccagcaataaaaaagactaaaacagggtattcgactgacatggaagtccttgcagaacttataccgtacaatgacatagtaggagaaataatagaatatagacagcttatgaagcttaaatctacgtacatagatggcttcattcccatcatggatgaaaataatagggtccactctacgtttaaacaaacagttgctgctacagggagaattagctcaacagagcctaatctgcagaacatacctgtaagagaagaatttggcaggaggataagaaaggcatttgtatcaagttatgaagatgggcttataatatctgctgattattctcagattgagctaagggttcttgcacatctttcagaggatgaaaaacttattgagtcatttttgaacaacgaagatatacatttaaggacggcatcggaggtttttaaggtttcgaaagaagaagtgacaagtgaaatgagaaggcgggcgaaagctgtcaactttggtattgtatatggtataagcgattacggcttatctaaagacttaaagatttcgcgaaaagaagcgaaagaatacatagacaattattttgacaggtacaagggcgtcaaaaattacatcgactcaattgtcaaatttgcaaaggaaaatgggtatgttacgactatcttaaataggagaagatacataccggaaatcaattcaaaaaattttaaccaagcttcttttggcgagagaatggcaatgaatacacctattcaaggtagcgctgcggatataataaagatgtcgatggttaaagtatacaatgaattaaaggaaagaggattgaaatcaagacttattcttcaggtgcacgatgagcttataattgacacacatcctgatgaagttgaaatagtcaaggagcttctaaaatcaataatggaaaatatcataaagttgaaagttcctttagttgtagatatagggcaagggaaaaactggtatgatgcaaaataaaaggatcc

SEQ ID NO: 817 - DNA, 2678 bp, Artificial Sequence
  Description of Artificial Sequence: Synthetic Clostridium thermosulfurogenes DNA Polymerase R797N
atgaaatacctgctgccgaccgctgctgctggtctgctgctcctcgctgcccagccggcgatggccatggcgaaatttttgatcatagatggtaatagcttgatgtacagggcgtattttgccctgcctgatttgatgaacagcgaaggaatgcatacaaatgccatatacggtttttcaatgatgcttcttaaattgctggaggaggagaaaccagactacatagcaatagctttcgataaaaaggcttctacatttaggcacaaggagtacagtgcttataaaggaacccgccagtcgatgccagaagagctgatagaacaggtggatattttaaaagatgtgataaatgcatttaacataaagaccatcgagatagagggatttgaagcagatgatatcattggtacagtatcaaaaattgcttccgaaagtgggatggatgtgcttatcgtcacaggcgacagagatgcgcttcagcttgtgtcggcaaatgtaaaagtaaaaatatgtaaaaaaggcataacgcagatggatgagtacgatgaaaaggcggtctttgaaaagtatgaagtgacgccgcttcaattcatagacttgaaagggcttatgggagacaaatcagacaacattccaggagtgcccaatataggggagaagacggccataaagcttgttaaagaatttggatcaattgaaaatttactgatgaatacagataagttaaaagggaaaataaaagaaaatgtagaaaacaatgcagaattagctgttttaagcaaacggcttgctacgattgagagaaatgttcctattgatattgatttgaatgaatacgcggttaaaaattacgatgtcaataagcttacagagctatttgaaaaattggaattttcaagcctcatctcagatttaaaagatgatagtcgtgatacaaaggatattaaagaatggcctgtaagagattttacatacgttaaaaatgttttaggaaagtttgatgttttgtcattgtatccattcatatatgatggaaagataaaagcagtatcatttgcttgcggtgacggatcgttttttgtagagattgatgattatgacaattttaaattgcttaataatgataagcttacgttgataggacacgatctgaaagattttttagtaaacatttcatactgcggtattgaacttaattgtaagattttagatacggccataatgacttatcttttaaatccgtctgagtcgaattacgacataagtcgcgtattgaaaaaatacttgaaagaggatttgcaaaacatagatgatatagtaggcaagggcaggaataaaaagagctacgatgacattgacaaaaagcttttagtcgattatatgtgttcagccgcatcaaacttatctaagttaaaagataagctcatgtcatttataaaagagatggagatggaagatcttttaaaaaatgtggaaattccgcttattgaagtgctaaaatctatggaggtgtacggctttacattagataaagatgtacttagaagtatttctaaagaaatagatgaaaagacagataagattgtaaaagatatttacgatgctgctggatacgaatttaatattaactctacaaagcagttatcagaatttttgtttgataaactgaatttgccagcaataaaaaagactaaaacagggtattcgactgacatggaagtccttgcagaacttataccgtacaatgacatagtaggagaaataatagaatatagacagcttatgaagcttaaatctacgtacatagatggcttcattcccatcatggatgaaaataatagggtccactctacgtttaaacaaacagttgctgctacagggagaattagctcaacagagcctaatctgcagaacatacctgtaagagaagaatttggcaggaggataagaaaggcatttgtatcaagttatgaagatgggcttataatatctgctgattattctcagattgagctaagggttcttgcacatctttcagaggatgaaaaacttattgagtcatttttgaacaacgaagatatacatttaaggacggcatcggaggtttttaaggtttcgaaagaagaagtgacaagtgaaatgagaaggcgggcgaaagctgtcaactttggtattgtatatggtataagcgattacggcttatctaaagacttaaagatttcgcgaaaagaagcgaaagaatacatagacaattattttgacaggtacaagggcgtcaaaaattacatcgactcaattgtcaaatttgcaaaggaaaatgggtatgttacgactatcttaaataggagaagatacataccggaaatcaattcaaaaaattttaaccaaaattcttttggcgagagaatggcaatgaatacacctattcaaggtagcgctgcggatataataaagatgtcgatggttaaagtatacaatgaattaaaggaaagaggattgaaatcaagacttattcttcaggtgcacgatgagcttataattgacacacatcctgatgaagttgaaatagtcaaggagcttctaaaatcaataatggaaaatatcataaagttgaaagttcctttagttgtagatatagggcaagggaaaaactggtatgatgcaaaataaaaggatcc

SEQ ID NO: 818 - DNA, 2678 bp, Artificial Sequence
  Description of Artificial Sequence: Synthetic Clostridium thermosulfurogenes DNA Polymerase R797D
atgaaatacctgctgccgaccgctgctgctggtctgctgctcctcgctgcccagccggcgatggccatggcgaaatttttgatcatagatggtaatagcttgatgtacagggcgtattttgccctgcctgatttgatgaacagcgaaggaatgcatacaaatgccatatacggtttttcaatgatgcttcttaaattgctggaggaggagaaaccagactacatagcaatagctttcgataaaaaggcttctacatttaggcacaaggagtacagtgcttataaaggaacccgccagtcgatgccagaagagctgatagaacaggtggatattttaaaagatgtgataaatgcatttaacataaagaccatcgagatagagggatttgaagcagatgatatcattggtacagtatcaaaaattgcttccgaaagtgggatggatgtgcttatcgtcacaggcgacagagatgcgcttcagcttgtgtcggcaaatgtaaaagtaaaaatatgtaaaaaaggcataacgcagatggatgagtacgatgaaaaggcggtctttgaaaagtatgaagtgacgccgcttcaattcatagacttgaaagggcttatgggagacaaatcagacaacattccaggagtgcccaatataggggagaagacggccataaagcttgttaaagaatttggatcaattgaaaatttactgatgaatacagataagttaaaagggaaaataaaagaaaatgtagaaaacaatgcagaattagctgttttaagcaaacggcttgctacgattgagagaaatgttcctattgatattgatttgaatgaatacgcggttaaaaattacgatgtcaataagcttacagagctatttgaaaaattggaattttcaagcctcatctcagatttaaaagatgatagtcgtgatacaaaggatattaaagaatggcctgtaagagattttacatacgttaaaaatgttttaggaaagtttgatgttttgtcattgtatccattcatatatgatggaaagataaaagcagtatcatttgcttgcggtgacggatcgttttttgtagagattgatgattatgacaattttaaattgcttaataatgataagcttacgttgataggacacgatctgaaagattttttagtaaacatttcatactgcggtattgaacttaattgtaagattttagatacggccataatgacttatcttttaaatccgtctgagtcgaattacgacataagtcgcgtattgaaaaaatacttgaaagaggatttgcaaaacatagatgatatagtaggcaagggcaggaataaaaagagctacgatgacattgacaaaaagcttttagtcgattatatgtgttcagccgcatcaaacttatctaagttaaaagataagctcatgtcatttataaaagagatggagatggaagatcttttaaaaaatgtggaaattccgcttattgaagtgctaaaatctatggaggtgtacggctttacattagataaagatgtacttagaagtatttctaaagaaatagatgaaaagacagataagattgtaaaagatatttacgatgctgctggatacgaatttaatattaactctacaaagcagttatcagaatttttgtttgataaactgaatttgccagcaataaaaaagactaaaacagggtattcgactgacatggaagtccttgcagaacttataccgtacaatgacatagtaggagaaataatagaatatagacagcttatgaagcttaaatctacgtacatagatggcttcattcccatcatggatgaaaataatagggtccactctacgtttaaacaaacagttgctgctacagggagaattagctcaacagagcctaatctgcagaacatacctgtaagagaagaatttggcaggaggataagaaaggcatttgtatcaagttatgaagatgggcttataatatctgctgattattctcagattgagctaagggttcttgcacatctttcagaggatgaaaaacttattgagtcatttttgaacaacgaagatatacatttaaggacggcatcggaggtttttaaggtttcgaaagaagaagtgacaagtgaaatgagaaggcgggcgaaagctgtcaactttggtattgtatatggtataagcgattacggcttatctaaagacttaaagatttcgcgaaaagaagcgaaagaatacatagacaattattttgacaggtacaagggcgtcaaaaattacatcgactcaattgtcaaatttgcaaaggaaaatgggtatgttacgactatcttaaataggagaagatacataccggaaatcaattcaaaaaattttaaccaagattcttttggcgagagaatggcaatgaatacacctattcaaggtagcgctgcggatataataaagatgtcgatggttaaagtatacaatgaattaaaggaaagaggattgaaatcaagacttattcttcaggtgcacgatgagcttataattgacacacatcctgatgaagttgaaatagtcaaggagcttctaaaatcaataatggaaaatatcataaagttgaaagttcctttagttgtagatatagggcaagggaaaaactggtatgatgcaaaataaaaggatcc

SEQ ID NO: 819 - DNA, 2678 bp, Artificial Sequence
  Description of Artificial Sequence: Synthetic Clostridium thermosulfurogenes DNA Polymerase R797C
atgaaatacctgctgccgaccgctgctgctggtctgctgctcctcgctgcccagccggcgatggccatggcgaaatttttgatcatagatggtaatagcttgatgtacagggcgtattttgccctgcctgatttgatgaacagcgaaggaatgcatacaaatgccatatacggtttttcaatgatgcttcttaaattgctggaggaggagaaaccagactacatagcaatagctttcgataaaaaggcttctacatttaggcacaaggagtacagtgcttataaaggaacccgccagtcgatgccagaagagctgatagaacaggtggatattttaaaagatgtgataaatgcatttaacataaagaccatcgagatagagggatttgaagcagatgatatcattggtacagtatcaaaaattgcttccgaaagtgggatggatgtgcttatcgtcacaggcgacagagatgcgcttcagcttgtgtcggcaaatgtaaaagtaaaaatatgtaaaaaaggcataacgcagatggatgagtacgatgaaaaggcggtctttgaaaagtatgaagtgacgccgcttcaattcatagacttgaaagggcttatgggagacaaatcagacaacattccaggagtgcccaatataggggagaagacggccataaagcttgttaaagaatttggatcaattgaaaatttactgatgaatacagataagttaaaagggaaaataaaagaaaatgtagaaaacaatgcagaattagctgttttaagcaaacggcttgctacgattgagagaaatgttcctattgatattgatttgaatgaatacgcggttaaaaattacgatgtcaataagcttacagagctatttgaaaaattggaattttcaagcctcatctcagatttaaaagatgatagtcgtgatacaaaggatattaaagaatggcctgtaagagattttacatacgttaaaaatgttttaggaaagtttgatgttttgtcattgtatccattcatatatgatggaaagataaaagcagtatcatttgcttgcggtgacggatcgttttttgtagagattgatgattatgacaattttaaattgcttaataatgataagcttacgttgataggacacgatctgaaagattttttagtaaacatttcatactgcggtattgaacttaattgtaagattttagatacggccataatgacttatcttttaaatccgtctgagtcgaattacgacataagtcgcgtattgaaaaaatacttgaaagaggatttgcaaaacatagatgatatagtaggcaagggcaggaataaaaagagctacgatgacattgacaaaaagcttttagtcgattatatgtgttcagccgcatcaaacttatctaagttaaaagataagctcatgtcatttataaaagagatggagatggaagatcttttaaaaaatgtggaaattccgcttattgaagtgctaaaatctatggaggtgtacggctttacattagataaagatgtacttagaagtatttctaaagaaatagatgaaaagacagataagattgtaaaagatatttacgatgctgctggatacgaatttaatattaactctacaaagcagttatcagaatttttgtttgataaactgaatttgccagcaataaaaaagactaaaacagggtattcgactgacatggaagtccttgcagaacttataccgtacaatgacatagtaggagaaataatagaatatagacagcttatgaagcttaaatctacgtacatagatggcttcattcccatcatggatgaaaataatagggtccactctacgtttaaacaaacagttgctgctacagggagaattagctcaacagagcctaatctgcagaacatacctgtaagagaagaatttggcaggaggataagaaaggcatttgtatcaagttatgaagatgggcttataatatctgctgattattctcagattgagctaagggttcttgcacatctttcagaggatgaaaaacttattgagtcatttttgaacaacgaagatatacatttaaggacggcatcggaggtttttaaggtttcgaaagaagaagtgacaagtgaaatgagaaggcgggcgaaagctgtcaactttggtattgtatatggtataagcgattacggcttatctaaagacttaaagatttcgcgaaaagaagcgaaagaatacatagacaattattttgacaggtacaagggcgtcaaaaattacatcgactcaattgtcaaatttgcaaaggaaaatgggtatgttacgactatcttaaataggagaagatacataccggaaatcaattcaaaaaattttaaccaatgttcttttggcgagagaatggcaatgaatacacctattcaaggtagcgctgcggatataataaagatgtcgatggttaaagtatacaatgaattaaaggaaagaggattgaaatcaagacttattcttcaggtgcacgatgagcttataattgacacacatcctgatgaagttgaaatagtcaaggagcttctaaaatcaataatggaaaatatcataaagttgaaagttcctttagttgtagatatagggcaagggaaaaactggtatgatgcaaaataaaaggatcc

SEQ ID NO: 820 - DNA, 2678 bp, Artificial Sequence
  Description of Artificial Sequence: Synthetic Clostridium thermosulfurogenes DNA Polymerase R797E
atgaaatacctgctgccgaccgctgctgctggtctgctgctcctcgctgcccagccggcgatggccatggcgaaatttttgatcatagatggtaatagcttgatgtacagggcgtattttgccctgcctgatttgatgaacagcgaaggaatgcatacaaatgccatatacggtttttcaatgatgcttcttaaattgctggaggaggagaaaccagactacatagcaatagctttcgataaaaaggcttctacatttaggcacaaggagtacagtgcttataaaggaacccgccagtcgatgccagaagagctgatagaacaggtggatattttaaaagatgtgataaatgcatttaacataaagaccatcgagatagagggatttgaagcagatgatatcattggtacagtatcaaaaattgcttccgaaagtgggatggatgtgcttatcgtcacaggcgacagagatgcgcttcagcttgtgtcggcaaatgtaaaagtaaaaatatgtaaaaaaggcataacgcagatggatgagtacgatgaaaaggcggtctttgaaaagtatgaagtgacgccgcttcaattcatagacttgaaagggcttatgggagacaaatcagacaacattccaggagtgcccaatataggggagaagacggccataaagcttgttaaagaatttggatcaattgaaaatttactgatgaatacagataagttaaaagggaaaataaaagaaaatgtagaaaacaatgcagaattagctgttttaagcaaacggcttgctacgattgagagaaatgttcctattgatattgatttgaatgaatacgcggttaaaaattacgatgtcaataagcttacagagctatttgaaaaattggaattttcaagcctcatctcagatttaaaagatgatagtcgtgatacaaaggatattaaagaatggcctgtaagagattttacatacgttaaaaatgttttaggaaagtttgatgttttgtcattgtatccattcatatatgatggaaagataaaagcagtatcatttgcttgcggtgacggatcgttttttgtagagattgatgattatgacaattttaaattgcttaataatgataagcttacgttgataggacacgatctgaaagattttttagtaaacatttcatactgcggtattgaacttaattgtaagattttagatacggccataatgacttatcttttaaatccgtctgagtcgaattacgacataagtcgcgtattgaaaaaatacttgaaagaggatttgcaaaacatagatgatatagtaggcaagggcaggaataaaaagagctacgatgacattgacaaaaagcttttagtcgattatatgtgttcagccgcatcaaacttatctaagttaaaagataagctcatgtcatttataaaagagatggagatggaagatcttttaaaaaatgtggaaattccgcttattgaagtgctaaaatctatggaggtgtacggctttacattagataaagatgtacttagaagtatttctaaagaaatagatgaaaagacagataagattgtaaaagatatttacgatgctgctggatacgaatttaatattaactctacaaagcagttatcagaatttttgtttgataaactgaatttgccagcaataaaaaagactaaaacagggtattcgactgacatggaagtccttgcagaacttataccgtacaatgacatagtaggagaaataatagaatatagacagcttatgaagcttaaatctacgtacatagatggcttcattcccatcatggatgaaaataatagggtccactctacgtttaaacaaacagttgctgctacagggagaattagctcaacagagcctaatctgcagaacatacctgtaagagaagaatttggcaggaggataagaaaggcatttgtatcaagttatgaagatgggcttataatatctgctgattattctcagattgagctaagggttcttgcacatctttcagaggatgaaaaacttattgagtcatttttgaacaacgaagatatacatttaaggacggcatcggaggtttttaaggtttcgaaagaagaagtgacaagtgaaatgagaaggcgggcgaaagctgtcaactttggtattgtatatggtataagcgattacggcttatctaaagacttaaagatttcgcgaaaagaagcgaaagaatacatagacaattattttgacaggtacaagggcgtcaaaaattacatcgactcaattgtcaaatttgcaaaggaaaatgggtatgttacgactatcttaaataggagaagatacataccggaaatcaattcaaaaaattttaaccaagaatcttttggcgagagaatggcaatgaatacacctattcaaggtagcgctgcggatataataaagatgtcgatggttaaagtatacaatgaattaaaggaaagaggattgaaatcaagacttattcttcaggtgcacgatgagcttataattgacacacatcctgatgaagttgaaatagtcaaggagcttctaaaatcaataatggaaaatatcataaagttgaaagttcctttagttgtagatatagggcaagggaaaaactggtatgatgcaaaataaaaggatcc

SEQ ID NO: 821 - DNA, 2678 bp, Artificial Sequence
  Description of Artificial Sequence: Synthetic Clostridium thermosulfurogenes DNA Polymerase R797Q
atgaaatacctgctgccgaccgctgctgctggtctgctgctcctcgctgcccagccggcgatggccatggcgaaatttttgatcatagatggtaatagcttgatgtacagggcgtattttgccctgcctgatttgatgaacagcgaaggaatgcatacaaatgccatatacggtttttcaatgatgcttcttaaattgctggaggaggagaaaccagactacatagcaatagctttcgataaaaaggcttctacatttaggcacaaggagtacagtgcttataaaggaacccgccagtcgatgccagaagagctgatagaacaggtggatattttaaaagatgtgataaatgcatttaacataaagaccatcgagatagagggatttgaagcagatgatatcattggtacagtatcaaaaattgcttccgaaagtgggatggatgtgcttatcgtcacaggcgacagagatgcgcttcagcttgtgtcggcaaatgtaaaagtaaaaatatgtaaaaaaggcataacgcagatggatgagtacgatgaaaaggcggtctttgaaaagtatgaagtgacgccgcttcaattcatagacttgaaagggcttatgggagacaaatcagacaacattccaggagtgcccaatataggggagaagacggccataaagcttgttaaagaatttggatcaattgaaaatttactgatgaatacagataagttaaaagggaaaataaaagaaaatgtagaaaacaatgcagaattagctgttttaagcaaacggcttgctacgattgagagaaatgttcctattgatattgatttgaatgaatacgcggttaaaaattacgatgtcaataagcttacagagctatttgaaaaattggaattttcaagcctcatctcagatttaaaagatgatagtcgtgatacaaaggatattaaagaatggcctgtaagagattttacatacgttaaaaatgttttaggaaagtttgatgttttgtcattgtatccattcatatatgatggaaagataaaagcagtatcatttgcttgcggtgacggatcgttttttgtagagattgatgattatgacaattttaaattgcttaataatgataagcttacgttgataggacacgatctgaaagattttttagtaaacatttcatactgcggtattgaacttaattgtaagattttagatacggccataatgacttatcttttaaatccgtctgagtcgaattacgacataagtcgcgtattgaaaaaatacttgaaagaggatttgcaaaacatagatgatatagtaggcaagggcaggaataaaaagagctacgatgacattgacaaaaagcttttagtcgattatatgtgttcagccgcatcaaacttatctaagttaaaagataagctcatgtcatttataaaagagatggagatggaagatcttttaaaaaatgtggaaattccgcttattgaagtgctaaaatctatggaggtgtacggctttacattagataaagatgtacttagaagtatttctaaagaaatagatgaaaagacagataagattgtaaaagatatttacgatgctgctggatacgaatttaatattaactctacaaagcagttatcagaatttttgtttgataaactgaatttgccagcaataaaaaagactaaaacagggtattcgactgacatggaagtccttgcagaacttataccgtacaatgacatagtaggagaaataatagaatatagacagcttatgaagcttaaatctacgtacatagatggcttcattcccatcatggatgaaaataatagggtccactctacgtttaaacaaacagttgctgctacagggagaattagctcaacagagcctaatctgcagaacatacctgtaagagaagaatttggcaggaggataagaaaggcatttgtatcaagttatgaagatgggcttataatatctgctgattattctcagattgagctaagggttcttgcacatctttcagaggatgaaaaacttattgagtcatttttgaacaacgaagatatacatttaaggacggcatcggaggtttttaaggtttcgaaagaagaagtgacaagtgaaatgagaaggcgggcgaaagctgtcaactttggtattgtatatggtataagcgattacggcttatctaaagacttaaagatttcgcgaaaagaagcgaaagaatacatagacaattattttgacaggtacaagggcgtcaaaaattacatcgactcaattgtcaaatttgcaaaggaaaatgggtatgttacgactatcttaaataggagaagatacataccggaaatcaattcaaaaaattttaaccaacaatcttttggcgagagaatggcaatgaatacacctattcaaggtagcgctgcggatataataaagatgtcgatggttaaagtatacaatgaattaaaggaaagaggattgaaatcaagacttattcttcaggtgcacgatgagcttataattgacacacatcctgatgaagttgaaatagtcaaggagcttctaaaatcaataatggaaaatatcataaagttgaaagttcctttagttgtagatatagggcaagggaaaaactggtatgatgcaaaataaaaggatcc

SEQ ID NO: 822 - DNA, 2678 bp, Artificial Sequence
  Description of Artificial Sequence: Synthetic Clostridium thermosulfurogenes DNA Polymerase R797G
atgaaatacctgctgccgaccgctgctgctggtctgctgctcctcgctgcccagccggcgatggccatggcgaaatttttgatcatagatggtaatagcttgatgtacagggcgtattttgccctgcctgatttgatgaacagcgaaggaatgcatacaaatgccatatacggtttttcaatgatgcttcttaaattgctggaggaggagaaaccagactacatagcaatagctttcgataaaaaggcttctacatttaggcacaaggagtacagtgcttataaaggaacccgccagtcgatgccagaagagctgatagaacaggtggatattttaaaagatgtgataaatgcatttaacataaagaccatcgagatagagggatttgaagcagatgatatcattggtacagtatcaaaaattgcttccgaaagtgggatggatgtgcttatcgtcacaggcgacagagatgcgcttcagcttgtgtcggcaaatgtaaaagtaaaaatatgtaaaaaaggcataacgcagatggatgagtacgatgaaaaggcggtctttgaaaagtatgaagtgacgccgcttcaattcatagacttgaaagggcttatgggagacaaatcagacaacattccaggagtgcccaatataggggagaagacggccataaagcttgttaaagaatttggatcaattgaaaatttactgatgaatacagataagttaaaagggaaaataaaagaaaatgtagaaaacaatgcagaattagctgttttaagcaaacggcttgctacgattgagagaaatgttcctattgatattgatttgaatgaatacgcggttaaaaattacgatgtcaataagcttacagagctatttgaaaaattggaattttcaagcctcatctcagatttaaaagatgatagtcgtgatacaaaggatattaaagaatggcctgtaagagattttacatacgttaaaaatgttttaggaaagtttgatgttttgtcattgtatccattcatatatgatggaaagataaaagcagtatcatttgcttgcggtgacggatcgttttttgtagagattgatgattatgacaattttaaattgcttaataatgataagcttacgttgataggacacgatctgaaagattttttagtaaacatttcatactgcggtattgaacttaattgtaagattttagatacggccataatgacttatcttttaaatccgtctgagtcgaattacgacataagtcgcgtattgaaaaaatacttgaaagaggatttgcaaaacatagatgatatagtaggcaagggcaggaataaaaagagctacgatgacattgacaaaaagcttttagtcgattatatgtgttcagccgcatcaaacttatctaagttaaaagataagctcatgtcatttataaaagagatggagatggaagatcttttaaaaaatgtggaaattccgcttattgaagtgctaaaatctatggaggtgtacggctttacattagataaagatgtacttagaagtatttctaaagaaatagatgaaaagacagataagattgtaaaagatatttacgatgctgctggatacgaatttaatattaactctacaaagcagttatcagaatttttgtttgataaactgaatttgccagcaataaaaaagactaaaacagggtattcgactgacatggaagtccttgcagaacttataccgtacaatgacatagtaggagaaataatagaatatagacagcttatgaagcttaaatctacgtacatagatggcttcattcccatcatggatgaaaataatagggtccactctacgtttaaacaaacagttgctgctacagggagaattagctcaacagagcctaatctgcagaacatacctgtaagagaagaatttggcaggaggataagaaaggcatttgtatcaagttatgaagatgggcttataatatctgctgattattctcagattgagctaagggttcttgcacatctttcagaggatgaaaaacttattgagtcatttttgaacaacgaagatatacatttaaggacggcatcggaggtttttaaggtttcgaaagaagaagtgacaagtgaaatgagaaggcgggcgaaagctgtcaactttggtattgtatatggtataagcgattacggcttatctaaagacttaaagatttcgcgaaaagaagcgaaagaatacatagacaattattttgacaggtacaagggcgtcaaaaattacatcgactcaattgtcaaatttgcaaaggaaaatgggtatgttacgactatcttaaataggagaagatacataccggaaatcaattcaaaaaattttaaccaaggttcttttggcgagagaatggcaatgaatacacctattcaaggtagcgctgcggatataataaagatgtcgatggttaaagtatacaatgaattaaaggaaagaggattgaaatcaagacttattcttcaggtgcacgatgagcttataattgacacacatcctgatgaagttgaaatagtcaaggagcttctaaaatcaataatggaaaatatcataaagttgaaagttcctttagttgtagatatagggcaagggaaaaactggtatgatgcaaaataaaaggatcc

SEQ ID NO: 823 - DNA, 2678 bp, Artificial Sequence
  Description of Artificial Sequence: Synthetic Clostridium thermosulfurogenes DNA Polymerase R797H
atgaaatacctgctgccgaccgctgctgctggtctgctgctcctcgctgcccagccggcgatggccatggcgaaatttttgatcatagatggtaatagcttgatgtacagggcgtattttgccctgcctgatttgatgaacagcgaaggaatgcatacaaatgccatatacggtttttcaatgatgcttcttaaattgctggaggaggagaaaccagactacatagcaatagctttcgataaaaaggcttctacatttaggcacaaggagtacagtgcttataaaggaacccgccagtcgatgccagaagagctgatagaacaggtggatattttaaaagatgtgataaatgcatttaacataaagaccatcgagatagagggatttgaagcagatgatatcattggtacagtatcaaaaattgcttccgaaagtgggatggatgtgcttatcgtcacaggcgacagagatgcgcttcagcttgtgtcggcaaatgtaaaagtaaaaatatgtaaaaaaggcataacgcagatggatgagtacgatgaaaaggcggtctttgaaaagtatgaagtgacgccgcttcaattcatagacttgaaagggcttatgggagacaaatcagacaacattccaggagtgcccaatataggggagaagacggccataaagcttgttaaagaatttggatcaattgaaaatttactgatgaatacagataagttaaaagggaaaataaaagaaaatgtagaaaacaatgcagaattagctgttttaagcaaacggcttgctacgattgagagaaatgttcctattgatattgatttgaatgaatacgcggttaaaaattacgatgtcaataagcttacagagctatttgaaaaattggaattttcaagcctcatctcagatttaaaagatgatagtcgtgatacaaaggatattaaagaatggcctgtaagagattttacatacgttaaaaatgttttaggaaagtttgatgttttgtcattgtatccattcatatatgatggaaagataaaagcagtatcatttgcttgcggtgacggatcgttttttgtagagattgatgattatgacaattttaaattgcttaataatgataagcttacgttgataggacacgatctgaaagattttttagtaaacatttcatactgcggtattgaacttaattgtaagattttagatacggccataatgacttatcttttaaatccgtctgagtcgaattacgacataagtcgcgtattgaaaaaatacttgaaagaggatttgcaaaacatagatgatatagtaggcaagggcaggaataaaaagagctacgatgacattgacaaaaagcttttagtcgattatatgtgttcagccgcatcaaacttatctaagttaaaagataagctcatgtcatttataaaagagatggagatggaagatcttttaaaaaatgtggaaattccgcttattgaagtgctaaaatctatggaggtgtacggctttacattagataaagatgtacttagaagtatttctaaagaaatagatgaaaagacagataagattgtaaaagatatttacgatgctgctggatacgaatttaatattaactctacaaagcagttatcagaatttttgtttgataaactgaatttgccagcaataaaaaagactaaaacagggtattcgactgacatggaagtccttgcagaacttataccgtacaatgacatagtaggagaaataatagaatatagacagcttatgaagcttaaatctacgtacatagatggcttcattcccatcatggatgaaaataatagggtccactctacgtttaaacaaacagttgctgctacagggagaattagctcaacagagcctaatctgcagaacatacctgtaagagaagaatttggcaggaggataagaaaggcatttgtatcaagttatgaagatgggcttataatatctgctgattattctcagattgagctaagggttcttgcacatctttcagaggatgaaaaacttattgagtcatttttgaacaacgaagatatacatttaaggacggcatcggaggtttttaaggtttcgaaagaagaagtgacaagtgaaatgagaaggcgggcgaaagctgtcaactttggtattgtatatggtataagcgattacggcttatctaaagacttaaagatttcgcgaaaagaagcgaaagaatacatagacaattattttgacaggtacaagggcgtcaaaaattacatcgactcaattgtcaaatttgcaaaggaaaatgggtatgttacgactatcttaaataggagaagatacataccggaaatcaattcaaaaaattttaaccaacattcttttggcgagagaatggcaatgaatacacctattcaaggtagcgctgcggatataataaagatgtcgatggttaaagtatacaatgaattaaaggaaagaggattgaaatcaagacttattcttcaggtgcacgatgagcttataattgacacacatcctgatgaagttgaaatagtcaaggagcttctaaaatcaataatggaaaatatcataaagttgaaagttcctttagttgtagatatagggcaagggaaaaactggtatgatgcaaaataaaaggatcc

SEQ ID NO: 824 - DNA, 2678 bp, Artificial Sequence
  Description of Artificial Sequence: Synthetic Clostridium thermosulfurogenes DNA Polymerase R797I
atgaaatacctgctgccgaccgctgctgctggtctgctgctcctcgctgcccagccggcgatggccatggcgaaatttttgatcatagatggtaatagcttgatgtacagggcgtattttgccctgcctgatttgatgaacagcgaaggaatgcatacaaatgccatatacggtttttcaatgatgcttcttaaattgctggaggaggagaaaccagactacatagcaatagctttcgataaaaaggcttctacatttaggcacaaggagtacagtgcttataaaggaacccgccagtcgatgccagaagagctgatagaacaggtggatattttaaaagatgtgataaatgcatttaacataaagaccatcgagatagagggatttgaagcagatgatatcattggtacagtatcaaaaattgcttccgaaagtgggatggatgtgcttatcgtcacaggcgacagagatgcgcttcagcttgtgtcggcaaatgtaaaagtaaaaatatgtaaaaaaggcataacgcagatggatgagtacgatgaaaaggcggtctttgaaaagtatgaagtgacgccgcttcaattcatagacttgaaagggcttatgggagacaaatcagacaacattccaggagtgcccaatataggggagaagacggccataaagcttgttaaagaatttggatcaattgaaaatttactgatgaatacagataagttaaaagggaaaataaaagaaaatgtagaaaacaatgcagaattagctgttttaagcaaacggcttgctacgattgagagaaatgttcctattgatattgatttgaatgaatacgcggttaaaaattacgatgtcaataagcttacagagctatttgaaaaattggaattttcaagcctcatctcagatttaaaagatgatagtcgtgatacaaaggatattaaagaatggcctgtaagagattttacatacgttaaaaatgttttaggaaagtttgatgttttgtcattgtatccattcatatatgatggaaagataaaagcagtatcatttgcttgcggtgacggatcgttttttgtagagattgatgattatgacaattttaaattgcttaataatgataagcttacgttgataggacacgatctgaaagattttttagtaaacatttcatactgcggtattgaacttaattgtaagattttagatacggccataatgacttatcttttaaatccgtctgagtcgaattacgacataagtcgcgtattgaaaaaatacttgaaagaggatttgcaaaacatagatgatatagtaggcaagggcaggaataaaaagagctacgatgacattgacaaaaagcttttagtcgattatatgtgttcagccgcatcaaacttatctaagttaaaagataagctcatgtcatttataaaagagatggagatggaagatcttttaaaaaatgtggaaattccgcttattgaagtgctaaaatctatggaggtgtacggctttacattagataaagatgtacttagaagtatttctaaagaaatagatgaaaagacagataagattgtaaaagatatttacgatgctgctggatacgaatttaatattaactctacaaagcagttatcagaatttttgtttgataaactgaatttgccagcaataaaaaagactaaaacagggtattcgactgacatggaagtccttgcagaacttataccgtacaatgacatagtaggagaaataatagaatatagacagcttatgaagcttaaatctacgtacatagatggcttcattcccatcatggatgaaaataatagggtccactctacgtttaaacaaacagttgctgctacagggagaattagctcaacagagcctaatctgcagaacatacctgtaagagaagaatttggcaggaggataagaaaggcatttgtatcaagttatgaagatgggcttataatatctgctgattattctcagattgagctaagggttcttgcacatctttcagaggatgaaaaacttattgagtcatttttgaacaacgaagatatacatttaaggacggcatcggaggtttttaaggtttcgaaagaagaagtgacaagtgaaatgagaaggcgggcgaaagctgtcaactttggtattgtatatggtataagcgattacggcttatctaaagacttaaagatttcgcgaaaagaagcgaaagaatacatagacaattattttgacaggtacaagggcgtcaaaaattacatcgactcaattgtcaaatttgcaaaggaaaatgggtatgttacgactatcttaaataggagaagatacataccggaaatcaattcaaaaaattttaaccaaatttcttttggcgagagaatggcaatgaatacacctattcaaggtagcgctgcggatataataaagatgtcgatggttaaagtatacaatgaattaaaggaaagaggattgaaatcaagacttattcttcaggtgcacgatgagcttataattgacacacatcctgatgaagttgaaatagtcaaggagcttctaaaatcaataatggaaaatatcataaagttgaaagttcctttagttgtagatatagggcaagggaaaaactggtatgatgcaaaataaaaggatcc

SEQ ID NO: 825 - DNA, 2678 bp, Artificial Sequence
  Description of Artificial Sequence: Synthetic Clostridium thermosulfurogenes DNA Polymerase R797L
atgaaatacctgctgccgaccgctgctgctggtctgctgctcctcgctgcccagccggcgatggccatggcgaaatttttgatcatagatggtaatagcttgatgtacagggcgtattttgccctgcctgatttgatgaacagcgaaggaatgcatacaaatgccatatacggtttttcaatgatgcttcttaaattgctggaggaggagaaaccagactacatagcaatagctttcgataaaaaggcttctacatttaggcacaaggagtacagtgcttataaaggaacccgccagtcgatgccagaagagctgatagaacaggtggatattttaaaagatgtgataaatgcatttaacataaagaccatcgagatagagggatttgaagcagatgatatcattggtacagtatcaaaaattgcttccgaaagtgggatggatgtgcttatcgtcacaggcgacagagatgcgcttcagcttgtgtcggcaaatgtaaaagtaaaaatatgtaaaaaaggcataacgcagatggatgagtacgatgaaaaggcggtctttgaaaagtatgaagtgacgccgcttcaattcatagacttgaaagggcttatgggagacaaatcagacaacattccaggagtgcccaatataggggagaagacggccataaagcttgttaaagaatttggatcaattgaaaatttactgatgaatacagataagttaaaagggaaaataaaagaaaatgtagaaaacaatgcagaattagctgttttaagcaaacggcttgctacgattgagagaaatgttcctattgatattgatttgaatgaatacgcggttaaaaattacgatgtcaataagcttacagagctatttgaaaaattggaattttcaagcctcatctcagatttaaaagatgatagtcgtgatacaaaggatattaaagaatggcctgtaagagattttacatacgttaaaaatgttttaggaaagtttgatgttttgtcattgtatccattcatatatgatggaaagataaaagcagtatcatttgcttgcggtgacggatcgttttttgtagagattgatgattatgacaattttaaattgcttaataatgataagcttacgttgataggacacgatctgaaagattttttagtaaacatttcatactgcggtattgaacttaattgtaagattttagatacggccataatgacttatcttttaaatccgtctgagtcgaattacgacataagtcgcgtattgaaaaaatacttgaaagaggatttgcaaaacatagatgatatagtaggcaagggcaggaataaaaagagctacgatgacattgacaaaaagcttttagtcgattatatgtgttcagccgcatcaaacttatctaagttaaaagataagctcatgtcatttataaaagagatggagatggaagatcttttaaaaaatgtggaaattccgcttattgaagtgctaaaatctatggaggtgtacggctttacattagataaagatgtacttagaagtatttctaaagaaatagatgaaaagacagataagattgtaaaagatatttacgatgctgctggatacgaatttaatattaactctacaaagcagttatcagaatttttgtttgataaactgaatttgccagcaataaaaaagactaaaacagggtattcgactgacatggaagtccttgcagaacttataccgtacaatgacatagtaggagaaataatagaatatagacagcttatgaagcttaaatctacgtacatagatggcttcattcccatcatggatgaaaataatagggtccactctacgtttaaacaaacagttgctgctacagggagaattagctcaacagagcctaatctgcagaacatacctgtaagagaagaatttggcaggaggataagaaaggcatttgtatcaagttatgaagatgggcttataatatctgctgattattctcagattgagctaagggttcttgcacatctttcagaggatgaaaaacttattgagtcatttttgaacaacgaagatatacatttaaggacggcatcggaggtttttaaggtttcgaaagaagaagtgacaagtgaaatgagaaggcgggcgaaagctgtcaactttggtattgtatatggtataagcgattacggcttatctaaagacttaaagatttcgcgaaaagaagcgaaagaatacatagacaattattttgacaggtacaagggcgtcaaaaattacatcgactcaattgtcaaatttgcaaaggaaaatgggtatgttacgactatcttaaataggagaagatacataccggaaatcaattcaaaaaattttaaccaactttcttttggcgagagaatggcaatgaatacacctattcaaggtagcgctgcggatataataaagatgtcgatggttaaagtatacaatgaattaaaggaaagaggattgaaatcaagacttattcttcaggtgcacgatgagcttataattgacacacatcctgatgaagttgaaatagtcaaggagcttctaaaatcaataatggaaaatatcataaagttgaaagttcctttagttgtagatatagggcaagggaaaaactggtatgatgcaaaataaaaggatcc

SEQ ID NO: 826 - DNA, 2678 bp, Artificial Sequence
  Description of Artificial Sequence: Synthetic Clostridium thermosulfurogenes DNA Polymerase R797K
atgaaatacctgctgccgaccgctgctgctggtctgctgctcctcgctgcccagccggcgatggccatggcgaaatttttgatcatagatggtaatagcttgatgtacagggcgtattttgccctgcctgatttgatgaacagcgaaggaatgcatacaaatgccatatacggtttttcaatgatgcttcttaaattgctggaggaggagaaaccagactacatagcaatagctttcgataaaaaggcttctacatttaggcacaaggagtacagtgcttataaaggaacccgccagtcgatgccagaagagctgatagaacaggtggatattttaaaagatgtgataaatgcatttaacataaagaccatcgagatagagggatttgaagcagatgatatcattggtacagtatcaaaaattgcttccgaaagtgggatggatgtgcttatcgtcacaggcgacagagatgcgcttcagcttgtgtcggcaaatgtaaaagtaaaaatatgtaaaaaaggcataacgcagatggatgagtacgatgaaaaggcggtctttgaaaagtatgaagtgacgccgcttcaattcatagacttgaaagggcttatgggagacaaatcagacaacattccaggagtgcccaatataggggagaagacggccataaagcttgttaaagaatttggatcaattgaaaatttactgatgaatacagataagttaaaagggaaaataaaagaaaatgtagaaaacaatgcagaattagctgttttaagcaaacggcttgctacgattgagagaaatgttcctattgatattgatttgaatgaatacgcggttaaaaattacgatgtcaataagcttacagagctatttgaaaaattggaattttcaagcctcatctcagatttaaaagatgatagtcgtgatacaaaggatattaaagaatggcctgtaagagattttacatacgttaaaaatgttttaggaaagtttgatgttttgtcattgtatccattcatatatgatggaaagataaaagcagtatcatttgcttgcggtgacggatcgttttttgtagagattgatgattatgacaattttaaattgcttaataatgataagcttacgttgataggacacgatctgaaagattttttagtaaacatttcatactgcggtattgaacttaattgtaagattttagatacggccataatgacttatcttttaaatccgtctgagtcgaattacgacataagtcgcgtattgaaaaaatacttgaaagaggatttgcaaaacatagatgatatagtaggcaagggcaggaataaaaagagctacgatgacattgacaaaaagcttttagtcgattatatgtgttcagccgcatcaaacttatctaagttaaaagataagctcatgtcatttataaaagagatggagatggaagatcttttaaaaaatgtggaaattccgcttattgaagtgctaaaatctatggaggtgtacggctttacattagataaagatgtacttagaagtatttctaaagaaatagatgaaaagacagataagattgtaaaagatatttacgatgctgctggatacgaatttaatattaactctacaaagcagttatcagaatttttgtttgataaactgaatttgccagcaataaaaaagactaaaacagggtattcgactgacatggaagtccttgcagaacttataccgtacaatgacatagtaggagaaataatagaatatagacagcttatgaagcttaaatctacgtacatagatggcttcattcccatcatggatgaaaataatagggtccactctacgtttaaacaaacagttgctgctacagggagaattagctcaacagagcctaatctgcagaacatacctgtaagagaagaatttggcaggaggataagaaaggcatttgtatcaagttatgaagatgggcttataatatctgctgattattctcagattgagctaagggttcttgcacatctttcagaggatgaaaaacttattgagtcatttttgaacaacgaagatatacatttaaggacggcatcggaggtttttaaggtttcgaaagaagaagtgacaagtgaaatgagaaggcgggcgaaagctgtcaactttggtattgtatatggtataagcgattacggcttatctaaagacttaaagatttcgcgaaaagaagcgaaagaatacatagacaattattttgacaggtacaagggcgtcaaaaattacatcgactcaattgtcaaatttgcaaaggaaaatgggtatgttacgactatcttaaataggagaagatacataccggaaatcaattcaaaaaattttaaccaaaaatcttttggcgagagaatggcaatgaatacacctattcaaggtagcgctgcggatataataaagatgtcgatggttaaagtatacaatgaattaaaggaaagaggattgaaatcaagacttattcttcaggtgcacgatgagcttataattgacacacatcctgatgaagttgaaatagtcaaggagcttctaaaatcaataatggaaaatatcataaagttgaaagttcctttagttgtagatatagggcaagggaaaaactggtatgatgcaaaataaaaggatcc

SEQ ID NO: 827 - DNA, 2678 bp, Artificial Sequence
  Description of Artificial Sequence: Synthetic Clostridium thermosulfurogenes DNA Polymerase R797M
atgaaatacctgctgccgaccgctgctgctggtctgctgctcctcgctgcccagccggcgatggccatggcgaaatttttgatcatagatggtaatagcttgatgtacagggcgtattttgccctgcctgatttgatgaacagcgaaggaatgcatacaaatgccatatacggtttttcaatgatgcttcttaaattgctggaggaggagaaaccagactacatagcaatagctttcgataaaaaggcttctacatttaggcacaaggagtacagtgcttataaaggaacccgccagtcgatgccagaagagctgatagaacaggtggatattttaaaagatgtgataaatgcatttaacataaagaccatcgagatagagggatttgaagcagatgatatcattggtacagtatcaaaaattgcttccgaaagtgggatggatgtgcttatcgtcacaggcgacagagatgcgcttcagcttgtgtcggcaaatgtaaaagtaaaaatatgtaaaaaaggcataacgcagatggatgagtacgatgaaaaggcggtctttgaaaagtatgaagtgacgccgcttcaattcatagacttgaaagggcttatgggagacaaatcagacaacattccaggagtgcccaatataggggagaagacggccataaagcttgttaaagaatttggatcaattgaaaatttactgatgaatacagataagttaaaagggaaaataaaagaaaatgtagaaaacaatgcagaattagctgttttaagcaaacggcttgctacgattgagagaaatgttcctattgatattgatttgaatgaatacgcggttaaaaattacgatgtcaataagcttacagagctatttgaaaaattggaattttcaagcctcatctcagatttaaaagatgatagtcgtgatacaaaggatattaaagaatggcctgtaagagattttacatacgttaaaaatgttttaggaaagtttgatgttttgtcattgtatccattcatatatgatggaaagataaaagcagtatcatttgcttgcggtgacggatcgttttttgtagagattgatgattatgacaattttaaattgcttaataatgataagcttacgttgataggacacgatctgaaagattttttagtaaacatttcatactgcggtattgaacttaattgtaagattttagatacggccataatgacttatcttttaaatccgtctgagtcgaattacgacataagtcgcgtattgaaaaaatacttgaaagaggatttgcaaaacatagatgatatagtaggcaagggcaggaataaaaagagctacgatgacattgacaaaaagcttttagtcgattatatgtgttcagccgcatcaaacttatctaagttaaaagataagctcatgtcatttataaaagagatggagatggaagatcttttaaaaaatgtggaaattccgcttattgaagtgctaaaatctatggaggtgtacggctttacattagataaagatgtacttagaagtatttctaaagaaatagatgaaaagacagataagattgtaaaagatatttacgatgctgctggatacgaatttaatattaactctacaaagcagttatcagaatttttgtttgataaactgaatttgccagcaataaaaaagactaaaacagggtattcgactgacatggaagtccttgcagaacttataccgtacaatgacatagtaggagaaataatagaatatagacagcttatgaagcttaaatctacgtacatagatggcttcattcccatcatggatgaaaataatagggtccactctacgtttaaacaaacagttgctgctacagggagaattagctcaacagagcctaatctgcagaacatacctgtaagagaagaatttggcaggaggataagaaaggcatttgtatcaagttatgaagatgggcttataatatctgctgattattctcagattgagctaagggttcttgcacatctttcagaggatgaaaaacttattgagtcatttttgaacaacgaagatatacatttaaggacggcatcggaggtttttaaggtttcgaaagaagaagtgacaagtgaaatgagaaggcgggcgaaagctgtcaactttggtattgtatatggtataagcgattacggcttatctaaagacttaaagatttcgcgaaaagaagcgaaagaatacatagacaattattttgacaggtacaagggcgtcaaaaattacatcgactcaattgtcaaatttgcaaaggaaaatgggtatgttacgactatcttaaataggagaagatacataccggaaatcaattcaaaaaattttaaccaaatgtcttttggcgagagaatggcaatgaatacacctattcaaggtagcgctgcggatataataaagatgtcgatggttaaagtatacaatgaattaaaggaaagaggattgaaatcaagacttattcttcaggtgcacgatgagcttataattgacacacatcctgatgaagttgaaatagtcaaggagcttctaaaatcaataatggaaaatatcataaagttgaaagttcctttagttgtagatatagggcaagggaaaaactggtatgatgcaaaataaaaggatcc

SEQ ID NO: 828 - DNA, 2678 bp, Artificial Sequence
  Description of Artificial Sequence: Synthetic Clostridium thermosulfurogenes DNA Polymerase R797F
atgaaatacctgctgccgaccgctgctgctggtctgctgctcctcgctgcccagccggcgatggccatggcgaaatttttgatcatagatggtaatagcttgatgtacagggcgtattttgccctgcctgatttgatgaacagcgaaggaatgcatacaaatgccatatacggtttttcaatgatgcttcttaaattgctggaggaggagaaaccagactacatagcaatagctttcgataaaaaggcttctacatttaggcacaaggagtacagtgcttataaaggaacccgccagtcgatgccagaagagctgatagaacaggtggatattttaaaagatgtgataaatgcatttaacataaagaccatcgagatagagggatttgaagcagatgatatcattggtacagtatcaaaaattgcttccgaaagtgggatggatgtgcttatcgtcacaggcgacagagatgcgcttcagcttgtgtcggcaaatgtaaaagtaaaaatatgtaaaaaaggcataacgcagatggatgagtacgatgaaaaggcggtctttgaaaagtatgaagtgacgccgcttcaattcatagacttgaaagggcttatgggagacaaatcagacaacattccaggagtgcccaatataggggagaagacggccataaagcttgttaaagaatttggatcaattgaaaatttactgatgaatacagataagttaaaagggaaaataaaagaaaatgtagaaaacaatgcagaattagctgttttaagcaaacggcttgctacgattgagagaaatgttcctattgatattgatttgaatgaatacgcggttaaaaattacgatgtcaataagcttacagagctatttgaaaaattggaattttcaagcctcatctcagatttaaaagatgatagtcgtgatacaaaggatattaaagaatggcctgtaagagattttacatacgttaaaaatgttttaggaaagtttgatgttttgtcattgtatccattcatatatgatggaaagataaaagcagtatcatttgcttgcggtgacggatcgttttttgtagagattgatgattatgacaattttaaattgcttaataatgataagcttacgttgataggacacgatctgaaagattttttagtaaacatttcatactgcggtattgaacttaattgtaagattttagatacggccataatgacttatcttttaaatccgtctgagtcgaattacgacataagtcgcgtattgaaaaaatacttgaaagaggatttgcaaaacatagatgatatagtaggcaagggcaggaataaaaagagctacgatgacattgacaaaaagcttttagtcgattatatgtgttcagccgcatcaaacttatctaagttaaaagataagctcatgtcatttataaaagagatggagatggaagatcttttaaaaaatgtggaaattccgcttattgaagtgctaaaatctatggaggtgtacggctttacattagataaagatgtacttagaagtatttctaaagaaatagatgaaaagacagataagattgtaaaagatatttacgatgctgctggatacgaatttaatattaactctacaaagcagttatcagaatttttgtttgataaactgaatttgccagcaataaaaaagactaaaacagggtattcgactgacatggaagtccttgcagaacttataccgtacaatgacatagtaggagaaataatagaatatagacagcttatgaagcttaaatctacgtacatagatggcttcattcccatcatggatgaaaataatagggtccactctacgtttaaacaaacagttgctgctacagggagaattagctcaacagagcctaatctgcagaacatacctgtaagagaagaatttggcaggaggataagaaaggcatttgtatcaagttatgaagatgggcttataatatctgctgattattctcagattgagctaagggttcttgcacatctttcagaggatgaaaaacttattgagtcatttttgaacaacgaagatatacatttaaggacggcatcggaggtttttaaggtttcgaaagaagaagtgacaagtgaaatgagaaggcgggcgaaagctgtcaactttggtattgtatatggtataagcgattacggcttatctaaagacttaaagatttcgcgaaaagaagcgaaagaatacatagacaattattttgacaggtacaagggcgtcaaaaattacatcgactcaattgtcaaatttgcaaaggaaaatgggtatgttacgactatcttaaataggagaagatacataccggaaatcaattcaaaaaattttaaccaattttcttttggcgagagaatggcaatgaatacacctattcaaggtagcgctgcggatataataaagatgtcgatggttaaagtatacaatgaattaaaggaaagaggattgaaatcaagacttattcttcaggtgcacgatgagcttataattgacacacatcctgatgaagttgaaatagtcaaggagcttctaaaatcaataatggaaaatatcataaagttgaaagttcctttagttgtagatatagggcaagggaaaaactggtatgatgcaaaataaaaggatcc

SEQ ID NO: 829 - DNA, 2678 bp, Artificial Sequence
  Description of Artificial Sequence: Synthetic Clostridium thermosulfurogenes DNA Polymerase R797P
atgaaatacctgctgccgaccgctgctgctggtctgctgctcctcgctgcccagccggcgatggccatggcgaaatttttgatcatagatggtaatagcttgatgtacagggcgtattttgccctgcctgatttgatgaacagcgaaggaatgcatacaaatgccatatacggtttttcaatgatgcttcttaaattgctggaggaggagaaaccagactacatagcaatagctttcgataaaaaggcttctacatttaggcacaaggagtacagtgcttataaaggaacccgccagtcgatgccagaagagctgatagaacaggtggatattttaaaagatgtgataaatgcatttaacataaagaccatcgagatagagggatttgaagcagatgatatcattggtacagtatcaaaaattgcttccgaaagtgggatggatgtgcttatcgtcacaggcgacagagatgcgcttcagcttgtgtcggcaaatgtaaaagtaaaaatatgtaaaaaaggcataacgcagatggatgagtacgatgaaaaggcggtctttgaaaagtatgaagtgacgccgcttcaattcatagacttgaaagggcttatgggagacaaatcagacaacattccaggagtgcccaatataggggagaagacggccataaagcttgttaaagaatttggatcaattgaaaatttactgatgaatacagataagttaaaagggaaaataaaagaaaatgtagaaaacaatgcagaattagctgttttaagcaaacggcttgctacgattgagagaaatgttcctattgatattgatttgaatgaatacgcggttaaaaattacgatgtcaataagcttacagagctatttgaaaaattggaattttcaagcctcatctcagatttaaaagatgatagtcgtgatacaaaggatattaaagaatggcctgtaagagattttacatacgttaaaaatgttttaggaaagtttgatgttttgtcattgtatccattcatatatgatggaaagataaaagcagtatcatttgcttgcggtgacggatcgttttttgtagagattgatgattatgacaattttaaattgcttaataatgataagcttacgttgataggacacgatctgaaagattttttagtaaacatttcatactgcggtattgaacttaattgtaagattttagatacggccataatgacttatcttttaaatccgtctgagtcgaattacgacataagtcgcgtattgaaaaaatacttgaaagaggatttgcaaaacatagatgatatagtaggcaagggcaggaataaaaagagctacgatgacattgacaaaaagcttttagtcgattatatgtgttcagccgcatcaaacttatctaagttaaaagataagctcatgtcatttataaaagagatggagatggaagatcttttaaaaaatgtggaaattccgcttattgaagtgctaaaatctatggaggtgtacggctttacattagataaagatgtacttagaagtatttctaaagaaatagatgaaaagacagataagattgtaaaagatatttacgatgctgctggatacgaatttaatattaactctacaaagcagttatcagaatttttgtttgataaactgaatttgccagcaataaaaaagactaaaacagggtattcgactgacatggaagtccttgcagaacttataccgtacaatgacatagtaggagaaataatagaatatagacagcttatgaagcttaaatctacgtacatagatggcttcattcccatcatggatgaaaataatagggtccactctacgtttaaacaaacagttgctgctacagggagaattagctcaacagagcctaatctgcagaacatacctgtaagagaagaatttggcaggaggataagaaaggcatttgtatcaagttatgaagatgggcttataatatctgctgattattctcagattgagctaagggttcttgcacatctttcagaggatgaaaaacttattgagtcatttttgaacaacgaagatatacatttaaggacggcatcggaggtttttaaggtttcgaaagaagaagtgacaagtgaaatgagaaggcgggcgaaagctgtcaactttggtattgtatatggtataagcgattacggcttatctaaagacttaaagatttcgcgaaaagaagcgaaagaatacatagacaattattttgacaggtacaagggcgtcaaaaattacatcgactcaattgtcaaatttgcaaaggaaaatgggtatgttacgactatcttaaataggagaagatacataccggaaatcaattcaaaaaattttaaccaaccttcttttggcgagagaatggcaatgaatacacctattcaaggtagcgctgcggatataataaagatgtcgatggttaaagtatacaatgaattaaaggaaagaggattgaaatcaagacttattcttcaggtgcacgatgagcttataattgacacacatcctgatgaagttgaaatagtcaaggagcttctaaaatcaataatggaaaatatcataaagttgaaagttcctttagttgtagatatagggcaagggaaaaactggtatgatgcaaaataaaaggatcc

SEQ ID NO: 830 - DNA, 2678 bp, Artificial Sequence
  Description of Artificial Sequence: Synthetic Clostridium thermosulfurogenes DNA Polymerase R797S
atgaaatacctgctgccgaccgctgctgctggtctgctgctcctcgctgcccagccggcgatggccatggcgaaatttttgatcatagatggtaatagcttgatgtacagggcgtattttgccctgcctgatttgatgaacagcgaaggaatgcatacaaatgccatatacggtttttcaatgatgcttcttaaattgctggaggaggagaaaccagactacatagcaatagctttcgataaaaaggcttctacatttaggcacaaggagtacagtgcttataaaggaacccgccagtcgatgccagaagagctgatagaacaggtggatattttaaaagatgtgataaatgcatttaacataaagaccatcgagatagagggatttgaagcagatgatatcattggtacagtatcaaaaattgcttccgaaagtgggatggatgtgcttatcgtcacaggcgacagagatgcgcttcagcttgtgtcggcaaatgtaaaagtaaaaatatgtaaaaaaggcataacgcagatggatgagtacgatgaaaaggcggtctttgaaaagtatgaagtgacgccgcttcaattcatagacttgaaagggcttatgggagacaaatcagacaacattccaggagtgcccaatataggggagaagacggccataaagcttgttaaagaatttggatcaattgaaaatttactgatgaatacagataagttaaaagggaaaataaaagaaaatgtagaaaacaatgcagaattagctgttttaagcaaacggcttgctacgattgagagaaatgttcctattgatattgatttgaatgaatacgcggttaaaaattacgatgtcaataagcttacagagctatttgaaaaattggaattttcaagcctcatctcagatttaaaagatgatagtcgtgatacaaaggatattaaagaatggcctgtaagagattttacatacgttaaaaatgttttaggaaagtttgatgttttgtcattgtatccattcatatatgatggaaagataaaagcagtatcatttgcttgcggtgacggatcgttttttgtagagattgatgattatgacaattttaaattgcttaataatgataagcttacgttgataggacacgatctgaaagattttttagtaaacatttcatactgcggtattgaacttaattgtaagattttagatacggccataatgacttatcttttaaatccgtctgagtcgaattacgacataagtcgcgtattgaaaaaatacttgaaagaggatttgcaaaacatagatgatatagtaggcaagggcaggaataaaaagagctacgatgacattgacaaaaagcttttagtcgattatatgtgttcagccgcatcaaacttatctaagttaaaagataagctcatgtcatttataaaagagatggagatggaagatcttttaaaaaatgtggaaattccgcttattgaagtgctaaaatctatggaggtgtacggctttacattagataaagatgtacttagaagtatttctaaagaaatagatgaaaagacagataagattgtaaaagatatttacgatgctgctggatacgaatttaatattaactctacaaagcagttatcagaatttttgtttgataaactgaatttgccagcaataaaaaagactaaaacagggtattcgactgacatggaagtccttgcagaacttataccgtacaatgacatagtaggagaaataatagaatatagacagcttatgaagcttaaatctacgtacatagatggcttcattcccatcatggatgaaaataatagggtccactctacgtttaaacaaacagttgctgctacagggagaattagctcaacagagcctaatctgcagaacatacctgtaagagaagaatttggcaggaggataagaaaggcatttgtatcaagttatgaagatgggcttataatatctgctgattattctcagattgagctaagggttcttgcacatctttcagaggatgaaaaacttattgagtcatttttgaacaacgaagatatacatttaaggacggcatcggaggtttttaaggtttcgaaagaagaagtgacaagtgaaatgagaaggcgggcgaaagctgtcaactttggtattgtatatggtataagcgattacggcttatctaaagacttaaagatttcgcgaaaagaagcgaaagaatacatagacaattattttgacaggtacaagggcgtcaaaaattacatcgactcaattgtcaaatttgcaaaggaaaatgggtatgttacgactatcttaaataggagaagatacataccggaaatcaattcaaaaaattttaaccaatcttcttttggcgagagaatggcaatgaatacacctattcaaggtagcgctgcggatataataaagatgtcgatggttaaagtatacaatgaattaaaggaaagaggattgaaatcaagacttattcttcaggtgcacgatgagcttataattgacacacatcctgatgaagttgaaatagtcaaggagcttctaaaatcaataatggaaaatatcataaagttgaaagttcctttagttgtagatatagggcaagggaaaaactggtatgatgcaaaataaaaggatcc

SEQ ID NO: 831 - DNA, 2678 bp, Artificial Sequence
  Description of Artificial Sequence: Synthetic Clostridium thermosulfurogenes DNA Polymerase R797T
atgaaatacctgctgccgaccgctgctgctggtctgctgctcctcgctgcccagccggcgatggccatggcgaaatttttgatcatagatggtaatagcttgatgtacagggcgtattttgccctgcctgatttgatgaacagcgaaggaatgcatacaaatgccatatacggtttttcaatgatgcttcttaaattgctggaggaggagaaaccagactacatagcaatagctttcgataaaaaggcttctacatttaggcacaaggagtacagtgcttataaaggaacccgccagtcgatgccagaagagctgatagaacaggtggatattttaaaagatgtgataaatgcatttaacataaagaccatcgagatagagggatttgaagcagatgatatcattggtacagtatcaaaaattgcttccgaaagtgggatggatgtgcttatcgtcacaggcgacagagatgcgcttcagcttgtgtcggcaaatgtaaaagtaaaaatatgtaaaaaaggcataacgcagatggatgagtacgatgaaaaggcggtctttgaaaagtatgaagtgacgccgcttcaattcatagacttgaaagggcttatgggagacaaatcagacaacattccaggagtgcccaatataggggagaagacggccataaagcttgttaaagaatttggatcaattgaaaatttactgatgaatacagataagttaaaagggaaaataaaagaaaatgtagaaaacaatgcagaattagctgttttaagcaaacggcttgctacgattgagagaaatgttcctattgatattgatttgaatgaatacgcggttaaaaattacgatgtcaataagcttacagagctatttgaaaaattggaattttcaagcctcatctcagatttaaaagatgatagtcgtgatacaaaggatattaaagaatggcctgtaagagattttacatacgttaaaaatgttttaggaaagtttgatgttttgtcattgtatccattcatatatgatggaaagataaaagcagtatcatttgcttgcggtgacggatcgttttttgtagagattgatgattatgacaattttaaattgcttaataatgataagcttacgttgataggacacgatctgaaagattttttagtaaacatttcatactgcggtattgaacttaattgtaagattttagatacggccataatgacttatcttttaaatccgtctgagtcgaattacgacataagtcgcgtattgaaaaaatacttgaaagaggatttgcaaaacatagatgatatagtaggcaagggcaggaataaaaagagctacgatgacattgacaaaaagcttttagtcgattatatgtgttcagccgcatcaaacttatctaagttaaaagataagctcatgtcatttataaaagagatggagatggaagatcttttaaaaaatgtggaaattccgcttattgaagtgctaaaatctatggaggtgtacggctttacattagataaagatgtacttagaagtatttctaaagaaatagatgaaaagacagataagattgtaaaagatatttacgatgctgctggatacgaatttaatattaactctacaaagcagttatcagaatttttgtttgataaactgaatttgccagcaataaaaaagactaaaacagggtattcgactgacatggaagtccttgcagaacttataccgtacaatgacatagtaggagaaataatagaatatagacagcttatgaagcttaaatctacgtacatagatggcttcattcccatcatggatgaaaataatagggtccactctacgtttaaacaaacagttgctgctacagggagaattagctcaacagagcctaatctgcagaacatacctgtaagagaagaatttggcaggaggataagaaaggcatttgtatcaagttatgaagatgggcttataatatctgctgattattctcagattgagctaagggttcttgcacatctttcagaggatgaaaaacttattgagtcatttttgaacaacgaagatatacatttaaggacggcatcggaggtttttaaggtttcgaaagaagaagtgacaagtgaaatgagaaggcgggcgaaagctgtcaactttggtattgtatatggtataagcgattacggcttatctaaagacttaaagatttcgcgaaaagaagcgaaagaatacatagacaattattttgacaggtacaagggcgtcaaaaattacatcgactcaattgtcaaatttgcaaaggaaaatgggtatgttacgactatcttaaataggagaagatacataccggaaatcaattcaaaaaattttaaccaaacttcttttggcgagagaatggcaatgaatacacctattcaaggtagcgctgcggatataataaagatgtcgatggttaaagtatacaatgaattaaaggaaagaggattgaaatcaagacttattcttcaggtgcacgatgagcttataattgacacacatcctgatgaagttgaaatagtcaaggagcttctaaaatcaataatggaaaatatcataaagttgaaagttcctttagttgtagatatagggcaagggaaaaactggtatgatgcaaaataaaaggatcc

SEQ ID NO: 832 - DNA, 2678 bp, Artificial Sequence
  Description of Artificial Sequence: Synthetic Clostridium thermosulfurogenes DNA Polymerase R797W
atgaaatacctgctgccgaccgctgctgctggtctgctgctcctcgctgcccagccggcgatggccatggcgaaatttttgatcatagatggtaatagcttgatgtacagggcgtattttgccctgcctgatttgatgaacagcgaaggaatgcatacaaatgccatatacggtttttcaatgatgcttcttaaattgctggaggaggagaaaccagactacatagcaatagctttcgataaaaaggcttctacatttaggcacaaggagtacagtgcttataaaggaacccgccagtcgatgccagaagagctgatagaacaggtggatattttaaaagatgtgataaatgcatttaacataaagaccatcgagatagagggatttgaagcagatgatatcattggtacagtatcaaaaattgcttccgaaagtgggatggatgtgcttatcgtcacaggcgacagagatgcgcttcagcttgtgtcggcaaatgtaaaagtaaaaatatgtaaaaaaggcataacgcagatggatgagtacgatgaaaaggcggtctttgaaaagtatgaagtgacgccgcttcaattcatagacttgaaagggcttatgggagacaaatcagacaacattccaggagtgcccaatataggggagaagacggccataaagcttgttaaagaatttggatcaattgaaaatttactgatgaatacagataagttaaaagggaaaataaaagaaaatgtagaaaacaatgcagaattagctgttttaagcaaacggcttgctacgattgagagaaatgttcctattgatattgatttgaatgaatacgcggttaaaaattacgatgtcaataagcttacagagctatttgaaaaattggaattttcaagcctcatctcagatttaaaagatgatagtcgtgatacaaaggatattaaagaatggcctgtaagagattttacatacgttaaaaatgttttaggaaagtttgatgttttgtcattgtatccattcatatatgatggaaagataaaagcagtatcatttgcttgcggtgacggatcgttttttgtagagattgatgattatgacaattttaaattgcttaataatgataagcttacgttgataggacacgatctgaaagattttttagtaaacatttcatactgcggtattgaacttaattgtaagattttagatacggccataatgacttatcttttaaatccgtctgagtcgaattacgacataagtcgcgtattgaaaaaatacttgaaagaggatttgcaaaacatagatgatatagtaggcaagggcaggaataaaaagagctacgatgacattgacaaaaagcttttagtcgattatatgtgttcagccgcatcaaacttatctaagttaaaagataagctcatgtcatttataaaagagatggagatggaagatcttttaaaaaatgtggaaattccgcttattgaagtgctaaaatctatggaggtgtacggctttacattagataaagatgtacttagaagtatttctaaagaaatagatgaaaagacagataagattgtaaaagatatttacgatgctgctggatacgaatttaatattaactctacaaagcagttatcagaatttttgtttgataaactgaatttgccagcaataaaaaagactaaaacagggtattcgactgacatggaagtccttgcagaacttataccgtacaatgacatagtaggagaaataatagaatatagacagcttatgaagcttaaatctacgtacatagatggcttcattcccatcatggatgaaaataatagggtccactctacgtttaaacaaacagttgctgctacagggagaattagctcaacagagcctaatctgcagaacatacctgtaagagaagaatttggcaggaggataagaaaggcatttgtatcaagttatgaagatgggcttataatatctgctgattattctcagattgagctaagggttcttgcacatctttcagaggatgaaaaacttattgagtcatttttgaacaacgaagatatacatttaaggacggcatcggaggtttttaaggtttcgaaagaagaagtgacaagtgaaatgagaaggcgggcgaaagctgtcaactttggtattgtatatggtataagcgattacggcttatctaaagacttaaagatttcgcgaaaagaagcgaaagaatacatagacaattattttgacaggtacaagggcgtcaaaaattacatcgactcaattgtcaaatttgcaaaggaaaatgggtatgttacgactatcttaaataggagaagatacataccggaaatcaattcaaaaaattttaaccaatggtcttttggcgagagaatggcaatgaatacacctattcaaggtagcgctgcggatataataaagatgtcgatggttaaagtatacaatgaattaaaggaaagaggattgaaatcaagacttattcttcaggtgcacgatgagcttataattgacacacatcctgatgaagttgaaatagtcaaggagcttctaaaatcaataatggaaaatatcataaagttgaaagttcctttagttgtagatatagggcaagggaaaaactggtatgatgcaaaataaaaggatcc

SEQ ID NO: 833 - DNA, 2678 bp, Artificial Sequence
  Description of Artificial Sequence: Synthetic Clostridium thermosulfurogenes DNA Polymerase R797Y
atgaaatacctgctgccgaccgctgctgctggtctgctgctcctcgctgcccagccggcgatggccatggcgaaatttttgatcatagatggtaatagcttgatgtacagggcgtattttgccctgcctgatttgatgaacagcgaaggaatgcatacaaatgccatatacggtttttcaatgatgcttcttaaattgctggaggaggagaaaccagactacatagcaatagctttcgataaaaaggcttctacatttaggcacaaggagtacagtgcttataaaggaacccgccagtcgatgccagaagagctgatagaacaggtggatattttaaaagatgtgataaatgcatttaacataaagaccatcgagatagagggatttgaagcagatgatatcattggtacagtatcaaaaattgcttccgaaagtgggatggatgtgcttatcgtcacaggcgacagagatgcgcttcagcttgtgtcggcaaatgtaaaagtaaaaatatgtaaaaaaggcataacgcagatggatgagtacgatgaaaaggcggtctttgaaaagtatgaagtgacgccgcttcaattcatagacttgaaagggcttatgggagacaaatcagacaacattccaggagtgcccaatataggggagaagacggccataaagcttgttaaagaatttggatcaattgaaaatttactgatgaatacagataagttaaaagggaaaataaaagaaaatgtagaaaacaatgcagaattagctgttttaagcaaacggcttgctacgattgagagaaatgttcctattgatattgatttgaatgaatacgcggttaaaaattacgatgtcaataagcttacagagctatttgaaaaattggaattttcaagcctcatctcagatttaaaagatgatagtcgtgatacaaaggatattaaagaatggcctgtaagagattttacatacgttaaaaatgttttaggaaagtttgatgttttgtcattgtatccattcatatatgatggaaagataaaagcagtatcatttgcttgcggtgacggatcgttttttgtagagattgatgattatgacaattttaaattgcttaataatgataagcttacgttgataggacacgatctgaaagattttttagtaaacatttcatactgcggtattgaacttaattgtaagattttagatacggccataatgacttatcttttaaatccgtctgagtcgaattacgacataagtcgcgtattgaaaaaatacttgaaagaggatttgcaaaacatagatgatatagtaggcaagggcaggaataaaaagagctacgatgacattgacaaaaagcttttagtcgattatatgtgttcagccgcatcaaacttatctaagttaaaagataagctcatgtcatttataaaagagatggagatggaagatcttttaaaaaatgtggaaattccgcttattgaagtgctaaaatctatggaggtgtacggctttacattagataaagatgtacttagaagtatttctaaagaaatagatgaaaagacagataagattgtaaaagatatttacgatgctgctggatacgaatttaatattaactctacaaagcagttatcagaatttttgtttgataaactgaatttgccagcaataaaaaagactaaaacagggtattcgactgacatggaagtccttgcagaacttataccgtacaatgacatagtaggagaaataatagaatatagacagcttatgaagcttaaatctacgtacatagatggcttcattcccatcatggatgaaaataatagggtccactctacgtttaaacaaacagttgctgctacagggagaattagctcaacagagcctaatctgcagaacatacctgtaagagaagaatttggcaggaggataagaaaggcatttgtatcaagttatgaagatgggcttataatatctgctgattattctcagattgagctaagggttcttgcacatctttcagaggatgaaaaacttattgagtcatttttgaacaacgaagatatacatttaaggacggcatcggaggtttttaaggtttcgaaagaagaagtgacaagtgaaatgagaaggcgggcgaaagctgtcaactttggtattgtatatggtataagcgattacggcttatctaaagacttaaagatttcgcgaaaagaagcgaaagaatacatagacaattattttgacaggtacaagggcgtcaaaaattacatcgactcaattgtcaaatttgcaaaggaaaatgggtatgttacgactatcttaaataggagaagatacataccggaaatcaattcaaaaaattttaaccaatattcttttggcgagagaatggcaatgaatacacctattcaaggtagcgctgcggatataataaagatgtcgatggttaaagtatacaatgaattaaaggaaagaggattgaaatcaagacttattcttcaggtgcacgatgagcttataattgacacacatcctgatgaagttgaaatagtcaaggagcttctaaaatcaataatggaaaatatcataaagttgaaagttcctttagttgtagatatagggcaagggaaaaactggtatgatgcaaaataaaaggatcc

SEQ ID NO: 834 - DNA, 2678 bp, Artificial Sequence
  Description of Artificial Sequence: Synthetic Clostridium thermosulfurogenes DNA Polymerase R797V
atgaaatacctgctgccgaccgctgctgctggtctgctgctcctcgctgcccagccggcgatggccatggcgaaatttttgatcatagatggtaatagcttgatgtacagggcgtattttgccctgcctgatttgatgaacagcgaaggaatgcatacaaatgccatatacggtttttcaatgatgcttcttaaattgctggaggaggagaaaccagactacatagcaatagctttcgataaaaaggcttctacatttaggcacaaggagtacagtgcttataaaggaacccgccagtcgatgccagaagagctgatagaacaggtggatattttaaaagatgtgataaatgcatttaacataaagaccatcgagatagagggatttgaagcagatgatatcattggtacagtatcaaaaattgcttccgaaagtgggatggatgtgcttatcgtcacaggcgacagagatgcgcttcagcttgtgtcggcaaatgtaaaagtaaaaatatgtaaaaaaggcataacgcagatggatgagtacgatgaaaaggcggtctttgaaaagtatgaagtgacgccgcttcaattcatagacttgaaagggcttatgggagacaaatcagacaacattccaggagtgcccaatataggggagaagacggccataaagcttgttaaagaatttggatcaattgaaaatttactgatgaatacagataagttaaaagggaaaataaaagaaaatgtagaaaacaatgcagaattagctgttttaagcaaacggcttgctacgattgagagaaatgttcctattgatattgatttgaatgaatacgcggttaaaaattacgatgtcaataagcttacagagctatttgaaaaattggaattttcaagcctcatctcagatttaaaagatgatagtcgtgatacaaaggatattaaagaatggcctgtaagagattttacatacgttaaaaatgttttaggaaagtttgatgttttgtcattgtatccattcatatatgatggaaagataaaagcagtatcatttgcttgcggtgacggatcgttttttgtagagattgatgattatgacaattttaaattgcttaataatgataagcttacgttgataggacacgatctgaaagattttttagtaaacatttcatactgcggtattgaacttaattgtaagattttagatacggccataatgacttatcttttaaatccgtctgagtcgaattacgacataagtcgcgtattgaaaaaatacttgaaagaggatttgcaaaacatagatgatatagtaggcaagggcaggaataaaaagagctacgatgacattgacaaaaagcttttagtcgattatatgtgttcagccgcatcaaacttatctaagttaaaagataagctcatgtcatttataaaagagatggagatggaagatcttttaaaaaatgtggaaattccgcttattgaagtgctaaaatctatggaggtgtacggctttacattagataaagatgtacttagaagtatttctaaagaaatagatgaaaagacagataagattgtaaaagatatttacgatgctgctggatacgaatttaatattaactctacaaagcagttatcagaatttttgtttgataaactgaatttgccagcaataaaaaagactaaaacagggtattcgactgacatggaagtccttgcagaacttataccgtacaatgacatagtaggagaaataatagaatatagacagcttatgaagcttaaatctacgtacatagatggcttcattcccatcatggatgaaaataatagggtccactctacgtttaaacaaacagttgctgctacagggagaattagctcaacagagcctaatctgcagaacatacctgtaagagaagaatttggcaggaggataagaaaggcatttgtatcaagttatgaagatgggcttataatatctgctgattattctcagattgagctaagggttcttgcacatctttcagaggatgaaaaacttattgagtcatttttgaacaacgaagatatacatttaaggacggcatcggaggtttttaaggtttcgaaagaagaagtgacaagtgaaatgagaaggcgggcgaaagctgtcaactttggtattgtatatggtataagcgattacggcttatctaaagacttaaagatttcgcgaaaagaagcgaaagaatacatagacaattattttgacaggtacaagggcgtcaaaaattacatcgactcaattgtcaaatttgcaaaggaaaatgggtatgttacgactatcttaaataggagaagatacataccggaaatcaattcaaaaaattttaaccaagtttcttttggcgagagaatggcaatgaatacacctattcaaggtagcgctgcggatataataaagatgtcgatggttaaagtatacaatgaattaaaggaaagaggattgaaatcaagacttattcttcaggtgcacgatgagcttataattgacacacatcctgatgaagttgaaatagtcaaggagcttctaaaatcaataatggaaaatatcataaagttgaaagttcctttagttgtagatatagggcaagggaaaaactggtatgatgcaaaataaaaggatcc

SEQ ID NO: 835 - DNA, 2678 bp, Artificial Sequence
  Description of Artificial Sequence: Synthetic Clostridium thermosulfurogenes DNA Polymerase S798A
atgaaatacctgctgccgaccgctgctgctggtctgctgctcctcgctgcccagccggcgatggccatggcgaaatttttgatcatagatggtaatagcttgatgtacagggcgtattttgccctgcctgatttgatgaacagcgaaggaatgcatacaaatgccatatacggtttttcaatgatgcttcttaaattgctggaggaggagaaaccagactacatagcaatagctttcgataaaaaggcttctacatttaggcacaaggagtacagtgcttataaaggaacccgccagtcgatgccagaagagctgatagaacaggtggatattttaaaagatgtgataaatgcatttaacataaagaccatcgagatagagggatttgaagcagatgatatcattggtacagtatcaaaaattgcttccgaaagtgggatggatgtgcttatcgtcacaggcgacagagatgcgcttcagcttgtgtcggcaaatgtaaaagtaaaaatatgtaaaaaaggcataacgcagatggatgagtacgatgaaaaggcggtctttgaaaagtatgaagtgacgccgcttcaattcatagacttgaaagggcttatgggagacaaatcagacaacattccaggagtgcccaatataggggagaagacggccataaagcttgttaaagaatttggatcaattgaaaatttactgatgaatacagataagttaaaagggaaaataaaagaaaatgtagaaaacaatgcagaattagctgttttaagcaaacggcttgctacgattgagagaaatgttcctattgatattgatttgaatgaatacgcggttaaaaattacgatgtcaataagcttacagagctatttgaaaaattggaattttcaagcctcatctcagatttaaaagatgatagtcgtgatacaaaggatattaaagaatggcctgtaagagattttacatacgttaaaaatgttttaggaaagtttgatgttttgtcattgtatccattcatatatgatggaaagataaaagcagtatcatttgcttgcggtgacggatcgttttttgtagagattgatgattatgacaattttaaattgcttaataatgataagcttacgttgataggacacgatctgaaagattttttagtaaacatttcatactgcggtattgaacttaattgtaagattttagatacggccataatgacttatcttttaaatccgtctgagtcgaattacgacataagtcgcgtattgaaaaaatacttgaaagaggatttgcaaaacatagatgatatagtaggcaagggcaggaataaaaagagctacgatgacattgacaaaaagcttttagtcgattatatgtgttcagccgcatcaaacttatctaagttaaaagataagctcatgtcatttataaaagagatggagatggaagatcttttaaaaaatgtggaaattccgcttattgaagtgctaaaatctatggaggtgtacggctttacattagataaagatgtacttagaagtatttctaaagaaatagatgaaaagacagataagattgtaaaagatatttacgatgctgctggatacgaatttaatattaactctacaaagcagttatcagaatttttgtttgataaactgaatttgccagcaataaaaaagactaaaacagggtattcgactgacatggaagtccttgcagaacttataccgtacaatgacatagtaggagaaataatagaatatagacagcttatgaagcttaaatctacgtacatagatggcttcattcccatcatggatgaaaataatagggtccactctacgtttaaacaaacagttgctgctacagggagaattagctcaacagagcctaatctgcagaacatacctgtaagagaagaatttggcaggaggataagaaaggcatttgtatcaagttatgaagatgggcttataatatctgctgattattctcagattgagctaagggttcttgcacatctttcagaggatgaaaaacttattgagtcatttttgaacaacgaagatatacatttaaggacggcatcggaggtttttaaggtttcgaaagaagaagtgacaagtgaaatgagaaggcgggcgaaagctgtcaactttggtattgtatatggtataagcgattacggcttatctaaagacttaaagatttcgcgaaaagaagcgaaagaatacatagacaattattttgacaggtacaagggcgtcaaaaattacatcgactcaattgtcaaatttgcaaaggaaaatgggtatgttacgactatcttaaataggagaagatacataccggaaatcaattcaaaaaattttaaccaaagagcttttggcgagagaatggcaatgaatacacctattcaaggtagcgctgcggatataataaagatgtcgatggttaaagtatacaatgaattaaaggaaagaggattgaaatcaagacttattcttcaggtgcacgatgagcttataattgacacacatcctgatgaagttgaaatagtcaaggagcttctaaaatcaataatggaaaatatcataaagttgaaagttcctttagttgtagatatagggcaagggaaaaactggtatgatgcaaaataaaaggatcc

SEQ ID NO: 836 - DNA, 2678 bp, Artificial Sequence
  Description of Artificial Sequence: Synthetic Clostridium thermosulfurogenes DNA Polymerase S798R
atgaaatacctgctgccgaccgctgctgctggtctgctgctcctcgctgcccagccggcgatggccatggcgaaatttttgatcatagatggtaatagcttgatgtacagggcgtattttgccctgcctgatttgatgaacagcgaaggaatgcatacaaatgccatatacggtttttcaatgatgcttcttaaattgctggaggaggagaaaccagactacatagcaatagctttcgataaaaaggcttctacatttaggcacaaggagtacagtgcttataaaggaacccgccagtcgatgccagaagagctgatagaacaggtggatattttaaaagatgtgataaatgcatttaacataaagaccatcgagatagagggatttgaagcagatgatatcattggtacagtatcaaaaattgcttccgaaagtgggatggatgtgcttatcgtcacaggcgacagagatgcgcttcagcttgtgtcggcaaatgtaaaagtaaaaatatgtaaaaaaggcataacgcagatggatgagtacgatgaaaaggcggtctttgaaaagtatgaagtgacgccgcttcaattcatagacttgaaagggcttatgggagacaaatcagacaacattccaggagtgcccaatataggggagaagacggccataaagcttgttaaagaatttggatcaattgaaaatttactgatgaatacagataagttaaaagggaaaataaaagaaaatgtagaaaacaatgcagaattagctgttttaagcaaacggcttgctacgattgagagaaatgttcctattgatattgatttgaatgaatacgcggttaaaaattacgatgtcaataagcttacagagctatttgaaaaattggaattttcaagcctcatctcagatttaaaagatgatagtcgtgatacaaaggatattaaagaatggcctgtaagagattttacatacgttaaaaatgttttaggaaagtttgatgttttgtcattgtatccattcatatatgatggaaagataaaagcagtatcatttgcttgcggtgacggatcgttttttgtagagattgatgattatgacaattttaaattgcttaataatgataagcttacgttgataggacacgatctgaaagattttttagtaaacatttcatactgcggtattgaacttaattgtaagattttagatacggccataatgacttatcttttaaatccgtctgagtcgaattacgacataagtcgcgtattgaaaaaatacttgaaagaggatttgcaaaacatagatgatatagtaggcaagggcaggaataaaaagagctacgatgacattgacaaaaagcttttagtcgattatatgtgttcagccgcatcaaacttatctaagttaaaagataagctcatgtcatttataaaagagatggagatggaagatcttttaaaaaatgtggaaattccgcttattgaagtgctaaaatctatggaggtgtacggctttacattagataaagatgtacttagaagtatttctaaagaaatagatgaaaagacagataagattgtaaaagatatttacgatgctgctggatacgaatttaatattaactctacaaagcagttatcagaatttttgtttgataaactgaatttgccagcaataaaaaagactaaaacagggtattcgactgacatggaagtccttgcagaacttataccgtacaatgacatagtaggagaaataatagaatatagacagcttatgaagcttaaatctacgtacatagatggcttcattcccatcatggatgaaaataatagggtccactctacgtttaaacaaacagttgctgctacagggagaattagctcaacagagcctaatctgcagaacatacctgtaagagaagaatttggcaggaggataagaaaggcatttgtatcaagttatgaagatgggcttataatatctgctgattattctcagattgagctaagggttcttgcacatctttcagaggatgaaaaacttattgagtcatttttgaacaacgaagatatacatttaaggacggcatcggaggtttttaaggtttcgaaagaagaagtgacaagtgaaatgagaaggcgggcgaaagctgtcaactttggtattgtatatggtataagcgattacggcttatctaaagacttaaagatttcgcgaaaagaagcgaaagaatacatagacaattattttgacaggtacaagggcgtcaaaaattacatcgactcaattgtcaaatttgcaaaggaaaatgggtatgttacgactatcttaaataggagaagatacataccggaaatcaattcaaaaaattttaaccaaagacgttttggcgagagaatggcaatgaatacacctattcaaggtagcgctgcggatataataaagatgtcgatggttaaagtatacaatgaattaaaggaaagaggattgaaatcaagacttattcttcaggtgcacgatgagcttataattgacacacatcctgatgaagttgaaatagtcaaggagcttctaaaatcaataatggaaaatatcataaagttgaaagttcctttagttgtagatatagggcaagggaaaaactggtatgatgcaaaataaaaggatcc

SEQ ID NO: 837 - DNA, 2678 bp, Artificial Sequence
  Description of Artificial Sequence: Synthetic Clostridium thermosulfurogenes DNA Polymerase S798N
atgaaatacctgctgccgaccgctgctgctggtctgctgctcctcgctgcccagccggcgatggccatggcgaaatttttgatcatagatggtaatagcttgatgtacagggcgtattttgccctgcctgatttgatgaacagcgaaggaatgcatacaaatgccatatacggtttttcaatgatgcttcttaaattgctggaggaggagaaaccagactacatagcaatagctttcgataaaaaggcttctacatttaggcacaaggagtacagtgcttataaaggaacccgccagtcgatgccagaagagctgatagaacaggtggatattttaaaagatgtgataaatgcatttaacataaagaccatcgagatagagggatttgaagcagatgatatcattggtacagtatcaaaaattgcttccgaaagtgggatggatgtgcttatcgtcacaggcgacagagatgcgcttcagcttgtgtcggcaaatgtaaaagtaaaaatatgtaaaaaaggcataacgcagatggatgagtacgatgaaaaggcggtctttgaaaagtatgaagtgacgccgcttcaattcatagacttgaaagggcttatgggagacaaatcagacaacattccaggagtgcccaatataggggagaagacggccataaagcttgttaaagaatttggatcaattgaaaatttactgatgaatacagataagttaaaagggaaaataaaagaaaatgtagaaaacaatgcagaattagctgttttaagcaaacggcttgctacgattgagagaaatgttcctattgatattgatttgaatgaatacgcggttaaaaattacgatgtcaataagcttacagagctatttgaaaaattggaattttcaagcctcatctcagatttaaaagatgatagtcgtgatacaaaggatattaaagaatggcctgtaagagattttacatacgttaaaaatgttttaggaaagtttgatgttttgtcattgtatccattcatatatgatggaaagataaaagcagtatcatttgcttgcggtgacggatcgttttttgtagagattgatgattatgacaattttaaattgcttaataatgataagcttacgttgataggacacgatctgaaagattttttagtaaacatttcatactgcggtattgaacttaattgtaagattttagatacggccataatgacttatcttttaaatccgtctgagtcgaattacgacataagtcgcgtattgaaaaaatacttgaaagaggatttgcaaaacatagatgatatagtaggcaagggcaggaataaaaagagctacgatgacattgacaaaaagcttttagtcgattatatgtgttcagccgcatcaaacttatctaagttaaaagataagctcatgtcatttataaaagagatggagatggaagatcttttaaaaaatgtggaaattccgcttattgaagtgctaaaatctatggaggtgtacggctttacattagataaagatgtacttagaagtatttctaaagaaatagatgaaaagacagataagattgtaaaagatatttacgatgctgctggatacgaatttaatattaactctacaaagcagttatcagaatttttgtttgataaactgaatttgccagcaataaaaaagactaaaacagggtattcgactgacatggaagtccttgcagaacttataccgtacaatgacatagtaggagaaataatagaatatagacagcttatgaagcttaaatctacgtacatagatggcttcattcccatcatggatgaaaataatagggtccactctacgtttaaacaaacagttgctgctacagggagaattagctcaacagagcctaatctgcagaacatacctgtaagagaagaatttggcaggaggataagaaaggcatttgtatcaagttatgaagatgggcttataatatctgctgattattctcagattgagctaagggttcttgcacatctttcagaggatgaaaaacttattgagtcatttttgaacaacgaagatatacatttaaggacggcatcggaggtttttaaggtttcgaaagaagaagtgacaagtgaaatgagaaggcgggcgaaagctgtcaactttggtattgtatatggtataagcgattacggcttatctaaagacttaaagatttcgcgaaaagaagcgaaagaatacatagacaattattttgacaggtacaagggcgtcaaaaattacatcgactcaattgtcaaatttgcaaaggaaaatgggtatgttacgactatcttaaataggagaagatacataccggaaatcaattcaaaaaattttaaccaaagaaattttggcgagagaatggcaatgaatacacctattcaaggtagcgctgcggatataataaagatgtcgatggttaaagtatacaatgaattaaaggaaagaggattgaaatcaagacttattcttcaggtgcacgatgagcttataattgacacacatcctgatgaagttgaaatagtcaaggagcttctaaaatcaataatggaaaatatcataaagttgaaagttcctttagttgtagatatagggcaagggaaaaactggtatgatgcaaaataaaaggatcc

SEQ ID NO: 838 - DNA, 2678 bp, Artificial Sequence
  Description of Artificial Sequence: Synthetic Clostridium thermosulfurogenes DNA Polymerase S798D
atgaaatacctgctgccgaccgctgctgctggtctgctgctcctcgctgcccagccggcgatggccatggcgaaatttttgatcatagatggtaatagcttgatgtacagggcgtattttgccctgcctgatttgatgaacagcgaaggaatgcatacaaatgccatatacggtttttcaatgatgcttcttaaattgctggaggaggagaaaccagactacatagcaatagctttcgataaaaaggcttctacatttaggcacaaggagtacagtgcttataaaggaacccgccagtcgatgccagaagagctgatagaacaggtggatattttaaaagatgtgataaatgcatttaacataaagaccatcgagatagagggatttgaagcagatgatatcattggtacagtatcaaaaattgcttccgaaagtgggatggatgtgcttatcgtcacaggcgacagagatgcgcttcagcttgtgtcggcaaatgtaaaagtaaaaatatgtaaaaaaggcataacgcagatggatgagtacgatgaaaaggcggtctttgaaaagtatgaagtgacgccgcttcaattcatagacttgaaagggcttatgggagacaaatcagacaacattccaggagtgcccaatataggggagaagacggccataaagcttgttaaagaatttggatcaattgaaaatttactgatgaatacagataagttaaaagggaaaataaaagaaaatgtagaaaacaatgcagaattagctgttttaagcaaacggcttgctacgattgagagaaatgttcctattgatattgatttgaatgaatacgcggttaaaaattacgatgtcaataagcttacagagctatttgaaaaattggaattttcaagcctcatctcagatttaaaagatgatagtcgtgatacaaaggatattaaagaatggcctgtaagagattttacatacgttaaaaatgttttaggaaagtttgatgttttgtcattgtatccattcatatatgatggaaagataaaagcagtatcatttgcttgcggtgacggatcgttttttgtagagattgatgattatgacaattttaaattgcttaataatgataagcttacgttgataggacacgatctgaaagattttttagtaaacatttcatactgcggtattgaacttaattgtaagattttagatacggccataatgacttatcttttaaatccgtctgagtcgaattacgacataagtcgcgtattgaaaaaatacttgaaagaggatttgcaaaacatagatgatatagtaggcaagggcaggaataaaaagagctacgatgacattgacaaaaagcttttagtcgattatatgtgttcagccgcatcaaacttatctaagttaaaagataagctcatgtcatttataaaagagatggagatggaagatcttttaaaaaatgtggaaattccgcttattgaagtgctaaaatctatggaggtgtacggctttacattagataaagatgtacttagaagtatttctaaagaaatagatgaaaagacagataagattgtaaaagatatttacgatgctgctggatacgaatttaatattaactctacaaagcagttatcagaatttttgtttgataaactgaatttgccagcaataaaaaagactaaaacagggtattcgactgacatggaagtccttgcagaacttataccgtacaatgacatagtaggagaaataatagaatatagacagcttatgaagcttaaatctacgtacatagatggcttcattcccatcatggatgaaaataatagggtccactctacgtttaaacaaacagttgctgctacagggagaattagctcaacagagcctaatctgcagaacatacctgtaagagaagaatttggcaggaggataagaaaggcatttgtatcaagttatgaagatgggcttataatatctgctgattattctcagattgagctaagggttcttgcacatctttcagaggatgaaaaacttattgagtcatttttgaacaacgaagatatacatttaaggacggcatcggaggtttttaaggtttcgaaagaagaagtgacaagtgaaatgagaaggcgggcgaaagctgtcaactttggtattgtatatggtataagcgattacggcttatctaaagacttaaagatttcgcgaaaagaagcgaaagaatacatagacaattattttgacaggtacaagggcgtcaaaaattacatcgactcaattgtcaaatttgcaaaggaaaatgggtatgttacgactatcttaaataggagaagatacataccggaaatcaattcaaaaaattttaaccaaagagattttggcgagagaatggcaatgaatacacctattcaaggtagcgctgcggatataataaagatgtcgatggttaaagtatacaatgaattaaaggaaagaggattgaaatcaagacttattcttcaggtgcacgatgagcttataattgacacacatcctgatgaagttgaaatagtcaaggagcttctaaaatcaataatggaaaatatcataaagttgaaagttcctttagttgtagatatagggcaagggaaaaactggtatgatgcaaaataaaaggatcc

SEQ ID NO: 839 - DNA, 2678 bp, Artificial Sequence
  Description of Artificial Sequence: Synthetic Clostridium thermosulfurogenes DNA Polymerase S798C
atgaaatacctgctgccgaccgctgctgctggtctgctgctcctcgctgcccagccggcgatggccatggcgaaatttttgatcatagatggtaatagcttgatgtacagggcgtattttgccctgcctgatttgatgaacagcgaaggaatgcatacaaatgccatatacggtttttcaatgatgcttcttaaattgctggaggaggagaaaccagactacatagcaatagctttcgataaaaaggcttctacatttaggcacaaggagtacagtgcttataaaggaacccgccagtcgatgccagaagagctgatagaacaggtggatattttaaaagatgtgataaatgcatttaacataaagaccatcgagatagagggatttgaagcagatgatatcattggtacagtatcaaaaattgcttccgaaagtgggatggatgtgcttatcgtcacaggcgacagagatgcgcttcagcttgtgtcggcaaatgtaaaagtaaaaatatgtaaaaaaggcataacgcagatggatgagtacgatgaaaaggcggtctttgaaaagtatgaagtgacgccgcttcaattcatagacttgaaagggcttatgggagacaaatcagacaacattccaggagtgcccaatataggggagaagacggccataaagcttgttaaagaatttggatcaattgaaaatttactgatgaatacagataagttaaaagggaaaataaaagaaaatgtagaaaacaatgcagaattagctgttttaagcaaacggcttgctacgattgagagaaatgttcctattgatattgatttgaatgaatacgcggttaaaaattacgatgtcaataagcttacagagctatttgaaaaattggaattttcaagcctcatctcagatttaaaagatgatagtcgtgatacaaaggatattaaagaatggcctgtaagagattttacatacgttaaaaatgttttaggaaagtttgatgttttgtcattgtatccattcatatatgatggaaagataaaagcagtatcatttgcttgcggtgacggatcgttttttgtagagattgatgattatgacaattttaaattgcttaataatgataagcttacgttgataggacacgatctgaaagattttttagtaaacatttcatactgcggtattgaacttaattgtaagattttagatacggccataatgacttatcttttaaatccgtctgagtcgaattacgacataagtcgcgtattgaaaaaatacttgaaagaggatttgcaaaacatagatgatatagtaggcaagggcaggaataaaaagagctacgatgacattgacaaaaagcttttagtcgattatatgtgttcagccgcatcaaacttatctaagttaaaagataagctcatgtcatttataaaagagatggagatggaagatcttttaaaaaatgtggaaattccgcttattgaagtgctaaaatctatggaggtgtacggctttacattagataaagatgtacttagaagtatttctaaagaaatagatgaaaagacagataagattgtaaaagatatttacgatgctgctggatacgaatttaatattaactctacaaagcagttatcagaatttttgtttgataaactgaatttgccagcaataaaaaagactaaaacagggtattcgactgacatggaagtccttgcagaacttataccgtacaatgacatagtaggagaaataatagaatatagacagcttatgaagcttaaatctacgtacatagatggcttcattcccatcatggatgaaaataatagggtccactctacgtttaaacaaacagttgctgctacagggagaattagctcaacagagcctaatctgcagaacatacctgtaagagaagaatttggcaggaggataagaaaggcatttgtatcaagttatgaagatgggcttataatatctgctgattattctcagattgagctaagggttcttgcacatctttcagaggatgaaaaacttattgagtcatttttgaacaacgaagatatacatttaaggacggcatcggaggtttttaaggtttcgaaagaagaagtgacaagtgaaatgagaaggcgggcgaaagctgtcaactttggtattgtatatggtataagcgattacggcttatctaaagacttaaagatttcgcgaaaagaagcgaaagaatacatagacaattattttgacaggtacaagggcgtcaaaaattacatcgactcaattgtcaaatttgcaaaggaaaatgggtatgttacgactatcttaaataggagaagatacataccggaaatcaattcaaaaaattttaaccaaagatgttttggcgagagaatggcaatgaatacacctattcaaggtagcgctgcggatataataaagatgtcgatggttaaagtatacaatgaattaaaggaaagaggattgaaatcaagacttattcttcaggtgcacgatgagcttataattgacacacatcctgatgaagttgaaatagtcaaggagcttctaaaatcaataatggaaaatatcataaagttgaaagttcctttagttgtagatatagggcaagggaaaaactggtatgatgcaaaataaaaggatcc

SEQ ID NO: 840 - DNA, 2678 bp, Artificial Sequence
  Description of Artificial Sequence: Synthetic Clostridium thermosulfurogenes DNA Polymerase S798E
atgaaatacctgctgccgaccgctgctgctggtctgctgctcctcgctgcccagccggcgatggccatggcgaaatttttgatcatagatggtaatagcttgatgtacagggcgtattttgccctgcctgatttgatgaacagcgaaggaatgcatacaaatgccatatacggtttttcaatgatgcttcttaaattgctggaggaggagaaaccagactacatagcaatagctttcgataaaaaggcttctacatttaggcacaaggagtacagtgcttataaaggaacccgccagtcgatgccagaagagctgatagaacaggtggatattttaaaagatgtgataaatgcatttaacataaagaccatcgagatagagggatttgaagcagatgatatcattggtacagtatcaaaaattgcttccgaaagtgggatggatgtgcttatcgtcacaggcgacagagatgcgcttcagcttgtgtcggcaaatgtaaaagtaaaaatatgtaaaaaaggcataacgcagatggatgagtacgatgaaaaggcggtctttgaaaagtatgaagtgacgccgcttcaattcatagacttgaaagggcttatgggagacaaatcagacaacattccaggagtgcccaatataggggagaagacggccataaagcttgttaaagaatttggatcaattgaaaatttactgatgaatacagataagttaaaagggaaaataaaagaaaatgtagaaaacaatgcagaattagctgttttaagcaaacggcttgctacgattgagagaaatgttcctattgatattgatttgaatgaatacgcggttaaaaattacgatgtcaataagcttacagagctatttgaaaaattggaattttcaagcctcatctcagatttaaaagatgatagtcgtgatacaaaggatattaaagaatggcctgtaagagattttacatacgttaaaaatgttttaggaaagtttgatgttttgtcattgtatccattcatatatgatggaaagataaaagcagtatcatttgcttgcggtgacggatcgttttttgtagagattgatgattatgacaattttaaattgcttaataatgataagcttacgttgataggacacgatctgaaagattttttagtaaacatttcatactgcggtattgaacttaattgtaagattttagatacggccataatgacttatcttttaaatccgtctgagtcgaattacgacataagtcgcgtattgaaaaaatacttgaaagaggatttgcaaaacatagatgatatagtaggcaagggcaggaataaaaagagctacgatgacattgacaaaaagcttttagtcgattatatgtgttcagccgcatcaaacttatctaagttaaaagataagctcatgtcatttataaaagagatggagatggaagatcttttaaaaaatgtggaaattccgcttattgaagtgctaaaatctatggaggtgtacggctttacattagataaagatgtacttagaagtatttctaaagaaatagatgaaaagacagataagattgtaaaagatatttacgatgctgctggatacgaatttaatattaactctacaaagcagttatcagaatttttgtttgataaactgaatttgccagcaataaaaaagactaaaacagggtattcgactgacatggaagtccttgcagaacttataccgtacaatgacatagtaggagaaataatagaatatagacagcttatgaagcttaaatctacgtacatagatggcttcattcccatcatggatgaaaataatagggtccactctacgtttaaacaaacagttgctgctacagggagaattagctcaacagagcctaatctgcagaacatacctgtaagagaagaatttggcaggaggataagaaaggcatttgtatcaagttatgaagatgggcttataatatctgctgattattctcagattgagctaagggttcttgcacatctttcagaggatgaaaaacttattgagtcatttttgaacaacgaagatatacatttaaggacggcatcggaggtttttaaggtttcgaaagaagaagtgacaagtgaaatgagaaggcgggcgaaagctgtcaactttggtattgtatatggtataagcgattacggcttatctaaagacttaaagatttcgcgaaaagaagcgaaagaatacatagacaattattttgacaggtacaagggcgtcaaaaattacatcgactcaattgtcaaatttgcaaaggaaaatgggtatgttacgactatcttaaataggagaagatacataccggaaatcaattcaaaaaattttaaccaaagagaatttggcgagagaatggcaatgaatacacctattcaaggtagcgctgcggatataataaagatgtcgatggttaaagtatacaatgaattaaaggaaagaggattgaaatcaagacttattcttcaggtgcacgatgagcttataattgacacacatcctgatgaagttgaaatagtcaaggagcttctaaaatcaataatggaaaatatcataaagttgaaagttcctttagttgtagatatagggcaagggaaaaactggtatgatgcaaaataaaaggatcc

SEQ ID NO: 841 - DNA, 2678 bp, Artificial Sequence
  Description of Artificial Sequence: Synthetic Clostridium thermosulfurogenes DNA Polymerase S798Q
atgaaatacctgctgccgaccgctgctgctggtctgctgctcctcgctgcccagccggcgatggccatggcgaaatttttgatcatagatggtaatagcttgatgtacagggcgtattttgccctgcctgatttgatgaacagcgaaggaatgcatacaaatgccatatacggtttttcaatgatgcttcttaaattgctggaggaggagaaaccagactacatagcaatagctttcgataaaaaggcttctacatttaggcacaaggagtacagtgcttataaaggaacccgccagtcgatgccagaagagctgatagaacaggtggatattttaaaagatgtgataaatgcatttaacataaagaccatcgagatagagggatttgaagcagatgatatcattggtacagtatcaaaaattgcttccgaaagtgggatggatgtgcttatcgtcacaggcgacagagatgcgcttcagcttgtgtcggcaaatgtaaaagtaaaaatatgtaaaaaaggcataacgcagatggatgagtacgatgaaaaggcggtctttgaaaagtatgaagtgacgccgcttcaattcatagacttgaaagggcttatgggagacaaatcagacaacattccaggagtgcccaatataggggagaagacggccataaagcttgttaaagaatttggatcaattgaaaatttactgatgaatacagataagttaaaagggaaaataaaagaaaatgtagaaaacaatgcagaattagctgttttaagcaaacggcttgctacgattgagagaaatgttcctattgatattgatttgaatgaatacgcggttaaaaattacgatgtcaataagcttacagagctatttgaaaaattggaattttcaagcctcatctcagatttaaaagatgatagtcgtgatacaaaggatattaaagaatggcctgtaagagattttacatacgttaaaaatgttttaggaaagtttgatgttttgtcattgtatccattcatatatgatggaaagataaaagcagtatcatttgcttgcggtgacggatcgttttttgtagagattgatgattatgacaattttaaattgcttaataatgataagcttacgttgataggacacgatctgaaagattttttagtaaacatttcatactgcggtattgaacttaattgtaagattttagatacggccataatgacttatcttttaaatccgtctgagtcgaattacgacataagtcgcgtattgaaaaaatacttgaaagaggatttgcaaaacatagatgatatagtaggcaagggcaggaataaaaagagctacgatgacattgacaaaaagcttttagtcgattatatgtgttcagccgcatcaaacttatctaagttaaaagataagctcatgtcatttataaaagagatggagatggaagatcttttaaaaaatgtggaaattccgcttattgaagtgctaaaatctatggaggtgtacggctttacattagataaagatgtacttagaagtatttctaaagaaatagatgaaaagacagataagattgtaaaagatatttacgatgctgctggatacgaatttaatattaactctacaaagcagttatcagaatttttgtttgataaactgaatttgccagcaataaaaaagactaaaacagggtattcgactgacatggaagtccttgcagaacttataccgtacaatgacatagtaggagaaataatagaatatagacagcttatgaagcttaaatctacgtacatagatggcttcattcccatcatggatgaaaataatagggtccactctacgtttaaacaaacagttgctgctacagggagaattagctcaacagagcctaatctgcagaacatacctgtaagagaagaatttggcaggaggataagaaaggcatttgtatcaagttatgaagatgggcttataatatctgctgattattctcagattgagctaagggttcttgcacatctttcagaggatgaaaaacttattgagtcatttttgaacaacgaagatatacatttaaggacggcatcggaggtttttaaggtttcgaaagaagaagtgacaagtgaaatgagaaggcgggcgaaagctgtcaactttggtattgtatatggtataagcgattacggcttatctaaagacttaaagatttcgcgaaaagaagcgaaagaatacatagacaattattttgacaggtacaagggcgtcaaaaattacatcgactcaattgtcaaatttgcaaaggaaaatgggtatgttacgactatcttaaataggagaagatacataccggaaatcaattcaaaaaattttaaccaaagacaatttggcgagagaatggcaatgaatacacctattcaaggtagcgctgcggatataataaagatgtcgatggttaaagtatacaatgaattaaaggaaagaggattgaaatcaagacttattcttcaggtgcacgatgagcttataattgacacacatcctgatgaagttgaaatagtcaaggagcttctaaaatcaataatggaaaatatcataaagttgaaagttcctttagttgtagatatagggcaagggaaaaactggtatgatgcaaaataaaaggatcc

SEQ ID NO: 842 - DNA, 2678 bp, Artificial Sequence
  Description of Artificial Sequence: Synthetic Clostridium thermosulfurogenes DNA Polymerase S798G
atgaaatacctgctgccgaccgctgctgctggtctgctgctcctcgctgcccagccggcgatggccatggcgaaatttttgatcatagatggtaatagcttgatgtacagggcgtattttgccctgcctgatttgatgaacagcgaaggaatgcatacaaatgccatatacggtttttcaatgatgcttcttaaattgctggaggaggagaaaccagactacatagcaatagctttcgataaaaaggcttctacatttaggcacaaggagtacagtgcttataaaggaacccgccagtcgatgccagaagagctgatagaacaggtggatattttaaaagatgtgataaatgcatttaacataaagaccatcgagatagagggatttgaagcagatgatatcattggtacagtatcaaaaattgcttccgaaagtgggatggatgtgcttatcgtcacaggcgacagagatgcgcttcagcttgtgtcggcaaatgtaaaagtaaaaatatgtaaaaaaggcataacgcagatggatgagtacgatgaaaaggcggtctttgaaaagtatgaagtgacgccgcttcaattcatagacttgaaagggcttatgggagacaaatcagacaacattccaggagtgcccaatataggggagaagacggccataaagcttgttaaagaatttggatcaattgaaaatttactgatgaatacagataagttaaaagggaaaataaaagaaaatgtagaaaacaatgcagaattagctgttttaagcaaacggcttgctacgattgagagaaatgttcctattgatattgatttgaatgaatacgcggttaaaaattacgatgtcaataagcttacagagctatttgaaaaattggaattttcaagcctcatctcagatttaaaagatgatagtcgtgatacaaaggatattaaagaatggcctgtaagagattttacatacgttaaaaatgttttaggaaagtttgatgttttgtcattgtatccattcatatatgatggaaagataaaagcagtatcatttgcttgcggtgacggatcgttttttgtagagattgatgattatgacaattttaaattgcttaataatgataagcttacgttgataggacacgatctgaaagattttttagtaaacatttcatactgcggtattgaacttaattgtaagattttagatacggccataatgacttatcttttaaatccgtctgagtcgaattacgacataagtcgcgtattgaaaaaatacttgaaagaggatttgcaaaacatagatgatatagtaggcaagggcaggaataaaaagagctacgatgacattgacaaaaagcttttagtcgattatatgtgttcagccgcatcaaacttatctaagttaaaagataagctcatgtcatttataaaagagatggagatggaagatcttttaaaaaatgtggaaattccgcttattgaagtgctaaaatctatggaggtgtacggctttacattagataaagatgtacttagaagtatttctaaagaaatagatgaaaagacagataagattgtaaaagatatttacgatgctgctggatacgaatttaatattaactctacaaagcagttatcagaatttttgtttgataaactgaatttgccagcaataaaaaagactaaaacagggtattcgactgacatggaagtccttgcagaacttataccgtacaatgacatagtaggagaaataatagaatatagacagcttatgaagcttaaatctacgtacatagatggcttcattcccatcatggatgaaaataatagggtccactctacgtttaaacaaacagttgctgctacagggagaattagctcaacagagcctaatctgcagaacatacctgtaagagaagaatttggcaggaggataagaaaggcatttgtatcaagttatgaagatgggcttataatatctgctgattattctcagattgagctaagggttcttgcacatctttcagaggatgaaaaacttattgagtcatttttgaacaacgaagatatacatttaaggacggcatcggaggtttttaaggtttcgaaagaagaagtgacaagtgaaatgagaaggcgggcgaaagctgtcaactttggtattgtatatggtataagcgattacggcttatctaaagacttaaagatttcgcgaaaagaagcgaaagaatacatagacaattattttgacaggtacaagggcgtcaaaaattacatcgactcaattgtcaaatttgcaaaggaaaatgggtatgttacgactatcttaaataggagaagatacataccggaaatcaattcaaaaaattttaaccaaagaggttttggcgagagaatggcaatgaatacacctattcaaggtagcgctgcggatataataaagatgtcgatggttaaagtatacaatgaattaaaggaaagaggattgaaatcaagacttattcttcaggtgcacgatgagcttataattgacacacatcctgatgaagttgaaatagtcaaggagcttctaaaatcaataatggaaaatatcataaagttgaaagttcctttagttgtagatatagggcaagggaaaaactggtatgatgcaaaataaaaggatcc

SEQ ID NO: 843 - DNA, 2678 bp, Artificial Sequence
  Description of Artificial Sequence: Synthetic Clostridium thermosulfurogenes DNA Polymerase S798H
atgaaatacctgctgccgaccgctgctgctggtctgctgctcctcgctgcccagccggcgatggccatggcgaaatttttgatcatagatggtaatagcttgatgtacagggcgtattttgccctgcctgatttgatgaacagcgaaggaatgcatacaaatgccatatacggtttttcaatgatgcttcttaaattgctggaggaggagaaaccagactacatagcaatagctttcgataaaaaggcttctacatttaggcacaaggagtacagtgcttataaaggaacccgccagtcgatgccagaagagctgatagaacaggtggatattttaaaagatgtgataaatgcatttaacataaagaccatcgagatagagggatttgaagcagatgatatcattggtacagtatcaaaaattgcttccgaaagtgggatggatgtgcttatcgtcacaggcgacagagatgcgcttcagcttgtgtcggcaaatgtaaaagtaaaaatatgtaaaaaaggcataacgcagatggatgagtacgatgaaaaggcggtctttgaaaagtatgaagtgacgccgcttcaattcatagacttgaaagggcttatgggagacaaatcagacaacattccaggagtgcccaatataggggagaagacggccataaagcttgttaaagaatttggatcaattgaaaatttactgatgaatacagataagttaaaagggaaaataaaagaaaatgtagaaaacaatgcagaattagctgttttaagcaaacggcttgctacgattgagagaaatgttcctattgatattgatttgaatgaatacgcggttaaaaattacgatgtcaataagcttacagagctatttgaaaaattggaattttcaagcctcatctcagatttaaaagatgatagtcgtgatacaaaggatattaaagaatggcctgtaagagattttacatacgttaaaaatgttttaggaaagtttgatgttttgtcattgtatccattcatatatgatggaaagataaaagcagtatcatttgcttgcggtgacggatcgttttttgtagagattgatgattatgacaattttaaattgcttaataatgataagcttacgttgataggacacgatctgaaagattttttagtaaacatttcatactgcggtattgaacttaattgtaagattttagatacggccataatgacttatcttttaaatccgtctgagtcgaattacgacataagtcgcgtattgaaaaaatacttgaaagaggatttgcaaaacatagatgatatagtaggcaagggcaggaataaaaagagctacgatgacattgacaaaaagcttttagtcgattatatgtgttcagccgcatcaaacttatctaagttaaaagataagctcatgtcatttataaaagagatggagatggaagatcttttaaaaaatgtggaaattccgcttattgaagtgctaaaatctatggaggtgtacggctttacattagataaagatgtacttagaagtatttctaaagaaatagatgaaaagacagataagattgtaaaagatatttacgatgctgctggatacgaatttaatattaactctacaaagcagttatcagaatttttgtttgataaactgaatttgccagcaataaaaaagactaaaacagggtattcgactgacatggaagtccttgcagaacttataccgtacaatgacatagtaggagaaataatagaatatagacagcttatgaagcttaaatctacgtacatagatggcttcattcccatcatggatgaaaataatagggtccactctacgtttaaacaaacagttgctgctacagggagaattagctcaacagagcctaatctgcagaacatacctgtaagagaagaatttggcaggaggataagaaaggcatttgtatcaagttatgaagatgggcttataatatctgctgattattctcagattgagctaagggttcttgcacatctttcagaggatgaaaaacttattgagtcatttttgaacaacgaagatatacatttaaggacggcatcggaggtttttaaggtttcgaaagaagaagtgacaagtgaaatgagaaggcgggcgaaagctgtcaactttggtattgtatatggtataagcgattacggcttatctaaagacttaaagatttcgcgaaaagaagcgaaagaatacatagacaattattttgacaggtacaagggcgtcaaaaattacatcgactcaattgtcaaatttgcaaaggaaaatgggtatgttacgactatcttaaataggagaagatacataccggaaatcaattcaaaaaattttaaccaaagacattttggcgagagaatggcaatgaatacacctattcaaggtagcgctgcggatataataaagatgtcgatggttaaagtatacaatgaattaaaggaaagaggattgaaatcaagacttattcttcaggtgcacgatgagcttataattgacacacatcctgatgaagttgaaatagtcaaggagcttctaaaatcaataatggaaaatatcataaagttgaaagttcctttagttgtagatatagggcaagggaaaaactggtatgatgcaaaataaaaggatcc

SEQ ID NO: 844 - DNA, 2678 bp, Artificial Sequence
  Description of Artificial Sequence: Synthetic Clostridium thermosulfurogenes DNA Polymerase S798I
atgaaatacctgctgccgaccgctgctgctggtctgctgctcctcgctgcccagccggcgatggccatggcgaaatttttgatcatagatggtaatagcttgatgtacagggcgtattttgccctgcctgatttgatgaacagcgaaggaatgcatacaaatgccatatacggtttttcaatgatgcttcttaaattgctggaggaggagaaaccagactacatagcaatagctttcgataaaaaggcttctacatttaggcacaaggagtacagtgcttataaaggaacccgccagtcgatgccagaagagctgatagaacaggtggatattttaaaagatgtgataaatgcatttaacataaagaccatcgagatagagggatttgaagcagatgatatcattggtacagtatcaaaaattgcttccgaaagtgggatggatgtgcttatcgtcacaggcgacagagatgcgcttcagcttgtgtcggcaaatgtaaaagtaaaaatatgtaaaaaaggcataacgcagatggatgagtacgatgaaaaggcggtctttgaaaagtatgaagtgacgccgcttcaattcatagacttgaaagggcttatgggagacaaatcagacaacattccaggagtgcccaatataggggagaagacggccataaagcttgttaaagaatttggatcaattgaaaatttactgatgaatacagataagttaaaagggaaaataaaagaaaatgtagaaaacaatgcagaattagctgttttaagcaaacggcttgctacgattgagagaaatgttcctattgatattgatttgaatgaatacgcggttaaaaattacgatgtcaataagcttacagagctatttgaaaaattggaattttcaagcctcatctcagatttaaaagatgatagtcgtgatacaaaggatattaaagaatggcctgtaagagattttacatacgttaaaaatgttttaggaaagtttgatgttttgtcattgtatccattcatatatgatggaaagataaaagcagtatcatttgcttgcggtgacggatcgttttttgtagagattgatgattatgacaattttaaattgcttaataatgataagcttacgttgataggacacgatctgaaagattttttagtaaacatttcatactgcggtattgaacttaattgtaagattttagatacggccataatgacttatcttttaaatccgtctgagtcgaattacgacataagtcgcgtattgaaaaaatacttgaaagaggatttgcaaaacatagatgatatagtaggcaagggcaggaataaaaagagctacgatgacattgacaaaaagcttttagtcgattatatgtgttcagccgcatcaaacttatctaagttaaaagataagctcatgtcatttataaaagagatggagatggaagatcttttaaaaaatgtggaaattccgcttattgaagtgctaaaatctatggaggtgtacggctttacattagataaagatgtacttagaagtatttctaaagaaatagatgaaaagacagataagattgtaaaagatatttacgatgctgctggatacgaatttaatattaactctacaaagcagttatcagaatttttgtttgataaactgaatttgccagcaataaaaaagactaaaacagggtattcgactgacatggaagtccttgcagaacttataccgtacaatgacatagtaggagaaataatagaatatagacagcttatgaagcttaaatctacgtacatagatggcttcattcccatcatggatgaaaataatagggtccactctacgtttaaacaaacagttgctgctacagggagaattagctcaacagagcctaatctgcagaacatacctgtaagagaagaatttggcaggaggataagaaaggcatttgtatcaagttatgaagatgggcttataatatctgctgattattctcagattgagctaagggttcttgcacatctttcagaggatgaaaaacttattgagtcatttttgaacaacgaagatatacatttaaggacggcatcggaggtttttaaggtttcgaaagaagaagtgacaagtgaaatgagaaggcgggcgaaagctgtcaactttggtattgtatatggtataagcgattacggcttatctaaagacttaaagatttcgcgaaaagaagcgaaagaatacatagacaattattttgacaggtacaagggcgtcaaaaattacatcgactcaattgtcaaatttgcaaaggaaaatgggtatgttacgactatcttaaataggagaagatacataccggaaatcaattcaaaaaattttaaccaaagaatttttggcgagagaatggcaatgaatacacctattcaaggtagcgctgcggatataataaagatgtcgatggttaaagtatacaatgaattaaaggaaagaggattgaaatcaagacttattcttcaggtgcacgatgagcttataattgacacacatcctgatgaagttgaaatagtcaaggagcttctaaaatcaataatggaaaatatcataaagttgaaagttcctttagttgtagatatagggcaagggaaaaactggtatgatgcaaaataaaaggatcc

SEQ ID NO: 845 - DNA, 2678 bp, Artificial Sequence
  Description of Artificial Sequence: Synthetic Clostridium thermosulfurogenes DNA Polymerase S798L
atgaaatacctgctgccgaccgctgctgctggtctgctgctcctcgctgcccagccggcgatggccatggcgaaatttttgatcatagatggtaatagcttgatgtacagggcgtattttgccctgcctgatttgatgaacagcgaaggaatgcatacaaatgccatatacggtttttcaatgatgcttcttaaattgctggaggaggagaaaccagactacatagcaatagctttcgataaaaaggcttctacatttaggcacaaggagtacagtgcttataaaggaacccgccagtcgatgccagaagagctgatagaacaggtggatattttaaaagatgtgataaatgcatttaacataaagaccatcgagatagagggatttgaagcagatgatatcattggtacagtatcaaaaattgcttccgaaagtgggatggatgtgcttatcgtcacaggcgacagagatgcgcttcagcttgtgtcggcaaatgtaaaagtaaaaatatgtaaaaaaggcataacgcagatggatgagtacgatgaaaaggcggtctttgaaaagtatgaagtgacgccgcttcaattcatagacttgaaagggcttatgggagacaaatcagacaacattccaggagtgcccaatataggggagaagacggccataaagcttgttaaagaatttggatcaattgaaaatttactgatgaatacagataagttaaaagggaaaataaaagaaaatgtagaaaacaatgcagaattagctgttttaagcaaacggcttgctacgattgagagaaatgttcctattgatattgatttgaatgaatacgcggttaaaaattacgatgtcaataagcttacagagctatttgaaaaattggaattttcaagcctcatctcagatttaaaagatgatagtcgtgatacaaaggatattaaagaatggcctgtaagagattttacatacgttaaaaatgttttaggaaagtttgatgttttgtcattgtatccattcatatatgatggaaagataaaagcagtatcatttgcttgcggtgacggatcgttttttgtagagattgatgattatgacaattttaaattgcttaataatgataagcttacgttgataggacacgatctgaaagattttttagtaaacatttcatactgcggtattgaacttaattgtaagattttagatacggccataatgacttatcttttaaatccgtctgagtcgaattacgacataagtcgcgtattgaaaaaatacttgaaagaggatttgcaaaacatagatgatatagtaggcaagggcaggaataaaaagagctacgatgacattgacaaaaagcttttagtcgattatatgtgttcagccgcatcaaacttatctaagttaaaagataagctcatgtcatttataaaagagatggagatggaagatcttttaaaaaatgtggaaattccgcttattgaagtgctaaaatctatggaggtgtacggctttacattagataaagatgtacttagaagtatttctaaagaaatagatgaaaagacagataagattgtaaaagatatttacgatgctgctggatacgaatttaatattaactctacaaagcagttatcagaatttttgtttgataaactgaatttgccagcaataaaaaagactaaaacagggtattcgactgacatggaagtccttgcagaacttataccgtacaatgacatagtaggagaaataatagaatatagacagcttatgaagcttaaatctacgtacatagatggcttcattcccatcatggatgaaaataatagggtccactctacgtttaaacaaacagttgctgctacagggagaattagctcaacagagcctaatctgcagaacatacctgtaagagaagaatttggcaggaggataagaaaggcatttgtatcaagttatgaagatgggcttataatatctgctgattattctcagattgagctaagggttcttgcacatctttcagaggatgaaaaacttattgagtcatttttgaacaacgaagatatacatttaaggacggcatcggaggtttttaaggtttcgaaagaagaagtgacaagtgaaatgagaaggcgggcgaaagctgtcaactttggtattgtatatggtataagcgattacggcttatctaaagacttaaagatttcgcgaaaagaagcgaaagaatacatagacaattattttgacaggtacaagggcgtcaaaaattacatcgactcaattgtcaaatttgcaaaggaaaatgggtatgttacgactatcttaaataggagaagatacataccggaaatcaattcaaaaaattttaaccaaagactttttggcgagagaatggcaatgaatacacctattcaaggtagcgctgcggatataataaagatgtcgatggttaaagtatacaatgaattaaaggaaagaggattgaaatcaagacttattcttcaggtgcacgatgagcttataattgacacacatcctgatgaagttgaaatagtcaaggagcttctaaaatcaataatggaaaatatcataaagttgaaagttcctttagttgtagatatagggcaagggaaaaactggtatgatgcaaaataaaaggatcc

SEQ ID NO: 846 - DNA, 2678 bp, Artificial Sequence
  Description of Artificial Sequence: Synthetic Clostridium thermosulfurogenes DNA Polymerase S798K
atgaaatacctgctgccgaccgctgctgctggtctgctgctcctcgctgcccagccggcgatggccatggcgaaatttttgatcatagatggtaatagcttgatgtacagggcgtattttgccctgcctgatttgatgaacagcgaaggaatgcatacaaatgccatatacggtttttcaatgatgcttcttaaattgctggaggaggagaaaccagactacatagcaatagctttcgataaaaaggcttctacatttaggcacaaggagtacagtgcttataaaggaacccgccagtcgatgccagaagagctgatagaacaggtggatattttaaaagatgtgataaatgcatttaacataaagaccatcgagatagagggatttgaagcagatgatatcattggtacagtatcaaaaattgcttccgaaagtgggatggatgtgcttatcgtcacaggcgacagagatgcgcttcagcttgtgtcggcaaatgtaaaagtaaaaatatgtaaaaaaggcataacgcagatggatgagtacgatgaaaaggcggtctttgaaaagtatgaagtgacgccgcttcaattcatagacttgaaagggcttatgggagacaaatcagacaacattccaggagtgcccaatataggggagaagacggccataaagcttgttaaagaatttggatcaattgaaaatttactgatgaatacagataagttaaaagggaaaataaaagaaaatgtagaaaacaatgcagaattagctgttttaagcaaacggcttgctacgattgagagaaatgttcctattgatattgatttgaatgaatacgcggttaaaaattacgatgtcaataagcttacagagctatttgaaaaattggaattttcaagcctcatctcagatttaaaagatgatagtcgtgatacaaaggatattaaagaatggcctgtaagagattttacatacgttaaaaatgttttaggaaagtttgatgttttgtcattgtatccattcatatatgatggaaagataaaagcagtatcatttgcttgcggtgacggatcgttttttgtagagattgatgattatgacaattttaaattgcttaataatgataagcttacgttgataggacacgatctgaaagattttttagtaaacatttcatactgcggtattgaacttaattgtaagattttagatacggccataatgacttatcttttaaatccgtctgagtcgaattacgacataagtcgcgtattgaaaaaatacttgaaagaggatttgcaaaacatagatgatatagtaggcaagggcaggaataaaaagagctacgatgacattgacaaaaagcttttagtcgattatatgtgttcagccgcatcaaacttatctaagttaaaagataagctcatgtcatttataaaagagatggagatggaagatcttttaaaaaatgtggaaattccgcttattgaagtgctaaaatctatggaggtgtacggctttacattagataaagatgtacttagaagtatttctaaagaaatagatgaaaagacagataagattgtaaaagatatttacgatgctgctggatacgaatttaatattaactctacaaagcagttatcagaatttttgtttgataaactgaatttgccagcaataaaaaagactaaaacagggtattcgactgacatggaagtccttgcagaacttataccgtacaatgacatagtaggagaaataatagaatatagacagcttatgaagcttaaatctacgtacatagatggcttcattcccatcatggatgaaaataatagggtccactctacgtttaaacaaacagttgctgctacagggagaattagctcaacagagcctaatctgcagaacatacctgtaagagaagaatttggcaggaggataagaaaggcatttgtatcaagttatgaagatgggcttataatatctgctgattattctcagattgagctaagggttcttgcacatctttcagaggatgaaaaacttattgagtcatttttgaacaacgaagatatacatttaaggacggcatcggaggtttttaaggtttcgaaagaagaagtgacaagtgaaatgagaaggcgggcgaaagctgtcaactttggtattgtatatggtataagcgattacggcttatctaaagacttaaagatttcgcgaaaagaagcgaaagaatacatagacaattattttgacaggtacaagggcgtcaaaaattacatcgactcaattgtcaaatttgcaaaggaaaatgggtatgttacgactatcttaaataggagaagatacataccggaaatcaattcaaaaaattttaaccaaagaaaatttggcgagagaatggcaatgaatacacctattcaaggtagcgctgcggatataataaagatgtcgatggttaaagtatacaatgaattaaaggaaagaggattgaaatcaagacttattcttcaggtgcacgatgagcttataattgacacacatcctgatgaagttgaaatagtcaaggagcttctaaaatcaataatggaaaatatcataaagttgaaagttcctttagttgtagatatagggcaagggaaaaactggtatgatgcaaaataaaaggatcc

SEQ ID NO: 847 - DNA, 2678 bp, Artificial Sequence
  Description of Artificial Sequence: Synthetic Clostridium thermosulfurogenes DNA Polymerase S798M
atgaaatacctgctgccgaccgctgctgctggtctgctgctcctcgctgcccagccggcgatggccatggcgaaatttttgatcatagatggtaatagcttgatgtacagggcgtattttgccctgcctgatttgatgaacagcgaaggaatgcatacaaatgccatatacggtttttcaatgatgcttcttaaattgctggaggaggagaaaccagactacatagcaatagctttcgataaaaaggcttctacatttaggcacaaggagtacagtgcttataaaggaacccgccagtcgatgccagaagagctgatagaacaggtggatattttaaaagatgtgataaatgcatttaacataaagaccatcgagatagagggatttgaagcagatgatatcattggtacagtatcaaaaattgcttccgaaagtgggatggatgtgcttatcgtcacaggcgacagagatgcgcttcagcttgtgtcggcaaatgtaaaagtaaaaatatgtaaaaaaggcataacgcagatggatgagtacgatgaaaaggcggtctttgaaaagtatgaagtgacgccgcttcaattcatagacttgaaagggcttatgggagacaaatcagacaacattccaggagtgcccaatataggggagaagacggccataaagcttgttaaagaatttggatcaattgaaaatttactgatgaatacagataagttaaaagggaaaataaaagaaaatgtagaaaacaatgcagaattagctgttttaagcaaacggcttgctacgattgagagaaatgttcctattgatattgatttgaatgaatacgcggttaaaaattacgatgtcaataagcttacagagctatttgaaaaattggaattttcaagcctcatctcagatttaaaagatgatagtcgtgatacaaaggatattaaagaatggcctgtaagagattttacatacgttaaaaatgttttaggaaagtttgatgttttgtcattgtatccattcatatatgatggaaagataaaagcagtatcatttgcttgcggtgacggatcgttttttgtagagattgatgattatgacaattttaaattgcttaataatgataagcttacgttgataggacacgatctgaaagattttttagtaaacatttcatactgcggtattgaacttaattgtaagattttagatacggccataatgacttatcttttaaatccgtctgagtcgaattacgacataagtcgcgtattgaaaaaatacttgaaagaggatttgcaaaacatagatgatatagtaggcaagggcaggaataaaaagagctacgatgacattgacaaaaagcttttagtcgattatatgtgttcagccgcatcaaacttatctaagttaaaagataagctcatgtcatttataaaagagatggagatggaagatcttttaaaaaatgtggaaattccgcttattgaagtgctaaaatctatggaggtgtacggctttacattagataaagatgtacttagaagtatttctaaagaaatagatgaaaagacagataagattgtaaaagatatttacgatgctgctggatacgaatttaatattaactctacaaagcagttatcagaatttttgtttgataaactgaatttgccagcaataaaaaagactaaaacagggtattcgactgacatggaagtccttgcagaacttataccgtacaatgacatagtaggagaaataatagaatatagacagcttatgaagcttaaatctacgtacatagatggcttcattcccatcatggatgaaaataatagggtccactctacgtttaaacaaacagttgctgctacagggagaattagctcaacagagcctaatctgcagaacatacctgtaagagaagaatttggcaggaggataagaaaggcatttgtatcaagttatgaagatgggcttataatatctgctgattattctcagattgagctaagggttcttgcacatctttcagaggatgaaaaacttattgagtcatttttgaacaacgaagatatacatttaaggacggcatcggaggtttttaaggtttcgaaagaagaagtgacaagtgaaatgagaaggcgggcgaaagctgtcaactttggtattgtatatggtataagcgattacggcttatctaaagacttaaagatttcgcgaaaagaagcgaaagaatacatagacaattattttgacaggtacaagggcgtcaaaaattacatcgactcaattgtcaaatttgcaaaggaaaatgggtatgttacgactatcttaaataggagaagatacataccggaaatcaattcaaaaaattttaaccaaagaatgtttggcgagagaatggcaatgaatacacctattcaaggtagcgctgcggatataataaagatgtcgatggttaaagtatacaatgaattaaaggaaagaggattgaaatcaagacttattcttcaggtgcacgatgagcttataattgacacacatcctgatgaagttgaaatagtcaaggagcttctaaaatcaataatggaaaatatcataaagttgaaagttcctttagttgtagatatagggcaagggaaaaactggtatgatgcaaaataaaaggatcc

SEQ ID NO: 848 - DNA, 2678 bp, Artificial Sequence
  Description of Artificial Sequence: Synthetic Clostridium thermosulfurogenes DNA Polymerase S798F
atgaaatacctgctgccgaccgctgctgctggtctgctgctcctcgctgcccagccggcgatggccatggcgaaatttttgatcatagatggtaatagcttgatgtacagggcgtattttgccctgcctgatttgatgaacagcgaaggaatgcatacaaatgccatatacggtttttcaatgatgcttcttaaattgctggaggaggagaaaccagactacatagcaatagctttcgataaaaaggcttctacatttaggcacaaggagtacagtgcttataaaggaacccgccagtcgatgccagaagagctgatagaacaggtggatattttaaaagatgtgataaatgcatttaacataaagaccatcgagatagagggatttgaagcagatgatatcattggtacagtatcaaaaattgcttccgaaagtgggatggatgtgcttatcgtcacaggcgacagagatgcgcttcagcttgtgtcggcaaatgtaaaagtaaaaatatgtaaaaaaggcataacgcagatggatgagtacgatgaaaaggcggtctttgaaaagtatgaagtgacgccgcttcaattcatagacttgaaagggcttatgggagacaaatcagacaacattccaggagtgcccaatataggggagaagacggccataaagcttgttaaagaatttggatcaattgaaaatttactgatgaatacagataagttaaaagggaaaataaaagaaaatgtagaaaacaatgcagaattagctgttttaagcaaacggcttgctacgattgagagaaatgttcctattgatattgatttgaatgaatacgcggttaaaaattacgatgtcaataagcttacagagctatttgaaaaattggaattttcaagcctcatctcagatttaaaagatgatagtcgtgatacaaaggatattaaagaatggcctgtaagagattttacatacgttaaaaatgttttaggaaagtttgatgttttgtcattgtatccattcatatatgatggaaagataaaagcagtatcatttgcttgcggtgacggatcgttttttgtagagattgatgattatgacaattttaaattgcttaataatgataagcttacgttgataggacacgatctgaaagattttttagtaaacatttcatactgcggtattgaacttaattgtaagattttagatacggccataatgacttatcttttaaatccgtctgagtcgaattacgacataagtcgcgtattgaaaaaatacttgaaagaggatttgcaaaacatagatgatatagtaggcaagggcaggaataaaaagagctacgatgacattgacaaaaagcttttagtcgattatatgtgttcagccgcatcaaacttatctaagttaaaagataagctcatgtcatttataaaagagatggagatggaagatcttttaaaaaatgtggaaattccgcttattgaagtgctaaaatctatggaggtgtacggctttacattagataaagatgtacttagaagtatttctaaagaaatagatgaaaagacagataagattgtaaaagatatttacgatgctgctggatacgaatttaatattaactctacaaagcagttatcagaatttttgtttgataaactgaatttgccagcaataaaaaagactaaaacagggtattcgactgacatggaagtccttgcagaacttataccgtacaatgacatagtaggagaaataatagaatatagacagcttatgaagcttaaatctacgtacatagatggcttcattcccatcatggatgaaaataatagggtccactctacgtttaaacaaacagttgctgctacagggagaattagctcaacagagcctaatctgcagaacatacctgtaagagaagaatttggcaggaggataagaaaggcatttgtatcaagttatgaagatgggcttataatatctgctgattattctcagattgagctaagggttcttgcacatctttcagaggatgaaaaacttattgagtcatttttgaacaacgaagatatacatttaaggacggcatcggaggtttttaaggtttcgaaagaagaagtgacaagtgaaatgagaaggcgggcgaaagctgtcaactttggtattgtatatggtataagcgattacggcttatctaaagacttaaagatttcgcgaaaagaagcgaaagaatacatagacaattattttgacaggtacaagggcgtcaaaaattacatcgactcaattgtcaaatttgcaaaggaaaatgggtatgttacgactatcttaaataggagaagatacataccggaaatcaattcaaaaaattttaaccaaagattttttggcgagagaatggcaatgaatacacctattcaaggtagcgctgcggatataataaagatgtcgatggttaaagtatacaatgaattaaaggaaagaggattgaaatcaagacttattcttcaggtgcacgatgagcttataattgacacacatcctgatgaagttgaaatagtcaaggagcttctaaaatcaataatggaaaatatcataaagttgaaagttcctttagttgtagatatagggcaagggaaaaactggtatgatgcaaaataaaaggatcc

SEQ ID NO: 849 - DNA, 2678 bp, Artificial Sequence
  Description of Artificial Sequence: Synthetic Clostridium thermosulfurogenes DNA Polymerase S798P
atgaaatacctgctgccgaccgctgctgctggtctgctgctcctcgctgcccagccggcgatggccatggcgaaatttttgatcatagatggtaatagcttgatgtacagggcgtattttgccctgcctgatttgatgaacagcgaaggaatgcatacaaatgccatatacggtttttcaatgatgcttcttaaattgctggaggaggagaaaccagactacatagcaatagctttcgataaaaaggcttctacatttaggcacaaggagtacagtgcttataaaggaacccgccagtcgatgccagaagagctgatagaacaggtggatattttaaaagatgtgataaatgcatttaacataaagaccatcgagatagagggatttgaagcagatgatatcattggtacagtatcaaaaattgcttccgaaagtgggatggatgtgcttatcgtcacaggcgacagagatgcgcttcagcttgtgtcggcaaatgtaaaagtaaaaatatgtaaaaaaggcataacgcagatggatgagtacgatgaaaaggcggtctttgaaaagtatgaagtgacgccgcttcaattcatagacttgaaagggcttatgggagacaaatcagacaacattccaggagtgcccaatataggggagaagacggccataaagcttgttaaagaatttggatcaattgaaaatttactgatgaatacagataagttaaaagggaaaataaaagaaaatgtagaaaacaatgcagaattagctgttttaagcaaacggcttgctacgattgagagaaatgttcctattgatattgatttgaatgaatacgcggttaaaaattacgatgtcaataagcttacagagctatttgaaaaattggaattttcaagcctcatctcagatttaaaagatgatagtcgtgatacaaaggatattaaagaatggcctgtaagagattttacatacgttaaaaatgttttaggaaagtttgatgttttgtcattgtatccattcatatatgatggaaagataaaagcagtatcatttgcttgcggtgacggatcgttttttgtagagattgatgattatgacaattttaaattgcttaataatgataagcttacgttgataggacacgatctgaaagattttttagtaaacatttcatactgcggtattgaacttaattgtaagattttagatacggccataatgacttatcttttaaatccgtctgagtcgaattacgacataagtcgcgtattgaaaaaatacttgaaagaggatttgcaaaacatagatgatatagtaggcaagggcaggaataaaaagagctacgatgacattgacaaaaagcttttagtcgattatatgtgttcagccgcatcaaacttatctaagttaaaagataagctcatgtcatttataaaagagatggagatggaagatcttttaaaaaatgtggaaattccgcttattgaagtgctaaaatctatggaggtgtacggctttacattagataaagatgtacttagaagtatttctaaagaaatagatgaaaagacagataagattgtaaaagatatttacgatgctgctggatacgaatttaatattaactctacaaagcagttatcagaatttttgtttgataaactgaatttgccagcaataaaaaagactaaaacagggtattcgactgacatggaagtccttgcagaacttataccgtacaatgacatagtaggagaaataatagaatatagacagcttatgaagcttaaatctacgtacatagatggcttcattcccatcatggatgaaaataatagggtccactctacgtttaaacaaacagttgctgctacagggagaattagctcaacagagcctaatctgcagaacatacctgtaagagaagaatttggcaggaggataagaaaggcatttgtatcaagttatgaagatgggcttataatatctgctgattattctcagattgagctaagggttcttgcacatctttcagaggatgaaaaacttattgagtcatttttgaacaacgaagatatacatttaaggacggcatcggaggtttttaaggtttcgaaagaagaagtgacaagtgaaatgagaaggcgggcgaaagctgtcaactttggtattgtatatggtataagcgattacggcttatctaaagacttaaagatttcgcgaaaagaagcgaaagaatacatagacaattattttgacaggtacaagggcgtcaaaaattacatcgactcaattgtcaaatttgcaaaggaaaatgggtatgttacgactatcttaaataggagaagatacataccggaaatcaattcaaaaaattttaaccaaagaccttttggcgagagaatggcaatgaatacacctattcaaggtagcgctgcggatataataaagatgtcgatggttaaagtatacaatgaattaaaggaaagaggattgaaatcaagacttattcttcaggtgcacgatgagcttataattgacacacatcctgatgaagttgaaatagtcaaggagcttctaaaatcaataatggaaaatatcataaagttgaaagttcctttagttgtagatatagggcaagggaaaaactggtatgatgcaaaataaaaggatcc

SEQ ID NO: 850 - DNA, 2678 bp, Artificial Sequence
  Description of Artificial Sequence: Synthetic Clostridium thermosulfurogenes DNA Polymerase S798T
atgaaatacctgctgccgaccgctgctgctggtctgctgctcctcgctgcccagccggcgatggccatggcgaaatttttgatcatagatggtaatagcttgatgtacagggcgtattttgccctgcctgatttgatgaacagcgaaggaatgcatacaaatgccatatacggtttttcaatgatgcttcttaaattgctggaggaggagaaaccagactacatagcaatagctttcgataaaaaggcttctacatttaggcacaaggagtacagtgcttataaaggaacccgccagtcgatgccagaagagctgatagaacaggtggatattttaaaagatgtgataaatgcatttaacataaagaccatcgagatagagggatttgaagcagatgatatcattggtacagtatcaaaaattgcttccgaaagtgggatggatgtgcttatcgtcacaggcgacagagatgcgcttcagcttgtgtcggcaaatgtaaaagtaaaaatatgtaaaaaaggcataacgcagatggatgagtacgatgaaaaggcggtctttgaaaagtatgaagtgacgccgcttcaattcatagacttgaaagggcttatgggagacaaatcagacaacattccaggagtgcccaatataggggagaagacggccataaagcttgttaaagaatttggatcaattgaaaatttactgatgaatacagataagttaaaagggaaaataaaagaaaatgtagaaaacaatgcagaattagctgttttaagcaaacggcttgctacgattgagagaaatgttcctattgatattgatttgaatgaatacgcggttaaaaattacgatgtcaataagcttacagagctatttgaaaaattggaattttcaagcctcatctcagatttaaaagatgatagtcgtgatacaaaggatattaaagaatggcctgtaagagattttacatacgttaaaaatgttttaggaaagtttgatgttttgtcattgtatccattcatatatgatggaaagataaaagcagtatcatttgcttgcggtgacggatcgttttttgtagagattgatgattatgacaattttaaattgcttaataatgataagcttacgttgataggacacgatctgaaagattttttagtaaacatttcatactgcggtattgaacttaattgtaagattttagatacggccataatgacttatcttttaaatccgtctgagtcgaattacgacataagtcgcgtattgaaaaaatacttgaaagaggatttgcaaaacatagatgatatagtaggcaagggcaggaataaaaagagctacgatgacattgacaaaaagcttttagtcgattatatgtgttcagccgcatcaaacttatctaagttaaaagataagctcatgtcatttataaaagagatggagatggaagatcttttaaaaaatgtggaaattccgcttattgaagtgctaaaatctatggaggtgtacggctttacattagataaagatgtacttagaagtatttctaaagaaatagatgaaaagacagataagattgtaaaagatatttacgatgctgctggatacgaatttaatattaactctacaaagcagttatcagaatttttgtttgataaactgaatttgccagcaataaaaaagactaaaacagggtattcgactgacatggaagtccttgcagaacttataccgtacaatgacatagtaggagaaataatagaatatagacagcttatgaagcttaaatctacgtacatagatggcttcattcccatcatggatgaaaataatagggtccactctacgtttaaacaaacagttgctgctacagggagaattagctcaacagagcctaatctgcagaacatacctgtaagagaagaatttggcaggaggataagaaaggcatttgtatcaagttatgaagatgggcttataatatctgctgattattctcagattgagctaagggttcttgcacatctttcagaggatgaaaaacttattgagtcatttttgaacaacgaagatatacatttaaggacggcatcggaggtttttaaggtttcgaaagaagaagtgacaagtgaaatgagaaggcgggcgaaagctgtcaactttggtattgtatatggtataagcgattacggcttatctaaagacttaaagatttcgcgaaaagaagcgaaagaatacatagacaattattttgacaggtacaagggcgtcaaaaattacatcgactcaattgtcaaatttgcaaaggaaaatgggtatgttacgactatcttaaataggagaagatacataccggaaatcaattcaaaaaattttaaccaaagaacttttggcgagagaatggcaatgaatacacctattcaaggtagcgctgcggatataataaagatgtcgatggttaaagtatacaatgaattaaaggaaagaggattgaaatcaagacttattcttcaggtgcacgatgagcttataattgacacacatcctgatgaagttgaaatagtcaaggagcttctaaaatcaataatggaaaatatcataaagttgaaagttcctttagttgtagatatagggcaagggaaaaactggtatgatgcaaaataaaaggatcc

SEQ ID NO: 851 - DNA, 2678 bp, Artificial Sequence
  Description of Artificial Sequence: Synthetic Clostridium thermosulfurogenes DNA Polymerase S798W
atgaaatacctgctgccgaccgctgctgctggtctgctgctcctcgctgcccagccggcgatggccatggcgaaatttttgatcatagatggtaatagcttgatgtacagggcgtattttgccctgcctgatttgatgaacagcgaaggaatgcatacaaatgccatatacggtttttcaatgatgcttcttaaattgctggaggaggagaaaccagactacatagcaatagctttcgataaaaaggcttctacatttaggcacaaggagtacagtgcttataaaggaacccgccagtcgatgccagaagagctgatagaacaggtggatattttaaaagatgtgataaatgcatttaacataaagaccatcgagatagagggatttgaagcagatgatatcattggtacagtatcaaaaattgcttccgaaagtgggatggatgtgcttatcgtcacaggcgacagagatgcgcttcagcttgtgtcggcaaatgtaaaagtaaaaatatgtaaaaaaggcataacgcagatggatgagtacgatgaaaaggcggtctttgaaaagtatgaagtgacgccgcttcaattcatagacttgaaagggcttatgggagacaaatcagacaacattccaggagtgcccaatataggggagaagacggccataaagcttgttaaagaatttggatcaattgaaaatttactgatgaatacagataagttaaaagggaaaataaaagaaaatgtagaaaacaatgcagaattagctgttttaagcaaacggcttgctacgattgagagaaatgttcctattgatattgatttgaatgaatacgcggttaaaaattacgatgtcaataagcttacagagctatttgaaaaattggaattttcaagcctcatctcagatttaaaagatgatagtcgtgatacaaaggatattaaagaatggcctgtaagagattttacatacgttaaaaatgttttaggaaagtttgatgttttgtcattgtatccattcatatatgatggaaagataaaagcagtatcatttgcttgcggtgacggatcgttttttgtagagattgatgattatgacaattttaaattgcttaataatgataagcttacgttgataggacacgatctgaaagattttttagtaaacatttcatactgcggtattgaacttaattgtaagattttagatacggccataatgacttatcttttaaatccgtctgagtcgaattacgacataagtcgcgtattgaaaaaatacttgaaagaggatttgcaaaacatagatgatatagtaggcaagggcaggaataaaaagagctacgatgacattgacaaaaagcttttagtcgattatatgtgttcagccgcatcaaacttatctaagttaaaagataagctcatgtcatttataaaagagatggagatggaagatcttttaaaaaatgtggaaattccgcttattgaagtgctaaaatctatggaggtgtacggctttacattagataaagatgtacttagaagtatttctaaagaaatagatgaaaagacagataagattgtaaaagatatttacgatgctgctggatacgaatttaatattaactctacaaagcagttatcagaatttttgtttgataaactgaatttgccagcaataaaaaagactaaaacagggtattcgactgacatggaagtccttgcagaacttataccgtacaatgacatagtaggagaaataatagaatatagacagcttatgaagcttaaatctacgtacatagatggcttcattcccatcatggatgaaaataatagggtccactctacgtttaaacaaacagttgctgctacagggagaattagctcaacagagcctaatctgcagaacatacctgtaagagaagaatttggcaggaggataagaaaggcatttgtatcaagttatgaagatgggcttataatatctgctgattattctcagattgagctaagggttcttgcacatctttcagaggatgaaaaacttattgagtcatttttgaacaacgaagatatacatttaaggacggcatcggaggtttttaaggtttcgaaagaagaagtgacaagtgaaatgagaaggcgggcgaaagctgtcaactttggtattgtatatggtataagcgattacggcttatctaaagacttaaagatttcgcgaaaagaagcgaaagaatacatagacaattattttgacaggtacaagggcgtcaaaaattacatcgactcaattgtcaaatttgcaaaggaaaatgggtatgttacgactatcttaaataggagaagatacataccggaaatcaattcaaaaaattttaaccaaagatggtttggcgagagaatggcaatgaatacacctattcaaggtagcgctgcggatataataaagatgtcgatggttaaagtatacaatgaattaaaggaaagaggattgaaatcaagacttattcttcaggtgcacgatgagcttataattgacacacatcctgatgaagttgaaatagtcaaggagcttctaaaatcaataatggaaaatatcataaagttgaaagttcctttagttgtagatatagggcaagggaaaaactggtatgatgcaaaataaaaggatcc

SEQ ID NO: 852 - DNA, 2678 bp, Artificial Sequence
  Description of Artificial Sequence: Synthetic Clostridium thermosulfurogenes DNA Polymerase S798Y
atgaaatacctgctgccgaccgctgctgctggtctgctgctcctcgctgcccagccggcgatggccatggcgaaatttttgatcatagatggtaatagcttgatgtacagggcgtattttgccctgcctgatttgatgaacagcgaaggaatgcatacaaatgccatatacggtttttcaatgatgcttcttaaattgctggaggaggagaaaccagactacatagcaatagctttcgataaaaaggcttctacatttaggcacaaggagtacagtgcttataaaggaacccgccagtcgatgccagaagagctgatagaacaggtggatattttaaaagatgtgataaatgcatttaacataaagaccatcgagatagagggatttgaagcagatgatatcattggtacagtatcaaaaattgcttccgaaagtgggatggatgtgcttatcgtcacaggcgacagagatgcgcttcagcttgtgtcggcaaatgtaaaagtaaaaatatgtaaaaaaggcataacgcagatggatgagtacgatgaaaaggcggtctttgaaaagtatgaagtgacgccgcttcaattcatagacttgaaagggcttatgggagacaaatcagacaacattccaggagtgcccaatataggggagaagacggccataaagcttgttaaagaatttggatcaattgaaaatttactgatgaatacagataagttaaaagggaaaataaaagaaaatgtagaaaacaatgcagaattagctgttttaagcaaacggcttgctacgattgagagaaatgttcctattgatattgatttgaatgaatacgcggttaaaaattacgatgtcaataagcttacagagctatttgaaaaattggaattttcaagcctcatctcagatttaaaagatgatagtcgtgatacaaaggatattaaagaatggcctgtaagagattttacatacgttaaaaatgttttaggaaagtttgatgttttgtcattgtatccattcatatatgatggaaagataaaagcagtatcatttgcttgcggtgacggatcgttttttgtagagattgatgattatgacaattttaaattgcttaataatgataagcttacgttgataggacacgatctgaaagattttttagtaaacatttcatactgcggtattgaacttaattgtaagattttagatacggccataatgacttatcttttaaatccgtctgagtcgaattacgacataagtcgcgtattgaaaaaatacttgaaagaggatttgcaaaacatagatgatatagtaggcaagggcaggaataaaaagagctacgatgacattgacaaaaagcttttagtcgattatatgtgttcagccgcatcaaacttatctaagttaaaagataagctcatgtcatttataaaagagatggagatggaagatcttttaaaaaatgtggaaattccgcttattgaagtgctaaaatctatggaggtgtacggctttacattagataaagatgtacttagaagtatttctaaagaaatagatgaaaagacagataagattgtaaaagatatttacgatgctgctggatacgaatttaatattaactctacaaagcagttatcagaatttttgtttgataaactgaatttgccagcaataaaaaagactaaaacagggtattcgactgacatggaagtccttgcagaacttataccgtacaatgacatagtaggagaaataatagaatatagacagcttatgaagcttaaatctacgtacatagatggcttcattcccatcatggatgaaaataatagggtccactctacgtttaaacaaacagttgctgctacagggagaattagctcaacagagcctaatctgcagaacatacctgtaagagaagaatttggcaggaggataagaaaggcatttgtatcaagttatgaagatgggcttataatatctgctgattattctcagattgagctaagggttcttgcacatctttcagaggatgaaaaacttattgagtcatttttgaacaacgaagatatacatttaaggacggcatcggaggtttttaaggtttcgaaagaagaagtgacaagtgaaatgagaaggcgggcgaaagctgtcaactttggtattgtatatggtataagcgattacggcttatctaaagacttaaagatttcgcgaaaagaagcgaaagaatacatagacaattattttgacaggtacaagggcgtcaaaaattacatcgactcaattgtcaaatttgcaaaggaaaatgggtatgttacgactatcttaaataggagaagatacataccggaaatcaattcaaaaaattttaaccaaagatattttggcgagagaatggcaatgaatacacctattcaaggtagcgctgcggatataataaagatgtcgatggttaaagtatacaatgaattaaaggaaagaggattgaaatcaagacttattcttcaggtgcacgatgagcttataattgacacacatcctgatgaagttgaaatagtcaaggagcttctaaaatcaataatggaaaatatcataaagttgaaagttcctttagttgtagatatagggcaagggaaaaactggtatgatgcaaaataaaaggatcc

SEQ ID NO: 853 - DNA, 2678 bp, Artificial Sequence
  Description of Artificial Sequence: Synthetic Clostridium thermosulfurogenes DNA Polymerase S798V
atgaaatacctgctgccgaccgctgctgctggtctgctgctcctcgctgcccagccggcgatggccatggcgaaatttttgatcatagatggtaatagcttgatgtacagggcgtattttgccctgcctgatttgatgaacagcgaaggaatgcatacaaatgccatatacggtttttcaatgatgcttcttaaattgctggaggaggagaaaccagactacatagcaatagctttcgataaaaaggcttctacatttaggcacaaggagtacagtgcttataaaggaacccgccagtcgatgccagaagagctgatagaacaggtggatattttaaaagatgtgataaatgcatttaacataaagaccatcgagatagagggatttgaagcagatgatatcattggtacagtatcaaaaattgcttccgaaagtgggatggatgtgcttatcgtcacaggcgacagagatgcgcttcagcttgtgtcggcaaatgtaaaagtaaaaatatgtaaaaaaggcataacgcagatggatgagtacgatgaaaaggcggtctttgaaaagtatgaagtgacgccgcttcaattcatagacttgaaagggcttatgggagacaaatcagacaacattccaggagtgcccaatataggggagaagacggccataaagcttgttaaagaatttggatcaattgaaaatttactgatgaatacagataagttaaaagggaaaataaaagaaaatgtagaaaacaatgcagaattagctgttttaagcaaacggcttgctacgattgagagaaatgttcctattgatattgatttgaatgaatacgcggttaaaaattacgatgtcaataagcttacagagctatttgaaaaattggaattttcaagcctcatctcagatttaaaagatgatagtcgtgatacaaaggatattaaagaatggcctgtaagagattttacatacgttaaaaatgttttaggaaagtttgatgttttgtcattgtatccattcatatatgatggaaagataaaagcagtatcatttgcttgcggtgacggatcgttttttgtagagattgatgattatgacaattttaaattgcttaataatgataagcttacgttgataggacacgatctgaaagattttttagtaaacatttcatactgcggtattgaacttaattgtaagattttagatacggccataatgacttatcttttaaatccgtctgagtcgaattacgacataagtcgcgtattgaaaaaatacttgaaagaggatttgcaaaacatagatgatatagtaggcaagggcaggaataaaaagagctacgatgacattgacaaaaagcttttagtcgattatatgtgttcagccgcatcaaacttatctaagttaaaagataagctcatgtcatttataaaagagatggagatggaagatcttttaaaaaatgtggaaattccgcttattgaagtgctaaaatctatggaggtgtacggctttacattagataaagatgtacttagaagtatttctaaagaaatagatgaaaagacagataagattgtaaaagatatttacgatgctgctggatacgaatttaatattaactctacaaagcagttatcagaatttttgtttgataaactgaatttgccagcaataaaaaagactaaaacagggtattcgactgacatggaagtccttgcagaacttataccgtacaatgacatagtaggagaaataatagaatatagacagcttatgaagcttaaatctacgtacatagatggcttcattcccatcatggatgaaaataatagggtccactctacgtttaaacaaacagttgctgctacagggagaattagctcaacagagcctaatctgcagaacatacctgtaagagaagaatttggcaggaggataagaaaggcatttgtatcaagttatgaagatgggcttataatatctgctgattattctcagattgagctaagggttcttgcacatctttcagaggatgaaaaacttattgagtcatttttgaacaacgaagatatacatttaaggacggcatcggaggtttttaaggtttcgaaagaagaagtgacaagtgaaatgagaaggcgggcgaaagctgtcaactttggtattgtatatggtataagcgattacggcttatctaaagacttaaagatttcgcgaaaagaagcgaaagaatacatagacaattattttgacaggtacaagggcgtcaaaaattacatcgactcaattgtcaaatttgcaaaggaaaatgggtatgttacgactatcttaaataggagaagatacataccggaaatcaattcaaaaaattttaaccaaagagtttttggcgagagaatggcaatgaatacacctattcaaggtagcgctgcggatataataaagatgtcgatggttaaagtatacaatgaattaaaggaaagaggattgaaatcaagacttattcttcaggtgcacgatgagcttataattgacacacatcctgatgaagttgaaatagtcaaggagcttctaaaatcaataatggaaaatatcataaagttgaaagttcctttagttgtagatatagggcaagggaaaaactggtatgatgcaaaataaaaggatcc

SEQ ID NO: 854 - DNA, 2678 bp, Artificial Sequence
  Description of Artificial Sequence: Synthetic Clostridium thermosulfurogenes DNA Polymerase F799A
atgaaatacctgctgccgaccgctgctgctggtctgctgctcctcgctgcccagccggcgatggccatggcgaaatttttgatcatagatggtaatagcttgatgtacagggcgtattttgccctgcctgatttgatgaacagcgaaggaatgcatacaaatgccatatacggtttttcaatgatgcttcttaaattgctggaggaggagaaaccagactacatagcaatagctttcgataaaaaggcttctacatttaggcacaaggagtacagtgcttataaaggaacccgccagtcgatgccagaagagctgatagaacaggtggatattttaaaagatgtgataaatgcatttaacataaagaccatcgagatagagggatttgaagcagatgatatcattggtacagtatcaaaaattgcttccgaaagtgggatggatgtgcttatcgtcacaggcgacagagatgcgcttcagcttgtgtcggcaaatgtaaaagtaaaaatatgtaaaaaaggcataacgcagatggatgagtacgatgaaaaggcggtctttgaaaagtatgaagtgacgccgcttcaattcatagacttgaaagggcttatgggagacaaatcagacaacattccaggagtgcccaatataggggagaagacggccataaagcttgttaaagaatttggatcaattgaaaatttactgatgaatacagataagttaaaagggaaaataaaagaaaatgtagaaaacaatgcagaattagctgttttaagcaaacggcttgctacgattgagagaaatgttcctattgatattgatttgaatgaatacgcggttaaaaattacgatgtcaataagcttacagagctatttgaaaaattggaattttcaagcctcatctcagatttaaaagatgatagtcgtgatacaaaggatattaaagaatggcctgtaagagattttacatacgttaaaaatgttttaggaaagtttgatgttttgtcattgtatccattcatatatgatggaaagataaaagcagtatcatttgcttgcggtgacggatcgttttttgtagagattgatgattatgacaattttaaattgcttaataatgataagcttacgttgataggacacgatctgaaagattttttagtaaacatttcatactgcggtattgaacttaattgtaagattttagatacggccataatgacttatcttttaaatccgtctgagtcgaattacgacataagtcgcgtattgaaaaaatacttgaaagaggatttgcaaaacatagatgatatagtaggcaagggcaggaataaaaagagctacgatgacattgacaaaaagcttttagtcgattatatgtgttcagccgcatcaaacttatctaagttaaaagataagctcatgtcatttataaaagagatggagatggaagatcttttaaaaaatgtggaaattccgcttattgaagtgctaaaatctatggaggtgtacggctttacattagataaagatgtacttagaagtatttctaaagaaatagatgaaaagacagataagattgtaaaagatatttacgatgctgctggatacgaatttaatattaactctacaaagcagttatcagaatttttgtttgataaactgaatttgccagcaataaaaaagactaaaacagggtattcgactgacatggaagtccttgcagaacttataccgtacaatgacatagtaggagaaataatagaatatagacagcttatgaagcttaaatctacgtacatagatggcttcattcccatcatggatgaaaataatagggtccactctacgtttaaacaaacagttgctgctacagggagaattagctcaacagagcctaatctgcagaacatacctgtaagagaagaatttggcaggaggataagaaaggcatttgtatcaagttatgaagatgggcttataatatctgctgattattctcagattgagctaagggttcttgcacatctttcagaggatgaaaaacttattgagtcatttttgaacaacgaagatatacatttaaggacggcatcggaggtttttaaggtttcgaaagaagaagtgacaagtgaaatgagaaggcgggcgaaagctgtcaactttggtattgtatatggtataagcgattacggcttatctaaagacttaaagatttcgcgaaaagaagcgaaagaatacatagacaattattttgacaggtacaagggcgtcaaaaattacatcgactcaattgtcaaatttgcaaaggaaaatgggtatgttacgactatcttaaataggagaagatacataccggaaatcaattcaaaaaattttaaccaaagatctgctggcgagagaatggcaatgaatacacctattcaaggtagcgctgcggatataataaagatgtcgatggttaaagtatacaatgaattaaaggaaagaggattgaaatcaagacttattcttcaggtgcacgatgagcttataattgacacacatcctgatgaagttgaaatagtcaaggagcttctaaaatcaataatggaaaatatcataaagttgaaagttcctttagttgtagatatagggcaagggaaaaactggtatgatgcaaaataaaaggatcc

SEQ ID NO: 855 - DNA, 2678 bp, Artificial Sequence
  Description of Artificial Sequence: Synthetic Clostridium thermosulfurogenes DNA Polymerase F799R
atgaaatacctgctgccgaccgctgctgctggtctgctgctcctcgctgcccagccggcgatggccatggcgaaatttttgatcatagatggtaatagcttgatgtacagggcgtattttgccctgcctgatttgatgaacagcgaaggaatgcatacaaatgccatatacggtttttcaatgatgcttcttaaattgctggaggaggagaaaccagactacatagcaatagctttcgataaaaaggcttctacatttaggcacaaggagtacagtgcttataaaggaacccgccagtcgatgccagaagagctgatagaacaggtggatattttaaaagatgtgataaatgcatttaacataaagaccatcgagatagagggatttgaagcagatgatatcattggtacagtatcaaaaattgcttccgaaagtgggatggatgtgcttatcgtcacaggcgacagagatgcgcttcagcttgtgtcggcaaatgtaaaagtaaaaatatgtaaaaaaggcataacgcagatggatgagtacgatgaaaaggcggtctttgaaaagtatgaagtgacgccgcttcaattcatagacttgaaagggcttatgggagacaaatcagacaacattccaggagtgcccaatataggggagaagacggccataaagcttgttaaagaatttggatcaattgaaaatttactgatgaatacagataagttaaaagggaaaataaaagaaaatgtagaaaacaatgcagaattagctgttttaagcaaacggcttgctacgattgagagaaatgttcctattgatattgatttgaatgaatacgcggttaaaaattacgatgtcaataagcttacagagctatttgaaaaattggaattttcaagcctcatctcagatttaaaagatgatagtcgtgatacaaaggatattaaagaatggcctgtaagagattttacatacgttaaaaatgttttaggaaagtttgatgttttgtcattgtatccattcatatatgatggaaagataaaagcagtatcatttgcttgcggtgacggatcgttttttgtagagattgatgattatgacaattttaaattgcttaataatgataagcttacgttgataggacacgatctgaaagattttttagtaaacatttcatactgcggtattgaacttaattgtaagattttagatacggccataatgacttatcttttaaatccgtctgagtcgaattacgacataagtcgcgtattgaaaaaatacttgaaagaggatttgcaaaacatagatgatatagtaggcaagggcaggaataaaaagagctacgatgacattgacaaaaagcttttagtcgattatatgtgttcagccgcatcaaacttatctaagttaaaagataagctcatgtcatttataaaagagatggagatggaagatcttttaaaaaatgtggaaattccgcttattgaagtgctaaaatctatggaggtgtacggctttacattagataaagatgtacttagaagtatttctaaagaaatagatgaaaagacagataagattgtaaaagatatttacgatgctgctggatacgaatttaatattaactctacaaagcagttatcagaatttttgtttgataaactgaatttgccagcaataaaaaagactaaaacagggtattcgactgacatggaagtccttgcagaacttataccgtacaatgacatagtaggagaaataatagaatatagacagcttatgaagcttaaatctacgtacatagatggcttcattcccatcatggatgaaaataatagggtccactctacgtttaaacaaacagttgctgctacagggagaattagctcaacagagcctaatctgcagaacatacctgtaagagaagaatttggcaggaggataagaaaggcatttgtatcaagttatgaagatgggcttataatatctgctgattattctcagattgagctaagggttcttgcacatctttcagaggatgaaaaacttattgagtcatttttgaacaacgaagatatacatttaaggacggcatcggaggtttttaaggtttcgaaagaagaagtgacaagtgaaatgagaaggcgggcgaaagctgtcaactttggtattgtatatggtataagcgattacggcttatctaaagacttaaagatttcgcgaaaagaagcgaaagaatacatagacaattattttgacaggtacaagggcgtcaaaaattacatcgactcaattgtcaaatttgcaaaggaaaatgggtatgttacgactatcttaaataggagaagatacataccggaaatcaattcaaaaaattttaaccaaagatctcgtggcgagagaatggcaatgaatacacctattcaaggtagcgctgcggatataataaagatgtcgatggttaaagtatacaatgaattaaaggaaagaggattgaaatcaagacttattcttcaggtgcacgatgagcttataattgacacacatcctgatgaagttgaaatagtcaaggagcttctaaaatcaataatggaaaatatcataaagttgaaagttcctttagttgtagatatagggcaagggaaaaactggtatgatgcaaaataaaaggatcc

SEQ ID NO: 856 - DNA, 2678 bp, Artificial Sequence
  Description of Artificial Sequence: Synthetic Clostridium thermosulfurogenes DNA Polymerase F799N
atgaaatacctgctgccgaccgctgctgctggtctgctgctcctcgctgcccagccggcgatggccatggcgaaatttttgatcatagatggtaatagcttgatgtacagggcgtattttgccctgcctgatttgatgaacagcgaaggaatgcatacaaatgccatatacggtttttcaatgatgcttcttaaattgctggaggaggagaaaccagactacatagcaatagctttcgataaaaaggcttctacatttaggcacaaggagtacagtgcttataaaggaacccgccagtcgatgccagaagagctgatagaacaggtggatattttaaaagatgtgataaatgcatttaacataaagaccatcgagatagagggatttgaagcagatgatatcattggtacagtatcaaaaattgcttccgaaagtgggatggatgtgcttatcgtcacaggcgacagagatgcgcttcagcttgtgtcggcaaatgtaaaagtaaaaatatgtaaaaaaggcataacgcagatggatgagtacgatgaaaaggcggtctttgaaaagtatgaagtgacgccgcttcaattcatagacttgaaagggcttatgggagacaaatcagacaacattccaggagtgcccaatataggggagaagacggccataaagcttgttaaagaatttggatcaattgaaaatttactgatgaatacagataagttaaaagggaaaataaaagaaaatgtagaaaacaatgcagaattagctgttttaagcaaacggcttgctacgattgagagaaatgttcctattgatattgatttgaatgaatacgcggttaaaaattacgatgtcaataagcttacagagctatttgaaaaattggaattttcaagcctcatctcagatttaaaagatgatagtcgtgatacaaaggatattaaagaatggcctgtaagagattttacatacgttaaaaatgttttaggaaagtttgatgttttgtcattgtatccattcatatatgatggaaagataaaagcagtatcatttgcttgcggtgacggatcgttttttgtagagattgatgattatgacaattttaaattgcttaataatgataagcttacgttgataggacacgatctgaaagattttttagtaaacatttcatactgcggtattgaacttaattgtaagattttagatacggccataatgacttatcttttaaatccgtctgagtcgaattacgacataagtcgcgtattgaaaaaatacttgaaagaggatttgcaaaacatagatgatatagtaggcaagggcaggaataaaaagagctacgatgacattgacaaaaagcttttagtcgattatatgtgttcagccgcatcaaacttatctaagttaaaagataagctcatgtcatttataaaagagatggagatggaagatcttttaaaaaatgtggaaattccgcttattgaagtgctaaaatctatggaggtgtacggctttacattagataaagatgtacttagaagtatttctaaagaaatagatgaaaagacagataagattgtaaaagatatttacgatgctgctggatacgaatttaatattaactctacaaagcagttatcagaatttttgtttgataaactgaatttgccagcaataaaaaagactaaaacagggtattcgactgacatggaagtccttgcagaacttataccgtacaatgacatagtaggagaaataatagaatatagacagcttatgaagcttaaatctacgtacatagatggcttcattcccatcatggatgaaaataatagggtccactctacgtttaaacaaacagttgctgctacagggagaattagctcaacagagcctaatctgcagaacatacctgtaagagaagaatttggcaggaggataagaaaggcatttgtatcaagttatgaagatgggcttataatatctgctgattattctcagattgagctaagggttcttgcacatctttcagaggatgaaaaacttattgagtcatttttgaacaacgaagatatacatttaaggacggcatcggaggtttttaaggtttcgaaagaagaagtgacaagtgaaatgagaaggcgggcgaaagctgtcaactttggtattgtatatggtataagcgattacggcttatctaaagacttaaagatttcgcgaaaagaagcgaaagaatacatagacaattattttgacaggtacaagggcgtcaaaaattacatcgactcaattgtcaaatttgcaaaggaaaatgggtatgttacgactatcttaaataggagaagatacataccggaaatcaattcaaaaaattttaaccaaagatctaatggcgagagaatggcaatgaatacacctattcaaggtagcgctgcggatataataaagatgtcgatggttaaagtatacaatgaattaaaggaaagaggattgaaatcaagacttattcttcaggtgcacgatgagcttataattgacacacatcctgatgaagttgaaatagtcaaggagcttctaaaatcaataatggaaaatatcataaagttgaaagttcctttagttgtagatatagggcaagggaaaaactggtatgatgcaaaataaaaggatcc

SEQ ID NO: 857 - DNA, 2678 bp, Artificial Sequence
  Description of Artificial Sequence: Synthetic Clostridium thermosulfurogenes DNA Polymerase F799D
atgaaatacctgctgccgaccgctgctgctggtctgctgctcctcgctgcccagccggcgatggccatggcgaaatttttgatcatagatggtaatagcttgatgtacagggcgtattttgccctgcctgatttgatgaacagcgaaggaatgcatacaaatgccatatacggtttttcaatgatgcttcttaaattgctggaggaggagaaaccagactacatagcaatagctttcgataaaaaggcttctacatttaggcacaaggagtacagtgcttataaaggaacccgccagtcgatgccagaagagctgatagaacaggtggatattttaaaagatgtgataaatgcatttaacataaagaccatcgagatagagggatttgaagcagatgatatcattggtacagtatcaaaaattgcttccgaaagtgggatggatgtgcttatcgtcacaggcgacagagatgcgcttcagcttgtgtcggcaaatgtaaaagtaaaaatatgtaaaaaaggcataacgcagatggatgagtacgatgaaaaggcggtctttgaaaagtatgaagtgacgccgcttcaattcatagacttgaaagggcttatgggagacaaatcagacaacattccaggagtgcccaatataggggagaagacggccataaagcttgttaaagaatttggatcaattgaaaatttactgatgaatacagataagttaaaagggaaaataaaagaaaatgtagaaaacaatgcagaattagctgttttaagcaaacggcttgctacgattgagagaaatgttcctattgatattgatttgaatgaatacgcggttaaaaattacgatgtcaataagcttacagagctatttgaaaaattggaattttcaagcctcatctcagatttaaaagatgatagtcgtgatacaaaggatattaaagaatggcctgtaagagattttacatacgttaaaaatgttttaggaaagtttgatgttttgtcattgtatccattcatatatgatggaaagataaaagcagtatcatttgcttgcggtgacggatcgttttttgtagagattgatgattatgacaattttaaattgcttaataatgataagcttacgttgataggacacgatctgaaagattttttagtaaacatttcatactgcggtattgaacttaattgtaagattttagatacggccataatgacttatcttttaaatccgtctgagtcgaattacgacataagtcgcgtattgaaaaaatacttgaaagaggatttgcaaaacatagatgatatagtaggcaagggcaggaataaaaagagctacgatgacattgacaaaaagcttttagtcgattatatgtgttcagccgcatcaaacttatctaagttaaaagataagctcatgtcatttataaaagagatggagatggaagatcttttaaaaaatgtggaaattccgcttattgaagtgctaaaatctatggaggtgtacggctttacattagataaagatgtacttagaagtatttctaaagaaatagatgaaaagacagataagattgtaaaagatatttacgatgctgctggatacgaatttaatattaactctacaaagcagttatcagaatttttgtttgataaactgaatttgccagcaataaaaaagactaaaacagggtattcgactgacatggaagtccttgcagaacttataccgtacaatgacatagtaggagaaataatagaatatagacagcttatgaagcttaaatctacgtacatagatggcttcattcccatcatggatgaaaataatagggtccactctacgtttaaacaaacagttgctgctacagggagaattagctcaacagagcctaatctgcagaacatacctgtaagagaagaatttggcaggaggataagaaaggcatttgtatcaagttatgaagatgggcttataatatctgctgattattctcagattgagctaagggttcttgcacatctttcagaggatgaaaaacttattgagtcatttttgaacaacgaagatatacatttaaggacggcatcggaggtttttaaggtttcgaaagaagaagtgacaagtgaaatgagaaggcgggcgaaagctgtcaactttggtattgtatatggtataagcgattacggcttatctaaagacttaaagatttcgcgaaaagaagcgaaagaatacatagacaattattttgacaggtacaagggcgtcaaaaattacatcgactcaattgtcaaatttgcaaaggaaaatgggtatgttacgactatcttaaataggagaagatacataccggaaatcaattcaaaaaattttaaccaaagatctgatggcgagagaatggcaatgaatacacctattcaaggtagcgctgcggatataataaagatgtcgatggttaaagtatacaatgaattaaaggaaagaggattgaaatcaagacttattcttcaggtgcacgatgagcttataattgacacacatcctgatgaagttgaaatagtcaaggagcttctaaaatcaataatggaaaatatcataaagttgaaagttcctttagttgtagatatagggcaagggaaaaactggtatgatgcaaaataaaaggatcc

SEQ ID NO: 858 - DNA, 2678 bp, Artificial Sequence
  Description of Artificial Sequence: Synthetic Clostridium thermosulfurogenes DNA Polymerase F799C
atgaaatacctgctgccgaccgctgctgctggtctgctgctcctcgctgcccagccggcgatggccatggcgaaatttttgatcatagatggtaatagcttgatgtacagggcgtattttgccctgcctgatttgatgaacagcgaaggaatgcatacaaatgccatatacggtttttcaatgatgcttcttaaattgctggaggaggagaaaccagactacatagcaatagctttcgataaaaaggcttctacatttaggcacaaggagtacagtgcttataaaggaacccgccagtcgatgccagaagagctgatagaacaggtggatattttaaaagatgtgataaatgcatttaacataaagaccatcgagatagagggatttgaagcagatgatatcattggtacagtatcaaaaattgcttccgaaagtgggatggatgtgcttatcgtcacaggcgacagagatgcgcttcagcttgtgtcggcaaatgtaaaagtaaaaatatgtaaaaaaggcataacgcagatggatgagtacgatgaaaaggcggtctttgaaaagtatgaagtgacgccgcttcaattcatagacttgaaagggcttatgggagacaaatcagacaacattccaggagtgcccaatataggggagaagacggccataaagcttgttaaagaatttggatcaattgaaaatttactgatgaatacagataagttaaaagggaaaataaaagaaaatgtagaaaacaatgcagaattagctgttttaagcaaacggcttgctacgattgagagaaatgttcctattgatattgatttgaatgaatacgcggttaaaaattacgatgtcaataagcttacagagctatttgaaaaattggaattttcaagcctcatctcagatttaaaagatgatagtcgtgatacaaaggatattaaagaatggcctgtaagagattttacatacgttaaaaatgttttaggaaagtttgatgttttgtcattgtatccattcatatatgatggaaagataaaagcagtatcatttgcttgcggtgacggatcgttttttgtagagattgatgattatgacaattttaaattgcttaataatgataagcttacgttgataggacacgatctgaaagattttttagtaaacatttcatactgcggtattgaacttaattgtaagattttagatacggccataatgacttatcttttaaatccgtctgagtcgaattacgacataagtcgcgtattgaaaaaatacttgaaagaggatttgcaaaacatagatgatatagtaggcaagggcaggaataaaaagagctacgatgacattgacaaaaagcttttagtcgattatatgtgttcagccgcatcaaacttatctaagttaaaagataagctcatgtcatttataaaagagatggagatggaagatcttttaaaaaatgtggaaattccgcttattgaagtgctaaaatctatggaggtgtacggctttacattagataaagatgtacttagaagtatttctaaagaaatagatgaaaagacagataagattgtaaaagatatttacgatgctgctggatacgaatttaatattaactctacaaagcagttatcagaatttttgtttgataaactgaatttgccagcaataaaaaagactaaaacagggtattcgactgacatggaagtccttgcagaacttataccgtacaatgacatagtaggagaaataatagaatatagacagcttatgaagcttaaatctacgtacatagatggcttcattcccatcatggatgaaaataatagggtccactctacgtttaaacaaacagttgctgctacagggagaattagctcaacagagcctaatctgcagaacatacctgtaagagaagaatttggcaggaggataagaaaggcatttgtatcaagttatgaagatgggcttataatatctgctgattattctcagattgagctaagggttcttgcacatctttcagaggatgaaaaacttattgagtcatttttgaacaacgaagatatacatttaaggacggcatcggaggtttttaaggtttcgaaagaagaagtgacaagtgaaatgagaaggcgggcgaaagctgtcaactttggtattgtatatggtataagcgattacggcttatctaaagacttaaagatttcgcgaaaagaagcgaaagaatacatagacaattattttgacaggtacaagggcgtcaaaaattacatcgactcaattgtcaaatttgcaaaggaaaatgggtatgttacgactatcttaaataggagaagatacataccggaaatcaattcaaaaaattttaaccaaagatcttgtggcgagagaatggcaatgaatacacctattcaaggtagcgctgcggatataataaagatgtcgatggttaaagtatacaatgaattaaaggaaagaggattgaaatcaagacttattcttcaggtgcacgatgagcttataattgacacacatcctgatgaagttgaaatagtcaaggagcttctaaaatcaataatggaaaatatcataaagttgaaagttcctttagttgtagatatagggcaagggaaaaactggtatgatgcaaaataaaaggatcc

SEQ ID NO: 859 - DNA, 2678 bp, Artificial Sequence
  Description of Artificial Sequence: Synthetic Clostridium thermosulfurogenes DNA Polymerase F799E
atgaaatacctgctgccgaccgctgctgctggtctgctgctcctcgctgcccagccggcgatggccatggcgaaatttttgatcatagatggtaatagcttgatgtacagggcgtattttgccctgcctgatttgatgaacagcgaaggaatgcatacaaatgccatatacggtttttcaatgatgcttcttaaattgctggaggaggagaaaccagactacatagcaatagctttcgataaaaaggcttctacatttaggcacaaggagtacagtgcttataaaggaacccgccagtcgatgccagaagagctgatagaacaggtggatattttaaaagatgtgataaatgcatttaacataaagaccatcgagatagagggatttgaagcagatgatatcattggtacagtatcaaaaattgcttccgaaagtgggatggatgtgcttatcgtcacaggcgacagagatgcgcttcagcttgtgtcggcaaatgtaaaagtaaaaatatgtaaaaaaggcataacgcagatggatgagtacgatgaaaaggcggtctttgaaaagtatgaagtgacgccgcttcaattcatagacttgaaagggcttatgggagacaaatcagacaacattccaggagtgcccaatataggggagaagacggccataaagcttgttaaagaatttggatcaattgaaaatttactgatgaatacagataagttaaaagggaaaataaaagaaaatgtagaaaacaatgcagaattagctgttttaagcaaacggcttgctacgattgagagaaatgttcctattgatattgatttgaatgaatacgcggttaaaaattacgatgtcaataagcttacagagctatttgaaaaattggaattttcaagcctcatctcagatttaaaagatgatagtcgtgatacaaaggatattaaagaatggcctgtaagagattttacatacgttaaaaatgttttaggaaagtttgatgttttgtcattgtatccattcatatatgatggaaagataaaagcagtatcatttgcttgcggtgacggatcgttttttgtagagattgatgattatgacaattttaaattgcttaataatgataagcttacgttgataggacacgatctgaaagattttttagtaaacatttcatactgcggtattgaacttaattgtaagattttagatacggccataatgacttatcttttaaatccgtctgagtcgaattacgacataagtcgcgtattgaaaaaatacttgaaagaggatttgcaaaacatagatgatatagtaggcaagggcaggaataaaaagagctacgatgacattgacaaaaagcttttagtcgattatatgtgttcagccgcatcaaacttatctaagttaaaagataagctcatgtcatttataaaagagatggagatggaagatcttttaaaaaatgtggaaattccgcttattgaagtgctaaaatctatggaggtgtacggctttacattagataaagatgtacttagaagtatttctaaagaaatagatgaaaagacagataagattgtaaaagatatttacgatgctgctggatacgaatttaatattaactctacaaagcagttatcagaatttttgtttgataaactgaatttgccagcaataaaaaagactaaaacagggtattcgactgacatggaagtccttgcagaacttataccgtacaatgacatagtaggagaaataatagaatatagacagcttatgaagcttaaatctacgtacatagatggcttcattcccatcatggatgaaaataatagggtccactctacgtttaaacaaacagttgctgctacagggagaattagctcaacagagcctaatctgcagaacatacctgtaagagaagaatttggcaggaggataagaaaggcatttgtatcaagttatgaagatgggcttataatatctgctgattattctcagattgagctaagggttcttgcacatctttcagaggatgaaaaacttattgagtcatttttgaacaacgaagatatacatttaaggacggcatcggaggtttttaaggtttcgaaagaagaagtgacaagtgaaatgagaaggcgggcgaaagctgtcaactttggtattgtatatggtataagcgattacggcttatctaaagacttaaagatttcgcgaaaagaagcgaaagaatacatagacaattattttgacaggtacaagggcgtcaaaaattacatcgactcaattgtcaaatttgcaaaggaaaatgggtatgttacgactatcttaaataggagaagatacataccggaaatcaattcaaaaaattttaaccaaagatctgaaggcgagagaatggcaatgaatacacctattcaaggtagcgctgcggatataataaagatgtcgatggttaaagtatacaatgaattaaaggaaagaggattgaaatcaagacttattcttcaggtgcacgatgagcttataattgacacacatcctgatgaagttgaaatagtcaaggagcttctaaaatcaataatggaaaatatcataaagttgaaagttcctttagttgtagatatagggcaagggaaaaactggtatgatgcaaaataaaaggatcc

SEQ ID NO: 860 - DNA, 2678 bp, Artificial Sequence
  Description of Artificial Sequence: Synthetic Clostridium thermosulfurogenes DNA Polymerase F799Q
atgaaatacctgctgccgaccgctgctgctggtctgctgctcctcgctgcccagccggcgatggccatggcgaaatttttgatcatagatggtaatagcttgatgtacagggcgtattttgccctgcctgatttgatgaacagcgaaggaatgcatacaaatgccatatacggtttttcaatgatgcttcttaaattgctggaggaggagaaaccagactacatagcaatagctttcgataaaaaggcttctacatttaggcacaaggagtacagtgcttataaaggaacccgccagtcgatgccagaagagctgatagaacaggtggatattttaaaagatgtgataaatgcatttaacataaagaccatcgagatagagggatttgaagcagatgatatcattggtacagtatcaaaaattgcttccgaaagtgggatggatgtgcttatcgtcacaggcgacagagatgcgcttcagcttgtgtcggcaaatgtaaaagtaaaaatatgtaaaaaaggcataacgcagatggatgagtacgatgaaaaggcggtctttgaaaagtatgaagtgacgccgcttcaattcatagacttgaaagggcttatgggagacaaatcagacaacattccaggagtgcccaatataggggagaagacggccataaagcttgttaaagaatttggatcaattgaaaatttactgatgaatacagataagttaaaagggaaaataaaagaaaatgtagaaaacaatgcagaattagctgttttaagcaaacggcttgctacgattgagagaaatgttcctattgatattgatttgaatgaatacgcggttaaaaattacgatgtcaataagcttacagagctatttgaaaaattggaattttcaagcctcatctcagatttaaaagatgatagtcgtgatacaaaggatattaaagaatggcctgtaagagattttacatacgttaaaaatgttttaggaaagtttgatgttttgtcattgtatccattcatatatgatggaaagataaaagcagtatcatttgcttgcggtgacggatcgttttttgtagagattgatgattatgacaattttaaattgcttaataatgataagcttacgttgataggacacgatctgaaagattttttagtaaacatttcatactgcggtattgaacttaattgtaagattttagatacggccataatgacttatcttttaaatccgtctgagtcgaattacgacataagtcgcgtattgaaaaaatacttgaaagaggatttgcaaaacatagatgatatagtaggcaagggcaggaataaaaagagctacgatgacattgacaaaaagcttttagtcgattatatgtgttcagccgcatcaaacttatctaagttaaaagataagctcatgtcatttataaaagagatggagatggaagatcttttaaaaaatgtggaaattccgcttattgaagtgctaaaatctatggaggtgtacggctttacattagataaagatgtacttagaagtatttctaaagaaatagatgaaaagacagataagattgtaaaagatatttacgatgctgctggatacgaatttaatattaactctacaaagcagttatcagaatttttgtttgataaactgaatttgccagcaataaaaaagactaaaacagggtattcgactgacatggaagtccttgcagaacttataccgtacaatgacatagtaggagaaataatagaatatagacagcttatgaagcttaaatctacgtacatagatggcttcattcccatcatggatgaaaataatagggtccactctacgtttaaacaaacagttgctgctacagggagaattagctcaacagagcctaatctgcagaacatacctgtaagagaagaatttggcaggaggataagaaaggcatttgtatcaagttatgaagatgggcttataatatctgctgattattctcagattgagctaagggttcttgcacatctttcagaggatgaaaaacttattgagtcatttttgaacaacgaagatatacatttaaggacggcatcggaggtttttaaggtttcgaaagaagaagtgacaagtgaaatgagaaggcgggcgaaagctgtcaactttggtattgtatatggtataagcgattacggcttatctaaagacttaaagatttcgcgaaaagaagcgaaagaatacatagacaattattttgacaggtacaagggcgtcaaaaattacatcgactcaattgtcaaatttgcaaaggaaaatgggtatgttacgactatcttaaataggagaagatacataccggaaatcaattcaaaaaattttaaccaaagatctcaaggcgagagaatggcaatgaatacacctattcaaggtagcgctgcggatataataaagatgtcgatggttaaagtatacaatgaattaaaggaaagaggattgaaatcaagacttattcttcaggtgcacgatgagcttataattgacacacatcctgatgaagttgaaatagtcaaggagcttctaaaatcaataatggaaaatatcataaagttgaaagttcctttagttgtagatatagggcaagggaaaaactggtatgatgcaaaataaaaggatcc

SEQ ID NO: 861 - DNA, 2678 bp, Artificial Sequence
  Description of Artificial Sequence: Synthetic Clostridium thermosulfurogenes DNA Polymerase F799G
atgaaatacctgctgccgaccgctgctgctggtctgctgctcctcgctgcccagccggcgatggccatggcgaaatttttgatcatagatggtaatagcttgatgtacagggcgtattttgccctgcctgatttgatgaacagcgaaggaatgcatacaaatgccatatacggtttttcaatgatgcttcttaaattgctggaggaggagaaaccagactacatagcaatagctttcgataaaaaggcttctacatttaggcacaaggagtacagtgcttataaaggaacccgccagtcgatgccagaagagctgatagaacaggtggatattttaaaagatgtgataaatgcatttaacataaagaccatcgagatagagggatttgaagcagatgatatcattggtacagtatcaaaaattgcttccgaaagtgggatggatgtgcttatcgtcacaggcgacagagatgcgcttcagcttgtgtcggcaaatgtaaaagtaaaaatatgtaaaaaaggcataacgcagatggatgagtacgatgaaaaggcggtctttgaaaagtatgaagtgacgccgcttcaattcatagacttgaaagggcttatgggagacaaatcagacaacattccaggagtgcccaatataggggagaagacggccataaagcttgttaaagaatttggatcaattgaaaatttactgatgaatacagataagttaaaagggaaaataaaagaaaatgtagaaaacaatgcagaattagctgttttaagcaaacggcttgctacgattgagagaaatgttcctattgatattgatttgaatgaatacgcggttaaaaattacgatgtcaataagcttacagagctatttgaaaaattggaattttcaagcctcatctcagatttaaaagatgatagtcgtgatacaaaggatattaaagaatggcctgtaagagattttacatacgttaaaaatgttttaggaaagtttgatgttttgtcattgtatccattcatatatgatggaaagataaaagcagtatcatttgcttgcggtgacggatcgttttttgtagagattgatgattatgacaattttaaattgcttaataatgataagcttacgttgataggacacgatctgaaagattttttagtaaacatttcatactgcggtattgaacttaattgtaagattttagatacggccataatgacttatcttttaaatccgtctgagtcgaattacgacataagtcgcgtattgaaaaaatacttgaaagaggatttgcaaaacatagatgatatagtaggcaagggcaggaataaaaagagctacgatgacattgacaaaaagcttttagtcgattatatgtgttcagccgcatcaaacttatctaagttaaaagataagctcatgtcatttataaaagagatggagatggaagatcttttaaaaaatgtggaaattccgcttattgaagtgctaaaatctatggaggtgtacggctttacattagataaagatgtacttagaagtatttctaaagaaatagatgaaaagacagataagattgtaaaagatatttacgatgctgctggatacgaatttaatattaactctacaaagcagttatcagaatttttgtttgataaactgaatttgccagcaataaaaaagactaaaacagggtattcgactgacatggaagtccttgcagaacttataccgtacaatgacatagtaggagaaataatagaatatagacagcttatgaagcttaaatctacgtacatagatggcttcattcccatcatggatgaaaataatagggtccactctacgtttaaacaaacagttgctgctacagggagaattagctcaacagagcctaatctgcagaacatacctgtaagagaagaatttggcaggaggataagaaaggcatttgtatcaagttatgaagatgggcttataatatctgctgattattctcagattgagctaagggttcttgcacatctttcagaggatgaaaaacttattgagtcatttttgaacaacgaagatatacatttaaggacggcatcggaggtttttaaggtttcgaaagaagaagtgacaagtgaaatgagaaggcgggcgaaagctgtcaactttggtattgtatatggtataagcgattacggcttatctaaagacttaaagatttcgcgaaaagaagcgaaagaatacatagacaattattttgacaggtacaagggcgtcaaaaattacatcgactcaattgtcaaatttgcaaaggaaaatgggtatgttacgactatcttaaataggagaagatacataccggaaatcaattcaaaaaattttaaccaaagatctggtggcgagagaatggcaatgaatacacctattcaaggtagcgctgcggatataataaagatgtcgatggttaaagtatacaatgaattaaaggaaagaggattgaaatcaagacttattcttcaggtgcacgatgagcttataattgacacacatcctgatgaagttgaaatagtcaaggagcttctaaaatcaataatggaaaatatcataaagttgaaagttcctttagttgtagatatagggcaagggaaaaactggtatgatgcaaaataaaaggatcc

SEQ ID NO: 862 - DNA, 2678 bp, Artificial Sequence
  Description of Artificial Sequence: Synthetic Clostridium thermosulfurogenes DNA Polymerase F799H
atgaaatacctgctgccgaccgctgctgctggtctgctgctcctcgctgcccagccggcgatggccatggcgaaatttttgatcatagatggtaatagcttgatgtacagggcgtattttgccctgcctgatttgatgaacagcgaaggaatgcatacaaatgccatatacggtttttcaatgatgcttcttaaattgctggaggaggagaaaccagactacatagcaatagctttcgataaaaaggcttctacatttaggcacaaggagtacagtgcttataaaggaacccgccagtcgatgccagaagagctgatagaacaggtggatattttaaaagatgtgataaatgcatttaacataaagaccatcgagatagagggatttgaagcagatgatatcattggtacagtatcaaaaattgcttccgaaagtgggatggatgtgcttatcgtcacaggcgacagagatgcgcttcagcttgtgtcggcaaatgtaaaagtaaaaatatgtaaaaaaggcataacgcagatggatgagtacgatgaaaaggcggtctttgaaaagtatgaagtgacgccgcttcaattcatagacttgaaagggcttatgggagacaaatcagacaacattccaggagtgcccaatataggggagaagacggccataaagcttgttaaagaatttggatcaattgaaaatttactgatgaatacagataagttaaaagggaaaataaaagaaaatgtagaaaacaatgcagaattagctgttttaagcaaacggcttgctacgattgagagaaatgttcctattgatattgatttgaatgaatacgcggttaaaaattacgatgtcaataagcttacagagctatttgaaaaattggaattttcaagcctcatctcagatttaaaagatgatagtcgtgatacaaaggatattaaagaatggcctgtaagagattttacatacgttaaaaatgttttaggaaagtttgatgttttgtcattgtatccattcatatatgatggaaagataaaagcagtatcatttgcttgcggtgacggatcgttttttgtagagattgatgattatgacaattttaaattgcttaataatgataagcttacgttgataggacacgatctgaaagattttttagtaaacatttcatactgcggtattgaacttaattgtaagattttagatacggccataatgacttatcttttaaatccgtctgagtcgaattacgacataagtcgcgtattgaaaaaatacttgaaagaggatttgcaaaacatagatgatatagtaggcaagggcaggaataaaaagagctacgatgacattgacaaaaagcttttagtcgattatatgtgttcagccgcatcaaacttatctaagttaaaagataagctcatgtcatttataaaagagatggagatggaagatcttttaaaaaatgtggaaattccgcttattgaagtgctaaaatctatggaggtgtacggctttacattagataaagatgtacttagaagtatttctaaagaaatagatgaaaagacagataagattgtaaaagatatttacgatgctgctggatacgaatttaatattaactctacaaagcagttatcagaatttttgtttgataaactgaatttgccagcaataaaaaagactaaaacagggtattcgactgacatggaagtccttgcagaacttataccgtacaatgacatagtaggagaaataatagaatatagacagcttatgaagcttaaatctacgtacatagatggcttcattcccatcatggatgaaaataatagggtccactctacgtttaaacaaacagttgctgctacagggagaattagctcaacagagcctaatctgcagaacatacctgtaagagaagaatttggcaggaggataagaaaggcatttgtatcaagttatgaagatgggcttataatatctgctgattattctcagattgagctaagggttcttgcacatctttcagaggatgaaaaacttattgagtcatttttgaacaacgaagatatacatttaaggacggcatcggaggtttttaaggtttcgaaagaagaagtgacaagtgaaatgagaaggcgggcgaaagctgtcaactttggtattgtatatggtataagcgattacggcttatctaaagacttaaagatttcgcgaaaagaagcgaaagaatacatagacaattattttgacaggtacaagggcgtcaaaaattacatcgactcaattgtcaaatttgcaaaggaaaatgggtatgttacgactatcttaaataggagaagatacataccggaaatcaattcaaaaaattttaaccaaagatctcatggcgagagaatggcaatgaatacacctattcaaggtagcgctgcggatataataaagatgtcgatggttaaagtatacaatgaattaaaggaaagaggattgaaatcaagacttattcttcaggtgcacgatgagcttataattgacacacatcctgatgaagttgaaatagtcaaggagcttctaaaatcaataatggaaaatatcataaagttgaaagttcctttagttgtagatatagggcaagggaaaaactggtatgatgcaaaataaaaggatcc

SEQ ID NO: 863 - DNA, 2678 bp, Artificial Sequence
  Description of Artificial Sequence: Synthetic Clostridium thermosulfurogenes DNA Polymerase F799I
atgaaatacctgctgccgaccgctgctgctggtctgctgctcctcgctgcccagccggcgatggccatggcgaaatttttgatcatagatggtaatagcttgatgtacagggcgtattttgccctgcctgatttgatgaacagcgaaggaatgcatacaaatgccatatacggtttttcaatgatgcttcttaaattgctggaggaggagaaaccagactacatagcaatagctttcgataaaaaggcttctacatttaggcacaaggagtacagtgcttataaaggaacccgccagtcgatgccagaagagctgatagaacaggtggatattttaaaagatgtgataaatgcatttaacataaagaccatcgagatagagggatttgaagcagatgatatcattggtacagtatcaaaaattgcttccgaaagtgggatggatgtgcttatcgtcacaggcgacagagatgcgcttcagcttgtgtcggcaaatgtaaaagtaaaaatatgtaaaaaaggcataacgcagatggatgagtacgatgaaaaggcggtctttgaaaagtatgaagtgacgccgcttcaattcatagacttgaaagggcttatgggagacaaatcagacaacattccaggagtgcccaatataggggagaagacggccataaagcttgttaaagaatttggatcaattgaaaatttactgatgaatacagataagttaaaagggaaaataaaagaaaatgtagaaaacaatgcagaattagctgttttaagcaaacggcttgctacgattgagagaaatgttcctattgatattgatttgaatgaatacgcggttaaaaattacgatgtcaataagcttacagagctatttgaaaaattggaattttcaagcctcatctcagatttaaaagatgatagtcgtgatacaaaggatattaaagaatggcctgtaagagattttacatacgttaaaaatgttttaggaaagtttgatgttttgtcattgtatccattcatatatgatggaaagataaaagcagtatcatttgcttgcggtgacggatcgttttttgtagagattgatgattatgacaattttaaattgcttaataatgataagcttacgttgataggacacgatctgaaagattttttagtaaacatttcatactgcggtattgaacttaattgtaagattttagatacggccataatgacttatcttttaaatccgtctgagtcgaattacgacataagtcgcgtattgaaaaaatacttgaaagaggatttgcaaaacatagatgatatagtaggcaagggcaggaataaaaagagctacgatgacattgacaaaaagcttttagtcgattatatgtgttcagccgcatcaaacttatctaagttaaaagataagctcatgtcatttataaaagagatggagatggaagatcttttaaaaaatgtggaaattccgcttattgaagtgctaaaatctatggaggtgtacggctttacattagataaagatgtacttagaagtatttctaaagaaatagatgaaaagacagataagattgtaaaagatatttacgatgctgctggatacgaatttaatattaactctacaaagcagttatcagaatttttgtttgataaactgaatttgccagcaataaaaaagactaaaacagggtattcgactgacatggaagtccttgcagaacttataccgtacaatgacatagtaggagaaataatagaatatagacagcttatgaagcttaaatctacgtacatagatggcttcattcccatcatggatgaaaataatagggtccactctacgtttaaacaaacagttgctgctacagggagaattagctcaacagagcctaatctgcagaacatacctgtaagagaagaatttggcaggaggataagaaaggcatttgtatcaagttatgaagatgggcttataatatctgctgattattctcagattgagctaagggttcttgcacatctttcagaggatgaaaaacttattgagtcatttttgaacaacgaagatatacatttaaggacggcatcggaggtttttaaggtttcgaaagaagaagtgacaagtgaaatgagaaggcgggcgaaagctgtcaactttggtattgtatatggtataagcgattacggcttatctaaagacttaaagatttcgcgaaaagaagcgaaagaatacatagacaattattttgacaggtacaagggcgtcaaaaattacatcgactcaattgtcaaatttgcaaaggaaaatgggtatgttacgactatcttaaataggagaagatacataccggaaatcaattcaaaaaattttaaccaaagatctattggcgagagaatggcaatgaatacacctattcaaggtagcgctgcggatataataaagatgtcgatggttaaagtatacaatgaattaaaggaaagaggattgaaatcaagacttattcttcaggtgcacgatgagcttataattgacacacatcctgatgaagttgaaatagtcaaggagcttctaaaatcaataatggaaaatatcataaagttgaaagttcctttagttgtagatatagggcaagggaaaaactggtatgatgcaaaataaaaggatcc

SEQ ID NO: 864 - DNA, 2678 bp, Artificial Sequence
  Description of Artificial Sequence: Synthetic Clostridium thermosulfurogenes DNA Polymerase F799L
atgaaatacctgctgccgaccgctgctgctggtctgctgctcctcgctgcccagccggcgatggccatggcgaaatttttgatcatagatggtaatagcttgatgtacagggcgtattttgccctgcctgatttgatgaacagcgaaggaatgcatacaaatgccatatacggtttttcaatgatgcttcttaaattgctggaggaggagaaaccagactacatagcaatagctttcgataaaaaggcttctacatttaggcacaaggagtacagtgcttataaaggaacccgccagtcgatgccagaagagctgatagaacaggtggatattttaaaagatgtgataaatgcatttaacataaagaccatcgagatagagggatttgaagcagatgatatcattggtacagtatcaaaaattgcttccgaaagtgggatggatgtgcttatcgtcacaggcgacagagatgcgcttcagcttgtgtcggcaaatgtaaaagtaaaaatatgtaaaaaaggcataacgcagatggatgagtacgatgaaaaggcggtctttgaaaagtatgaagtgacgccgcttcaattcatagacttgaaagggcttatgggagacaaatcagacaacattccaggagtgcccaatataggggagaagacggccataaagcttgttaaagaatttggatcaattgaaaatttactgatgaatacagataagttaaaagggaaaataaaagaaaatgtagaaaacaatgcagaattagctgttttaagcaaacggcttgctacgattgagagaaatgttcctattgatattgatttgaatgaatacgcggttaaaaattacgatgtcaataagcttacagagctatttgaaaaattggaattttcaagcctcatctcagatttaaaagatgatagtcgtgatacaaaggatattaaagaatggcctgtaagagattttacatacgttaaaaatgttttaggaaagtttgatgttttgtcattgtatccattcatatatgatggaaagataaaagcagtatcatttgcttgcggtgacggatcgttttttgtagagattgatgattatgacaattttaaattgcttaataatgataagcttacgttgataggacacgatctgaaagattttttagtaaacatttcatactgcggtattgaacttaattgtaagattttagatacggccataatgacttatcttttaaatccgtctgagtcgaattacgacataagtcgcgtattgaaaaaatacttgaaagaggatttgcaaaacatagatgatatagtaggcaagggcaggaataaaaagagctacgatgacattgacaaaaagcttttagtcgattatatgtgttcagccgcatcaaacttatctaagttaaaagataagctcatgtcatttataaaagagatggagatggaagatcttttaaaaaatgtggaaattccgcttattgaagtgctaaaatctatggaggtgtacggctttacattagataaagatgtacttagaagtatttctaaagaaatagatgaaaagacagataagattgtaaaagatatttacgatgctgctggatacgaatttaatattaactctacaaagcagttatcagaatttttgtttgataaactgaatttgccagcaataaaaaagactaaaacagggtattcgactgacatggaagtccttgcagaacttataccgtacaatgacatagtaggagaaataatagaatatagacagcttatgaagcttaaatctacgtacatagatggcttcattcccatcatggatgaaaataatagggtccactctacgtttaaacaaacagttgctgctacagggagaattagctcaacagagcctaatctgcagaacatacctgtaagagaagaatttggcaggaggataagaaaggcatttgtatcaagttatgaagatgggcttataatatctgctgattattctcagattgagctaagggttcttgcacatctttcagaggatgaaaaacttattgagtcatttttgaacaacgaagatatacatttaaggacggcatcggaggtttttaaggtttcgaaagaagaagtgacaagtgaaatgagaaggcgggcgaaagctgtcaactttggtattgtatatggtataagcgattacggcttatctaaagacttaaagatttcgcgaaaagaagcgaaagaatacatagacaattattttgacaggtacaagggcgtcaaaaattacatcgactcaattgtcaaatttgcaaaggaaaatgggtatgttacgactatcttaaataggagaagatacataccggaaatcaattcaaaaaattttaaccaaagatctcttggcgagagaatggcaatgaatacacctattcaaggtagcgctgcggatataataaagatgtcgatggttaaagtatacaatgaattaaaggaaagaggattgaaatcaagacttattcttcaggtgcacgatgagcttataattgacacacatcctgatgaagttgaaatagtcaaggagcttctaaaatcaataatggaaaatatcataaagttgaaagttcctttagttgtagatatagggcaagggaaaaactggtatgatgcaaaataaaaggatcc

SEQ ID NO: 865 - DNA, 2678 bp, Artificial Sequence
  Description of Artificial Sequence: Synthetic Clostridium thermosulfurogenes DNA Polymerase F799K
atgaaatacctgctgccgaccgctgctgctggtctgctgctcctcgctgcccagccggcgatggccatggcgaaatttttgatcatagatggtaatagcttgatgtacagggcgtattttgccctgcctgatttgatgaacagcgaaggaatgcatacaaatgccatatacggtttttcaatgatgcttcttaaattgctggaggaggagaaaccagactacatagcaatagctttcgataaaaaggcttctacatttaggcacaaggagtacagtgcttataaaggaacccgccagtcgatgccagaagagctgatagaacaggtggatattttaaaagatgtgataaatgcatttaacataaagaccatcgagatagagggatttgaagcagatgatatcattggtacagtatcaaaaattgcttccgaaagtgggatggatgtgcttatcgtcacaggcgacagagatgcgcttcagcttgtgtcggcaaatgtaaaagtaaaaatatgtaaaaaaggcataacgcagatggatgagtacgatgaaaaggcggtctttgaaaagtatgaagtgacgccgcttcaattcatagacttgaaagggcttatgggagacaaatcagacaacattccaggagtgcccaatataggggagaagacggccataaagcttgttaaagaatttggatcaattgaaaatttactgatgaatacagataagttaaaagggaaaataaaagaaaatgtagaaaacaatgcagaattagctgttttaagcaaacggcttgctacgattgagagaaatgttcctattgatattgatttgaatgaatacgcggttaaaaattacgatgtcaataagcttacagagctatttgaaaaattggaattttcaagcctcatctcagatttaaaagatgatagtcgtgatacaaaggatattaaagaatggcctgtaagagattttacatacgttaaaaatgttttaggaaagtttgatgttttgtcattgtatccattcatatatgatggaaagataaaagcagtatcatttgcttgcggtgacggatcgttttttgtagagattgatgattatgacaattttaaattgcttaataatgataagcttacgttgataggacacgatctgaaagattttttagtaaacatttcatactgcggtattgaacttaattgtaagattttagatacggccataatgacttatcttttaaatccgtctgagtcgaattacgacataagtcgcgtattgaaaaaatacttgaaagaggatttgcaaaacatagatgatatagtaggcaagggcaggaataaaaagagctacgatgacattgacaaaaagcttttagtcgattatatgtgttcagccgcatcaaacttatctaagttaaaagataagctcatgtcatttataaaagagatggagatggaagatcttttaaaaaatgtggaaattccgcttattgaagtgctaaaatctatggaggtgtacggctttacattagataaagatgtacttagaagtatttctaaagaaatagatgaaaagacagataagattgtaaaagatatttacgatgctgctggatacgaatttaatattaactctacaaagcagttatcagaatttttgtttgataaactgaatttgccagcaataaaaaagactaaaacagggtattcgactgacatggaagtccttgcagaacttataccgtacaatgacatagtaggagaaataatagaatatagacagcttatgaagcttaaatctacgtacatagatggcttcattcccatcatggatgaaaataatagggtccactctacgtttaaacaaacagttgctgctacagggagaattagctcaacagagcctaatctgcagaacatacctgtaagagaagaatttggcaggaggataagaaaggcatttgtatcaagttatgaagatgggcttataatatctgctgattattctcagattgagctaagggttcttgcacatctttcagaggatgaaaaacttattgagtcatttttgaacaacgaagatatacatttaaggacggcatcggaggtttttaaggtttcgaaagaagaagtgacaagtgaaatgagaaggcgggcgaaagctgtcaactttggtattgtatatggtataagcgattacggcttatctaaagacttaaagatttcgcgaaaagaagcgaaagaatacatagacaattattttgacaggtacaagggcgtcaaaaattacatcgactcaattgtcaaatttgcaaaggaaaatgggtatgttacgactatcttaaataggagaagatacataccggaaatcaattcaaaaaattttaaccaaagatctaaaggcgagagaatggcaatgaatacacctattcaaggtagcgctgcggatataataaagatgtcgatggttaaagtatacaatgaattaaaggaaagaggattgaaatcaagacttattcttcaggtgcacgatgagcttataattgacacacatcctgatgaagttgaaatagtcaaggagcttctaaaatcaataatggaaaatatcataaagttgaaagttcctttagttgtagatatagggcaagggaaaaactggtatgatgcaaaataaaaggatcc

SEQ ID NO: 866 - DNA, 2678 bp, Artificial Sequence
  Description of Artificial Sequence: Synthetic Clostridium thermosulfurogenes DNA Polymerase F799M
atgaaatacctgctgccgaccgctgctgctggtctgctgctcctcgctgcccagccggcgatggccatggcgaaatttttgatcatagatggtaatagcttgatgtacagggcgtattttgccctgcctgatttgatgaacagcgaaggaatgcatacaaatgccatatacggtttttcaatgatgcttcttaaattgctggaggaggagaaaccagactacatagcaatagctttcgataaaaaggcttctacatttaggcacaaggagtacagtgcttataaaggaacccgccagtcgatgccagaagagctgatagaacaggtggatattttaaaagatgtgataaatgcatttaacataaagaccatcgagatagagggatttgaagcagatgatatcattggtacagtatcaaaaattgcttccgaaagtgggatggatgtgcttatcgtcacaggcgacagagatgcgcttcagcttgtgtcggcaaatgtaaaagtaaaaatatgtaaaaaaggcataacgcagatggatgagtacgatgaaaaggcggtctttgaaaagtatgaagtgacgccgcttcaattcatagacttgaaagggcttatgggagacaaatcagacaacattccaggagtgcccaatataggggagaagacggccataaagcttgttaaagaatttggatcaattgaaaatttactgatgaatacagataagttaaaagggaaaataaaagaaaatgtagaaaacaatgcagaattagctgttttaagcaaacggcttgctacgattgagagaaatgttcctattgatattgatttgaatgaatacgcggttaaaaattacgatgtcaataagcttacagagctatttgaaaaattggaattttcaagcctcatctcagatttaaaagatgatagtcgtgatacaaaggatattaaagaatggcctgtaagagattttacatacgttaaaaatgttttaggaaagtttgatgttttgtcattgtatccattcatatatgatggaaagataaaagcagtatcatttgcttgcggtgacggatcgttttttgtagagattgatgattatgacaattttaaattgcttaataatgataagcttacgttgataggacacgatctgaaagattttttagtaaacatttcatactgcggtattgaacttaattgtaagattttagatacggccataatgacttatcttttaaatccgtctgagtcgaattacgacataagtcgcgtattgaaaaaatacttgaaagaggatttgcaaaacatagatgatatagtaggcaagggcaggaataaaaagagctacgatgacattgacaaaaagcttttagtcgattatatgtgttcagccgcatcaaacttatctaagttaaaagataagctcatgtcatttataaaagagatggagatggaagatcttttaaaaaatgtggaaattccgcttattgaagtgctaaaatctatggaggtgtacggctttacattagataaagatgtacttagaagtatttctaaagaaatagatgaaaagacagataagattgtaaaagatatttacgatgctgctggatacgaatttaatattaactctacaaagcagttatcagaatttttgtttgataaactgaatttgccagcaataaaaaagactaaaacagggtattcgactgacatggaagtccttgcagaacttataccgtacaatgacatagtaggagaaataatagaatatagacagcttatgaagcttaaatctacgtacatagatggcttcattcccatcatggatgaaaataatagggtccactctacgtttaaacaaacagttgctgctacagggagaattagctcaacagagcctaatctgcagaacatacctgtaagagaagaatttggcaggaggataagaaaggcatttgtatcaagttatgaagatgggcttataatatctgctgattattctcagattgagctaagggttcttgcacatctttcagaggatgaaaaacttattgagtcatttttgaacaacgaagatatacatttaaggacggcatcggaggtttttaaggtttcgaaagaagaagtgacaagtgaaatgagaaggcgggcgaaagctgtcaactttggtattgtatatggtataagcgattacggcttatctaaagacttaaagatttcgcgaaaagaagcgaaagaatacatagacaattattttgacaggtacaagggcgtcaaaaattacatcgactcaattgtcaaatttgcaaaggaaaatgggtatgttacgactatcttaaataggagaagatacataccggaaatcaattcaaaaaattttaaccaaagatctatgggcgagagaatggcaatgaatacacctattcaaggtagcgctgcggatataataaagatgtcgatggttaaagtatacaatgaattaaaggaaagaggattgaaatcaagacttattcttcaggtgcacgatgagcttataattgacacacatcctgatgaagttgaaatagtcaaggagcttctaaaatcaataatggaaaatatcataaagttgaaagttcctttagttgtagatatagggcaagggaaaaactggtatgatgcaaaataaaaggatcc

SEQ ID NO: 867 - DNA, 2678 bp, Artificial Sequence
  Description of Artificial Sequence: Synthetic Clostridium thermosulfurogenes DNA Polymerase F799P
atgaaatacctgctgccgaccgctgctgctggtctgctgctcctcgctgcccagccggcgatggccatggcgaaatttttgatcatagatggtaatagcttgatgtacagggcgtattttgccctgcctgatttgatgaacagcgaaggaatgcatacaaatgccatatacggtttttcaatgatgcttcttaaattgctggaggaggagaaaccagactacatagcaatagctttcgataaaaaggcttctacatttaggcacaaggagtacagtgcttataaaggaacccgccagtcgatgccagaagagctgatagaacaggtggatattttaaaagatgtgataaatgcatttaacataaagaccatcgagatagagggatttgaagcagatgatatcattggtacagtatcaaaaattgcttccgaaagtgggatggatgtgcttatcgtcacaggcgacagagatgcgcttcagcttgtgtcggcaaatgtaaaagtaaaaatatgtaaaaaaggcataacgcagatggatgagtacgatgaaaaggcggtctttgaaaagtatgaagtgacgccgcttcaattcatagacttgaaagggcttatgggagacaaatcagacaacattccaggagtgcccaatataggggagaagacggccataaagcttgttaaagaatttggatcaattgaaaatttactgatgaatacagataagttaaaagggaaaataaaagaaaatgtagaaaacaatgcagaattagctgttttaagcaaacggcttgctacgattgagagaaatgttcctattgatattgatttgaatgaatacgcggttaaaaattacgatgtcaataagcttacagagctatttgaaaaattggaattttcaagcctcatctcagatttaaaagatgatagtcgtgatacaaaggatattaaagaatggcctgtaagagattttacatacgttaaaaatgttttaggaaagtttgatgttttgtcattgtatccattcatatatgatggaaagataaaagcagtatcatttgcttgcggtgacggatcgttttttgtagagattgatgattatgacaattttaaattgcttaataatgataagcttacgttgataggacacgatctgaaagattttttagtaaacatttcatactgcggtattgaacttaattgtaagattttagatacggccataatgacttatcttttaaatccgtctgagtcgaattacgacataagtcgcgtattgaaaaaatacttgaaagaggatttgcaaaacatagatgatatagtaggcaagggcaggaataaaaagagctacgatgacattgacaaaaagcttttagtcgattatatgtgttcagccgcatcaaacttatctaagttaaaagataagctcatgtcatttataaaagagatggagatggaagatcttttaaaaaatgtggaaattccgcttattgaagtgctaaaatctatggaggtgtacggctttacattagataaagatgtacttagaagtatttctaaagaaatagatgaaaagacagataagattgtaaaagatatttacgatgctgctggatacgaatttaatattaactctacaaagcagttatcagaatttttgtttgataaactgaatttgccagcaataaaaaagactaaaacagggtattcgactgacatggaagtccttgcagaacttataccgtacaatgacatagtaggagaaataatagaatatagacagcttatgaagcttaaatctacgtacatagatggcttcattcccatcatggatgaaaataatagggtccactctacgtttaaacaaacagttgctgctacagggagaattagctcaacagagcctaatctgcagaacatacctgtaagagaagaatttggcaggaggataagaaaggcatttgtatcaagttatgaagatgggcttataatatctgctgattattctcagattgagctaagggttcttgcacatctttcagaggatgaaaaacttattgagtcatttttgaacaacgaagatatacatttaaggacggcatcggaggtttttaaggtttcgaaagaagaagtgacaagtgaaatgagaaggcgggcgaaagctgtcaactttggtattgtatatggtataagcgattacggcttatctaaagacttaaagatttcgcgaaaagaagcgaaagaatacatagacaattattttgacaggtacaagggcgtcaaaaattacatcgactcaattgtcaaatttgcaaaggaaaatgggtatgttacgactatcttaaataggagaagatacataccggaaatcaattcaaaaaattttaaccaaagatctcctggcgagagaatggcaatgaatacacctattcaaggtagcgctgcggatataataaagatgtcgatggttaaagtatacaatgaattaaaggaaagaggattgaaatcaagacttattcttcaggtgcacgatgagcttataattgacacacatcctgatgaagttgaaatagtcaaggagcttctaaaatcaataatggaaaatatcataaagttgaaagttcctttagttgtagatatagggcaagggaaaaactggtatgatgcaaaataaaaggatcc

SEQ ID NO: 868 - DNA, 2678 bp, Artificial Sequence
  Description of Artificial Sequence: Synthetic Clostridium thermosulfurogenes DNA Polymerase F799S
atgaaatacctgctgccgaccgctgctgctggtctgctgctcctcgctgcccagccggcgatggccatggcgaaatttttgatcatagatggtaatagcttgatgtacagggcgtattttgccctgcctgatttgatgaacagcgaaggaatgcatacaaatgccatatacggtttttcaatgatgcttcttaaattgctggaggaggagaaaccagactacatagcaatagctttcgataaaaaggcttctacatttaggcacaaggagtacagtgcttataaaggaacccgccagtcgatgccagaagagctgatagaacaggtggatattttaaaagatgtgataaatgcatttaacataaagaccatcgagatagagggatttgaagcagatgatatcattggtacagtatcaaaaattgcttccgaaagtgggatggatgtgcttatcgtcacaggcgacagagatgcgcttcagcttgtgtcggcaaatgtaaaagtaaaaatatgtaaaaaaggcataacgcagatggatgagtacgatgaaaaggcggtctttgaaaagtatgaagtgacgccgcttcaattcatagacttgaaagggcttatgggagacaaatcagacaacattccaggagtgcccaatataggggagaagacggccataaagcttgttaaagaatttggatcaattgaaaatttactgatgaatacagataagttaaaagggaaaataaaagaaaatgtagaaaacaatgcagaattagctgttttaagcaaacggcttgctacgattgagagaaatgttcctattgatattgatttgaatgaatacgcggttaaaaattacgatgtcaataagcttacagagctatttgaaaaattggaattttcaagcctcatctcagatttaaaagatgatagtcgtgatacaaaggatattaaagaatggcctgtaagagattttacatacgttaaaaatgttttaggaaagtttgatgttttgtcattgtatccattcatatatgatggaaagataaaagcagtatcatttgcttgcggtgacggatcgttttttgtagagattgatgattatgacaattttaaattgcttaataatgataagcttacgttgataggacacgatctgaaagattttttagtaaacatttcatactgcggtattgaacttaattgtaagattttagatacggccataatgacttatcttttaaatccgtctgagtcgaattacgacataagtcgcgtattgaaaaaatacttgaaagaggatttgcaaaacatagatgatatagtaggcaagggcaggaataaaaagagctacgatgacattgacaaaaagcttttagtcgattatatgtgttcagccgcatcaaacttatctaagttaaaagataagctcatgtcatttataaaagagatggagatggaagatcttttaaaaaatgtggaaattccgcttattgaagtgctaaaatctatggaggtgtacggctttacattagataaagatgtacttagaagtatttctaaagaaatagatgaaaagacagataagattgtaaaagatatttacgatgctgctggatacgaatttaatattaactctacaaagcagttatcagaatttttgtttgataaactgaatttgccagcaataaaaaagactaaaacagggtattcgactgacatggaagtccttgcagaacttataccgtacaatgacatagtaggagaaataatagaatatagacagcttatgaagcttaaatctacgtacatagatggcttcattcccatcatggatgaaaataatagggtccactctacgtttaaacaaacagttgctgctacagggagaattagctcaacagagcctaatctgcagaacatacctgtaagagaagaatttggcaggaggataagaaaggcatttgtatcaagttatgaagatgggcttataatatctgctgattattctcagattgagctaagggttcttgcacatctttcagaggatgaaaaacttattgagtcatttttgaacaacgaagatatacatttaaggacggcatcggaggtttttaaggtttcgaaagaagaagtgacaagtgaaatgagaaggcgggcgaaagctgtcaactttggtattgtatatggtataagcgattacggcttatctaaagacttaaagatttcgcgaaaagaagcgaaagaatacatagacaattattttgacaggtacaagggcgtcaaaaattacatcgactcaattgtcaaatttgcaaaggaaaatgggtatgttacgactatcttaaataggagaagatacataccggaaatcaattcaaaaaattttaaccaaagatcttctggcgagagaatggcaatgaatacacctattcaaggtagcgctgcggatataataaagatgtcgatggttaaagtatacaatgaattaaaggaaagaggattgaaatcaagacttattcttcaggtgcacgatgagcttataattgacacacatcctgatgaagttgaaatagtcaaggagcttctaaaatcaataatggaaaatatcataaagttgaaagttcctttagttgtagatatagggcaagggaaaaactggtatgatgcaaaataaaaggatcc

SEQ ID NO: 869 - DNA, 2678 bp, Artificial Sequence
  Description of Artificial Sequence: Synthetic Clostridium thermosulfurogenes DNA Polymerase F799T
atgaaatacctgctgccgaccgctgctgctggtctgctgctcctcgctgcccagccggcgatggccatggcgaaatttttgatcatagatggtaatagcttgatgtacagggcgtattttgccctgcctgatttgatgaacagcgaaggaatgcatacaaatgccatatacggtttttcaatgatgcttcttaaattgctggaggaggagaaaccagactacatagcaatagctttcgataaaaaggcttctacatttaggcacaaggagtacagtgcttataaaggaacccgccagtcgatgccagaagagctgatagaacaggtggatattttaaaagatgtgataaatgcatttaacataaagaccatcgagatagagggatttgaagcagatgatatcattggtacagtatcaaaaattgcttccgaaagtgggatggatgtgcttatcgtcacaggcgacagagatgcgcttcagcttgtgtcggcaaatgtaaaagtaaaaatatgtaaaaaaggcataacgcagatggatgagtacgatgaaaaggcggtctttgaaaagtatgaagtgacgccgcttcaattcatagacttgaaagggcttatgggagacaaatcagacaacattccaggagtgcccaatataggggagaagacggccataaagcttgttaaagaatttggatcaattgaaaatttactgatgaatacagataagttaaaagggaaaataaaagaaaatgtagaaaacaatgcagaattagctgttttaagcaaacggcttgctacgattgagagaaatgttcctattgatattgatttgaatgaatacgcggttaaaaattacgatgtcaataagcttacagagctatttgaaaaattggaattttcaagcctcatctcagatttaaaagatgatagtcgtgatacaaaggatattaaagaatggcctgtaagagattttacatacgttaaaaatgttttaggaaagtttgatgttttgtcattgtatccattcatatatgatggaaagataaaagcagtatcatttgcttgcggtgacggatcgttttttgtagagattgatgattatgacaattttaaattgcttaataatgataagcttacgttgataggacacgatctgaaagattttttagtaaacatttcatactgcggtattgaacttaattgtaagattttagatacggccataatgacttatcttttaaatccgtctgagtcgaattacgacataagtcgcgtattgaaaaaatacttgaaagaggatttgcaaaacatagatgatatagtaggcaagggcaggaataaaaagagctacgatgacattgacaaaaagcttttagtcgattatatgtgttcagccgcatcaaacttatctaagttaaaagataagctcatgtcatttataaaagagatggagatggaagatcttttaaaaaatgtggaaattccgcttattgaagtgctaaaatctatggaggtgtacggctttacattagataaagatgtacttagaagtatttctaaagaaatagatgaaaagacagataagattgtaaaagatatttacgatgctgctggatacgaatttaatattaactctacaaagcagttatcagaatttttgtttgataaactgaatttgccagcaataaaaaagactaaaacagggtattcgactgacatggaagtccttgcagaacttataccgtacaatgacatagtaggagaaataatagaatatagacagcttatgaagcttaaatctacgtacatagatggcttcattcccatcatggatgaaaataatagggtccactctacgtttaaacaaacagttgctgctacagggagaattagctcaacagagcctaatctgcagaacatacctgtaagagaagaatttggcaggaggataagaaaggcatttgtatcaagttatgaagatgggcttataatatctgctgattattctcagattgagctaagggttcttgcacatctttcagaggatgaaaaacttattgagtcatttttgaacaacgaagatatacatttaaggacggcatcggaggtttttaaggtttcgaaagaagaagtgacaagtgaaatgagaaggcgggcgaaagctgtcaactttggtattgtatatggtataagcgattacggcttatctaaagacttaaagatttcgcgaaaagaagcgaaagaatacatagacaattattttgacaggtacaagggcgtcaaaaattacatcgactcaattgtcaaatttgcaaaggaaaatgggtatgttacgactatcttaaataggagaagatacataccggaaatcaattcaaaaaattttaaccaaagatctactggcgagagaatggcaatgaatacacctattcaaggtagcgctgcggatataataaagatgtcgatggttaaagtatacaatgaattaaaggaaagaggattgaaatcaagacttattcttcaggtgcacgatgagcttataattgacacacatcctgatgaagttgaaatagtcaaggagcttctaaaatcaataatggaaaatatcataaagttgaaagttcctttagttgtagatatagggcaagggaaaaactggtatgatgcaaaataaaaggatcc

SEQ ID NO: 870 - DNA, 2678 bp, Artificial Sequence
  Description of Artificial Sequence: Synthetic Clostridium thermosulfurogenes DNA Polymerase F799W
atgaaatacctgctgccgaccgctgctgctggtctgctgctcctcgctgcccagccggcgatggccatggcgaaatttttgatcatagatggtaatagcttgatgtacagggcgtattttgccctgcctgatttgatgaacagcgaaggaatgcatacaaatgccatatacggtttttcaatgatgcttcttaaattgctggaggaggagaaaccagactacatagcaatagctttcgataaaaaggcttctacatttaggcacaaggagtacagtgcttataaaggaacccgccagtcgatgccagaagagctgatagaacaggtggatattttaaaagatgtgataaatgcatttaacataaagaccatcgagatagagggatttgaagcagatgatatcattggtacagtatcaaaaattgcttccgaaagtgggatggatgtgcttatcgtcacaggcgacagagatgcgcttcagcttgtgtcggcaaatgtaaaagtaaaaatatgtaaaaaaggcataacgcagatggatgagtacgatgaaaaggcggtctttgaaaagtatgaagtgacgccgcttcaattcatagacttgaaagggcttatgggagacaaatcagacaacattccaggagtgcccaatataggggagaagacggccataaagcttgttaaagaatttggatcaattgaaaatttactgatgaatacagataagttaaaagggaaaataaaagaaaatgtagaaaacaatgcagaattagctgttttaagcaaacggcttgctacgattgagagaaatgttcctattgatattgatttgaatgaatacgcggttaaaaattacgatgtcaataagcttacagagctatttgaaaaattggaattttcaagcctcatctcagatttaaaagatgatagtcgtgatacaaaggatattaaagaatggcctgtaagagattttacatacgttaaaaatgttttaggaaagtttgatgttttgtcattgtatccattcatatatgatggaaagataaaagcagtatcatttgcttgcggtgacggatcgttttttgtagagattgatgattatgacaattttaaattgcttaataatgataagcttacgttgataggacacgatctgaaagattttttagtaaacatttcatactgcggtattgaacttaattgtaagattttagatacggccataatgacttatcttttaaatccgtctgagtcgaattacgacataagtcgcgtattgaaaaaatacttgaaagaggatttgcaaaacatagatgatatagtaggcaagggcaggaataaaaagagctacgatgacattgacaaaaagcttttagtcgattatatgtgttcagccgcatcaaacttatctaagttaaaagataagctcatgtcatttataaaagagatggagatggaagatcttttaaaaaatgtggaaattccgcttattgaagtgctaaaatctatggaggtgtacggctttacattagataaagatgtacttagaagtatttctaaagaaatagatgaaaagacagataagattgtaaaagatatttacgatgctgctggatacgaatttaatattaactctacaaagcagttatcagaatttttgtttgataaactgaatttgccagcaataaaaaagactaaaacagggtattcgactgacatggaagtccttgcagaacttataccgtacaatgacatagtaggagaaataatagaatatagacagcttatgaagcttaaatctacgtacatagatggcttcattcccatcatggatgaaaataatagggtccactctacgtttaaacaaacagttgctgctacagggagaattagctcaacagagcctaatctgcagaacatacctgtaagagaagaatttggcaggaggataagaaaggcatttgtatcaagttatgaagatgggcttataatatctgctgattattctcagattgagctaagggttcttgcacatctttcagaggatgaaaaacttattgagtcatttttgaacaacgaagatatacatttaaggacggcatcggaggtttttaaggtttcgaaagaagaagtgacaagtgaaatgagaaggcgggcgaaagctgtcaactttggtattgtatatggtataagcgattacggcttatctaaagacttaaagatttcgcgaaaagaagcgaaagaatacatagacaattattttgacaggtacaagggcgtcaaaaattacatcgactcaattgtcaaatttgcaaaggaaaatgggtatgttacgactatcttaaataggagaagatacataccggaaatcaattcaaaaaattttaaccaaagatcttggggcgagagaatggcaatgaatacacctattcaaggtagcgctgcggatataataaagatgtcgatggttaaagtatacaatgaattaaaggaaagaggattgaaatcaagacttattcttcaggtgcacgatgagcttataattgacacacatcctgatgaagttgaaatagtcaaggagcttctaaaatcaataatggaaaatatcataaagttgaaagttcctttagttgtagatatagggcaagggaaaaactggtatgatgcaaaataaaaggatcc

SEQ ID NO: 871 - DNA, 2678 bp, Artificial Sequence
  Description of Artificial Sequence: Synthetic Clostridium thermosulfurogenes DNA Polymerase F799Y
atgaaatacctgctgccgaccgctgctgctggtctgctgctcctcgctgcccagccggcgatggccatggcgaaatttttgatcatagatggtaatagcttgatgtacagggcgtattttgccctgcctgatttgatgaacagcgaaggaatgcatacaaatgccatatacggtttttcaatgatgcttcttaaattgctggaggaggagaaaccagactacatagcaatagctttcgataaaaaggcttctacatttaggcacaaggagtacagtgcttataaaggaacccgccagtcgatgccagaagagctgatagaacaggtggatattttaaaagatgtgataaatgcatttaacataaagaccatcgagatagagggatttgaagcagatgatatcattggtacagtatcaaaaattgcttccgaaagtgggatggatgtgcttatcgtcacaggcgacagagatgcgcttcagcttgtgtcggcaaatgtaaaagtaaaaatatgtaaaaaaggcataacgcagatggatgagtacgatgaaaaggcggtctttgaaaagtatgaagtgacgccgcttcaattcatagacttgaaagggcttatgggagacaaatcagacaacattccaggagtgcccaatataggggagaagacggccataaagcttgttaaagaatttggatcaattgaaaatttactgatgaatacagataagttaaaagggaaaataaaagaaaatgtagaaaacaatgcagaattagctgttttaagcaaacggcttgctacgattgagagaaatgttcctattgatattgatttgaatgaatacgcggttaaaaattacgatgtcaataagcttacagagctatttgaaaaattggaattttcaagcctcatctcagatttaaaagatgatagtcgtgatacaaaggatattaaagaatggcctgtaagagattttacatacgttaaaaatgttttaggaaagtttgatgttttgtcattgtatccattcatatatgatggaaagataaaagcagtatcatttgcttgcggtgacggatcgttttttgtagagattgatgattatgacaattttaaattgcttaataatgataagcttacgttgataggacacgatctgaaagattttttagtaaacatttcatactgcggtattgaacttaattgtaagattttagatacggccataatgacttatcttttaaatccgtctgagtcgaattacgacataagtcgcgtattgaaaaaatacttgaaagaggatttgcaaaacatagatgatatagtaggcaagggcaggaataaaaagagctacgatgacattgacaaaaagcttttagtcgattatatgtgttcagccgcatcaaacttatctaagttaaaagataagctcatgtcatttataaaagagatggagatggaagatcttttaaaaaatgtggaaattccgcttattgaagtgctaaaatctatggaggtgtacggctttacattagataaagatgtacttagaagtatttctaaagaaatagatgaaaagacagataagattgtaaaagatatttacgatgctgctggatacgaatttaatattaactctacaaagcagttatcagaatttttgtttgataaactgaatttgccagcaataaaaaagactaaaacagggtattcgactgacatggaagtccttgcagaacttataccgtacaatgacatagtaggagaaataatagaatatagacagcttatgaagcttaaatctacgtacatagatggcttcattcccatcatggatgaaaataatagggtccactctacgtttaaacaaacagttgctgctacagggagaattagctcaacagagcctaatctgcagaacatacctgtaagagaagaatttggcaggaggataagaaaggcatttgtatcaagttatgaagatgggcttataatatctgctgattattctcagattgagctaagggttcttgcacatctttcagaggatgaaaaacttattgagtcatttttgaacaacgaagatatacatttaaggacggcatcggaggtttttaaggtttcgaaagaagaagtgacaagtgaaatgagaaggcgggcgaaagctgtcaactttggtattgtatatggtataagcgattacggcttatctaaagacttaaagatttcgcgaaaagaagcgaaagaatacatagacaattattttgacaggtacaagggcgtcaaaaattacatcgactcaattgtcaaatttgcaaaggaaaatgggtatgttacgactatcttaaataggagaagatacataccggaaatcaattcaaaaaattttaaccaaagatcttatggcgagagaatggcaatgaatacacctattcaaggtagcgctgcggatataataaagatgtcgatggttaaagtatacaatgaattaaaggaaagaggattgaaatcaagacttattcttcaggtgcacgatgagcttataattgacacacatcctgatgaagttgaaatagtcaaggagcttctaaaatcaataatggaaaatatcataaagttgaaagttcctttagttgtagatatagggcaagggaaaaactggtatgatgcaaaataaaaggatcc

SEQ ID NO: 872 - DNA, 2678 bp, Artificial Sequence
  Description of Artificial Sequence: Synthetic Clostridium thermosulfurogenes DNA Polymerase F799V
atgaaatacctgctgccgaccgctgctgctggtctgctgctcctcgctgcccagccggcgatggccatggcgaaatttttgatcatagatggtaatagcttgatgtacagggcgtattttgccctgcctgatttgatgaacagcgaaggaatgcatacaaatgccatatacggtttttcaatgatgcttcttaaattgctggaggaggagaaaccagactacatagcaatagctttcgataaaaaggcttctacatttaggcacaaggagtacagtgcttataaaggaacccgccagtcgatgccagaagagctgatagaacaggtggatattttaaaagatgtgataaatgcatttaacataaagaccatcgagatagagggatttgaagcagatgatatcattggtacagtatcaaaaattgcttccgaaagtgggatggatgtgcttatcgtcacaggcgacagagatgcgcttcagcttgtgtcggcaaatgtaaaagtaaaaatatgtaaaaaaggcataacgcagatggatgagtacgatgaaaaggcggtctttgaaaagtatgaagtgacgccgcttcaattcatagacttgaaagggcttatgggagacaaatcagacaacattccaggagtgcccaatataggggagaagacggccataaagcttgttaaagaatttggatcaattgaaaatttactgatgaatacagataagttaaaagggaaaataaaagaaaatgtagaaaacaatgcagaattagctgttttaagcaaacggcttgctacgattgagagaaatgttcctattgatattgatttgaatgaatacgcggttaaaaattacgatgtcaataagcttacagagctatttgaaaaattggaattttcaagcctcatctcagatttaaaagatgatagtcgtgatacaaaggatattaaagaatggcctgtaagagattttacatacgttaaaaatgttttaggaaagtttgatgttttgtcattgtatccattcatatatgatggaaagataaaagcagtatcatttgcttgcggtgacggatcgttttttgtagagattgatgattatgacaattttaaattgcttaataatgataagcttacgttgataggacacgatctgaaagattttttagtaaacatttcatactgcggtattgaacttaattgtaagattttagatacggccataatgacttatcttttaaatccgtctgagtcgaattacgacataagtcgcgtattgaaaaaatacttgaaagaggatttgcaaaacatagatgatatagtaggcaagggcaggaataaaaagagctacgatgacattgacaaaaagcttttagtcgattatatgtgttcagccgcatcaaacttatctaagttaaaagataagctcatgtcatttataaaagagatggagatggaagatcttttaaaaaatgtggaaattccgcttattgaagtgctaaaatctatggaggtgtacggctttacattagataaagatgtacttagaagtatttctaaagaaatagatgaaaagacagataagattgtaaaagatatttacgatgctgctggatacgaatttaatattaactctacaaagcagttatcagaatttttgtttgataaactgaatttgccagcaataaaaaagactaaaacagggtattcgactgacatggaagtccttgcagaacttataccgtacaatgacatagtaggagaaataatagaatatagacagcttatgaagcttaaatctacgtacatagatggcttcattcccatcatggatgaaaataatagggtccactctacgtttaaacaaacagttgctgctacagggagaattagctcaacagagcctaatctgcagaacatacctgtaagagaagaatttggcaggaggataagaaaggcatttgtatcaagttatgaagatgggcttataatatctgctgattattctcagattgagctaagggttcttgcacatctttcagaggatgaaaaacttattgagtcatttttgaacaacgaagatatacatttaaggacggcatcggaggtttttaaggtttcgaaagaagaagtgacaagtgaaatgagaaggcgggcgaaagctgtcaactttggtattgtatatggtataagcgattacggcttatctaaagacttaaagatttcgcgaaaagaagcgaaagaatacatagacaattattttgacaggtacaagggcgtcaaaaattacatcgactcaattgtcaaatttgcaaaggaaaatgggtatgttacgactatcttaaataggagaagatacataccggaaatcaattcaaaaaattttaaccaaagatctgttggcgagagaatggcaatgaatacacctattcaaggtagcgctgcggatataataaagatgtcgatggttaaagtatacaatgaattaaaggaaagaggattgaaatcaagacttattcttcaggtgcacgatgagcttataattgacacacatcctgatgaagttgaaatagtcaaggagcttctaaaatcaataatggaaaatatcataaagttgaaagttcctttagttgtagatatagggcaagggaaaaactggtatgatgcaaaataaaaggatcc

SEQ ID NO: 873 - DNA, 2678 bp, Artificial Sequence
  Description of Artificial Sequence: Synthetic Clostridium thermosulfurogenes DNA Polymerase G800A
atgaaatacctgctgccgaccgctgctgctggtctgctgctcctcgctgcccagccggcgatggccatggcgaaatttttgatcatagatggtaatagcttgatgtacagggcgtattttgccctgcctgatttgatgaacagcgaaggaatgcatacaaatgccatatacggtttttcaatgatgcttcttaaattgctggaggaggagaaaccagactacatagcaatagctttcgataaaaaggcttctacatttaggcacaaggagtacagtgcttataaaggaacccgccagtcgatgccagaagagctgatagaacaggtggatattttaaaagatgtgataaatgcatttaacataaagaccatcgagatagagggatttgaagcagatgatatcattggtacagtatcaaaaattgcttccgaaagtgggatggatgtgcttatcgtcacaggcgacagagatgcgcttcagcttgtgtcggcaaatgtaaaagtaaaaatatgtaaaaaaggcataacgcagatggatgagtacgatgaaaaggcggtctttgaaaagtatgaagtgacgccgcttcaattcatagacttgaaagggcttatgggagacaaatcagacaacattccaggagtgcccaatataggggagaagacggccataaagcttgttaaagaatttggatcaattgaaaatttactgatgaatacagataagttaaaagggaaaataaaagaaaatgtagaaaacaatgcagaattagctgttttaagcaaacggcttgctacgattgagagaaatgttcctattgatattgatttgaatgaatacgcggttaaaaattacgatgtcaataagcttacagagctatttgaaaaattggaattttcaagcctcatctcagatttaaaagatgatagtcgtgatacaaaggatattaaagaatggcctgtaagagattttacatacgttaaaaatgttttaggaaagtttgatgttttgtcattgtatccattcatatatgatggaaagataaaagcagtatcatttgcttgcggtgacggatcgttttttgtagagattgatgattatgacaattttaaattgcttaataatgataagcttacgttgataggacacgatctgaaagattttttagtaaacatttcatactgcggtattgaacttaattgtaagattttagatacggccataatgacttatcttttaaatccgtctgagtcgaattacgacataagtcgcgtattgaaaaaatacttgaaagaggatttgcaaaacatagatgatatagtaggcaagggcaggaataaaaagagctacgatgacattgacaaaaagcttttagtcgattatatgtgttcagccgcatcaaacttatctaagttaaaagataagctcatgtcatttataaaagagatggagatggaagatcttttaaaaaatgtggaaattccgcttattgaagtgctaaaatctatggaggtgtacggctttacattagataaagatgtacttagaagtatttctaaagaaatagatgaaaagacagataagattgtaaaagatatttacgatgctgctggatacgaatttaatattaactctacaaagcagttatcagaatttttgtttgataaactgaatttgccagcaataaaaaagactaaaacagggtattcgactgacatggaagtccttgcagaacttataccgtacaatgacatagtaggagaaataatagaatatagacagcttatgaagcttaaatctacgtacatagatggcttcattcccatcatggatgaaaataatagggtccactctacgtttaaacaaacagttgctgctacagggagaattagctcaacagagcctaatctgcagaacatacctgtaagagaagaatttggcaggaggataagaaaggcatttgtatcaagttatgaagatgggcttataatatctgctgattattctcagattgagctaagggttcttgcacatctttcagaggatgaaaaacttattgagtcatttttgaacaacgaagatatacatttaaggacggcatcggaggtttttaaggtttcgaaagaagaagtgacaagtgaaatgagaaggcgggcgaaagctgtcaactttggtattgtatatggtataagcgattacggcttatctaaagacttaaagatttcgcgaaaagaagcgaaagaatacatagacaattattttgacaggtacaagggcgtcaaaaattacatcgactcaattgtcaaatttgcaaaggaaaatgggtatgttacgactatcttaaataggagaagatacataccggaaatcaattcaaaaaattttaaccaaagatcttttgctgagagaatggcaatgaatacacctattcaaggtagcgctgcggatataataaagatgtcgatggttaaagtatacaatgaattaaaggaaagaggattgaaatcaagacttattcttcaggtgcacgatgagcttataattgacacacatcctgatgaagttgaaatagtcaaggagcttctaaaatcaataatggaaaatatcataaagttgaaagttcctttagttgtagatatagggcaagggaaaaactggtatgatgcaaaataaaaggatcc

SEQ ID NO: 874 - DNA, 2678 bp, Artificial Sequence
  Description of Artificial Sequence: Synthetic Clostridium thermosulfurogenes DNA Polymerase G800R
atgaaatacctgctgccgaccgctgctgctggtctgctgctcctcgctgcccagccggcgatggccatggcgaaatttttgatcatagatggtaatagcttgatgtacagggcgtattttgccctgcctgatttgatgaacagcgaaggaatgcatacaaatgccatatacggtttttcaatgatgcttcttaaattgctggaggaggagaaaccagactacatagcaatagctttcgataaaaaggcttctacatttaggcacaaggagtacagtgcttataaaggaacccgccagtcgatgccagaagagctgatagaacaggtggatattttaaaagatgtgataaatgcatttaacataaagaccatcgagatagagggatttgaagcagatgatatcattggtacagtatcaaaaattgcttccgaaagtgggatggatgtgcttatcgtcacaggcgacagagatgcgcttcagcttgtgtcggcaaatgtaaaagtaaaaatatgtaaaaaaggcataacgcagatggatgagtacgatgaaaaggcggtctttgaaaagtatgaagtgacgccgcttcaattcatagacttgaaagggcttatgggagacaaatcagacaacattccaggagtgcccaatataggggagaagacggccataaagcttgttaaagaatttggatcaattgaaaatttactgatgaatacagataagttaaaagggaaaataaaagaaaatgtagaaaacaatgcagaattagctgttttaagcaaacggcttgctacgattgagagaaatgttcctattgatattgatttgaatgaatacgcggttaaaaattacgatgtcaataagcttacagagctatttgaaaaattggaattttcaagcctcatctcagatttaaaagatgatagtcgtgatacaaaggatattaaagaatggcctgtaagagattttacatacgttaaaaatgttttaggaaagtttgatgttttgtcattgtatccattcatatatgatggaaagataaaagcagtatcatttgcttgcggtgacggatcgttttttgtagagattgatgattatgacaattttaaattgcttaataatgataagcttacgttgataggacacgatctgaaagattttttagtaaacatttcatactgcggtattgaacttaattgtaagattttagatacggccataatgacttatcttttaaatccgtctgagtcgaattacgacataagtcgcgtattgaaaaaatacttgaaagaggatttgcaaaacatagatgatatagtaggcaagggcaggaataaaaagagctacgatgacattgacaaaaagcttttagtcgattatatgtgttcagccgcatcaaacttatctaagttaaaagataagctcatgtcatttataaaagagatggagatggaagatcttttaaaaaatgtggaaattccgcttattgaagtgctaaaatctatggaggtgtacggctttacattagataaagatgtacttagaagtatttctaaagaaatagatgaaaagacagataagattgtaaaagatatttacgatgctgctggatacgaatttaatattaactctacaaagcagttatcagaatttttgtttgataaactgaatttgccagcaataaaaaagactaaaacagggtattcgactgacatggaagtccttgcagaacttataccgtacaatgacatagtaggagaaataatagaatatagacagcttatgaagcttaaatctacgtacatagatggcttcattcccatcatggatgaaaataatagggtccactctacgtttaaacaaacagttgctgctacagggagaattagctcaacagagcctaatctgcagaacatacctgtaagagaagaatttggcaggaggataagaaaggcatttgtatcaagttatgaagatgggcttataatatctgctgattattctcagattgagctaagggttcttgcacatctttcagaggatgaaaaacttattgagtcatttttgaacaacgaagatatacatttaaggacggcatcggaggtttttaaggtttcgaaagaagaagtgacaagtgaaatgagaaggcgggcgaaagctgtcaactttggtattgtatatggtataagcgattacggcttatctaaagacttaaagatttcgcgaaaagaagcgaaagaatacatagacaattattttgacaggtacaagggcgtcaaaaattacatcgactcaattgtcaaatttgcaaaggaaaatgggtatgttacgactatcttaaataggagaagatacataccggaaatcaattcaaaaaattttaaccaaagatcttttcgtgagagaatggcaatgaatacacctattcaaggtagcgctgcggatataataaagatgtcgatggttaaagtatacaatgaattaaaggaaagaggattgaaatcaagacttattcttcaggtgcacgatgagcttataattgacacacatcctgatgaagttgaaatagtcaaggagcttctaaaatcaataatggaaaatatcataaagttgaaagttcctttagttgtagatatagggcaagggaaaaactggtatgatgcaaaataaaaggatcc

SEQ ID NO: 875 - DNA, 2678 bp, Artificial Sequence
  Description of Artificial Sequence: Synthetic Clostridium thermosulfurogenes DNA Polymerase G800N
atgaaatacctgctgccgaccgctgctgctggtctgctgctcctcgctgcccagccggcgatggccatggcgaaatttttgatcatagatggtaatagcttgatgtacagggcgtattttgccctgcctgatttgatgaacagcgaaggaatgcatacaaatgccatatacggtttttcaatgatgcttcttaaattgctggaggaggagaaaccagactacatagcaatagctttcgataaaaaggcttctacatttaggcacaaggagtacagtgcttataaaggaacccgccagtcgatgccagaagagctgatagaacaggtggatattttaaaagatgtgataaatgcatttaacataaagaccatcgagatagagggatttgaagcagatgatatcattggtacagtatcaaaaattgcttccgaaagtgggatggatgtgcttatcgtcacaggcgacagagatgcgcttcagcttgtgtcggcaaatgtaaaagtaaaaatatgtaaaaaaggcataacgcagatggatgagtacgatgaaaaggcggtctttgaaaagtatgaagtgacgccgcttcaattcatagacttgaaagggcttatgggagacaaatcagacaacattccaggagtgcccaatataggggagaagacggccataaagcttgttaaagaatttggatcaattgaaaatttactgatgaatacagataagttaaaagggaaaataaaagaaaatgtagaaaacaatgcagaattagctgttttaagcaaacggcttgctacgattgagagaaatgttcctattgatattgatttgaatgaatacgcggttaaaaattacgatgtcaataagcttacagagctatttgaaaaattggaattttcaagcctcatctcagatttaaaagatgatagtcgtgatacaaaggatattaaagaatggcctgtaagagattttacatacgttaaaaatgttttaggaaagtttgatgttttgtcattgtatccattcatatatgatggaaagataaaagcagtatcatttgcttgcggtgacggatcgttttttgtagagattgatgattatgacaattttaaattgcttaataatgataagcttacgttgataggacacgatctgaaagattttttagtaaacatttcatactgcggtattgaacttaattgtaagattttagatacggccataatgacttatcttttaaatccgtctgagtcgaattacgacataagtcgcgtattgaaaaaatacttgaaagaggatttgcaaaacatagatgatatagtaggcaagggcaggaataaaaagagctacgatgacattgacaaaaagcttttagtcgattatatgtgttcagccgcatcaaacttatctaagttaaaagataagctcatgtcatttataaaagagatggagatggaagatcttttaaaaaatgtggaaattccgcttattgaagtgctaaaatctatggaggtgtacggctttacattagataaagatgtacttagaagtatttctaaagaaatagatgaaaagacagataagattgtaaaagatatttacgatgctgctggatacgaatttaatattaactctacaaagcagttatcagaatttttgtttgataaactgaatttgccagcaataaaaaagactaaaacagggtattcgactgacatggaagtccttgcagaacttataccgtacaatgacatagtaggagaaataatagaatatagacagcttatgaagcttaaatctacgtacatagatggcttcattcccatcatggatgaaaataatagggtccactctacgtttaaacaaacagttgctgctacagggagaattagctcaacagagcctaatctgcagaacatacctgtaagagaagaatttggcaggaggataagaaaggcatttgtatcaagttatgaagatgggcttataatatctgctgattattctcagattgagctaagggttcttgcacatctttcagaggatgaaaaacttattgagtcatttttgaacaacgaagatatacatttaaggacggcatcggaggtttttaaggtttcgaaagaagaagtgacaagtgaaatgagaaggcgggcgaaagctgtcaactttggtattgtatatggtataagcgattacggcttatctaaagacttaaagatttcgcgaaaagaagcgaaagaatacatagacaattattttgacaggtacaagggcgtcaaaaattacatcgactcaattgtcaaatttgcaaaggaaaatgggtatgttacgactatcttaaataggagaagatacataccggaaatcaattcaaaaaattttaaccaaagatcttttaatgagagaatggcaatgaatacacctattcaaggtagcgctgcggatataataaagatgtcgatggttaaagtatacaatgaattaaaggaaagaggattgaaatcaagacttattcttcaggtgcacgatgagcttataattgacacacatcctgatgaagttgaaatagtcaaggagcttctaaaatcaataatggaaaatatcataaagttgaaagttcctttagttgtagatatagggcaagggaaaaactggtatgatgcaaaataaaaggatcc

SEQ ID NO: 876 - DNA, 2678 bp, Artificial Sequence
  Description of Artificial Sequence: Synthetic Clostridium thermosulfurogenes DNA Polymerase G800D
atgaaatacctgctgccgaccgctgctgctggtctgctgctcctcgctgcccagccggcgatggccatggcgaaatttttgatcatagatggtaatagcttgatgtacagggcgtattttgccctgcctgatttgatgaacagcgaaggaatgcatacaaatgccatatacggtttttcaatgatgcttcttaaattgctggaggaggagaaaccagactacatagcaatagctttcgataaaaaggcttctacatttaggcacaaggagtacagtgcttataaaggaacccgccagtcgatgccagaagagctgatagaacaggtggatattttaaaagatgtgataaatgcatttaacataaagaccatcgagatagagggatttgaagcagatgatatcattggtacagtatcaaaaattgcttccgaaagtgggatggatgtgcttatcgtcacaggcgacagagatgcgcttcagcttgtgtcggcaaatgtaaaagtaaaaatatgtaaaaaaggcataacgcagatggatgagtacgatgaaaaggcggtctttgaaaagtatgaagtgacgccgcttcaattcatagacttgaaagggcttatgggagacaaatcagacaacattccaggagtgcccaatataggggagaagacggccataaagcttgttaaagaatttggatcaattgaaaatttactgatgaatacagataagttaaaagggaaaataaaagaaaatgtagaaaacaatgcagaattagctgttttaagcaaacggcttgctacgattgagagaaatgttcctattgatattgatttgaatgaatacgcggttaaaaattacgatgtcaataagcttacagagctatttgaaaaattggaattttcaagcctcatctcagatttaaaagatgatagtcgtgatacaaaggatattaaagaatggcctgtaagagattttacatacgttaaaaatgttttaggaaagtttgatgttttgtcattgtatccattcatatatgatggaaagataaaagcagtatcatttgcttgcggtgacggatcgttttttgtagagattgatgattatgacaattttaaattgcttaataatgataagcttacgttgataggacacgatctgaaagattttttagtaaacatttcatactgcggtattgaacttaattgtaagattttagatacggccataatgacttatcttttaaatccgtctgagtcgaattacgacataagtcgcgtattgaaaaaatacttgaaagaggatttgcaaaacatagatgatatagtaggcaagggcaggaataaaaagagctacgatgacattgacaaaaagcttttagtcgattatatgtgttcagccgcatcaaacttatctaagttaaaagataagctcatgtcatttataaaagagatggagatggaagatcttttaaaaaatgtggaaattccgcttattgaagtgctaaaatctatggaggtgtacggctttacattagataaagatgtacttagaagtatttctaaagaaatagatgaaaagacagataagattgtaaaagatatttacgatgctgctggatacgaatttaatattaactctacaaagcagttatcagaatttttgtttgataaactgaatttgccagcaataaaaaagactaaaacagggtattcgactgacatggaagtccttgcagaacttataccgtacaatgacatagtaggagaaataatagaatatagacagcttatgaagcttaaatctacgtacatagatggcttcattcccatcatggatgaaaataatagggtccactctacgtttaaacaaacagttgctgctacagggagaattagctcaacagagcctaatctgcagaacatacctgtaagagaagaatttggcaggaggataagaaaggcatttgtatcaagttatgaagatgggcttataatatctgctgattattctcagattgagctaagggttcttgcacatctttcagaggatgaaaaacttattgagtcatttttgaacaacgaagatatacatttaaggacggcatcggaggtttttaaggtttcgaaagaagaagtgacaagtgaaatgagaaggcgggcgaaagctgtcaactttggtattgtatatggtataagcgattacggcttatctaaagacttaaagatttcgcgaaaagaagcgaaagaatacatagacaattattttgacaggtacaagggcgtcaaaaattacatcgactcaattgtcaaatttgcaaaggaaaatgggtatgttacgactatcttaaataggagaagatacataccggaaatcaattcaaaaaattttaaccaaagatcttttgatgagagaatggcaatgaatacacctattcaaggtagcgctgcggatataataaagatgtcgatggttaaagtatacaatgaattaaaggaaagaggattgaaatcaagacttattcttcaggtgcacgatgagcttataattgacacacatcctgatgaagttgaaatagtcaaggagcttctaaaatcaataatggaaaatatcataaagttgaaagttcctttagttgtagatatagggcaagggaaaaactggtatgatgcaaaataaaaggatcc

SEQ ID NO: 877 - DNA, 2678 bp, Artificial Sequence
  Description of Artificial Sequence: Synthetic Clostridium thermosulfurogenes DNA Polymerase G800C
atgaaatacctgctgccgaccgctgctgctggtctgctgctcctcgctgcccagccggcgatggccatggcgaaatttttgatcatagatggtaatagcttgatgtacagggcgtattttgccctgcctgatttgatgaacagcgaaggaatgcatacaaatgccatatacggtttttcaatgatgcttcttaaattgctggaggaggagaaaccagactacatagcaatagctttcgataaaaaggcttctacatttaggcacaaggagtacagtgcttataaaggaacccgccagtcgatgccagaagagctgatagaacaggtggatattttaaaagatgtgataaatgcatttaacataaagaccatcgagatagagggatttgaagcagatgatatcattggtacagtatcaaaaattgcttccgaaagtgggatggatgtgcttatcgtcacaggcgacagagatgcgcttcagcttgtgtcggcaaatgtaaaagtaaaaatatgtaaaaaaggcataacgcagatggatgagtacgatgaaaaggcggtctttgaaaagtatgaagtgacgccgcttcaattcatagacttgaaagggcttatgggagacaaatcagacaacattccaggagtgcccaatataggggagaagacggccataaagcttgttaaagaatttggatcaattgaaaatttactgatgaatacagataagttaaaagggaaaataaaagaaaatgtagaaaacaatgcagaattagctgttttaagcaaacggcttgctacgattgagagaaatgttcctattgatattgatttgaatgaatacgcggttaaaaattacgatgtcaataagcttacagagctatttgaaaaattggaattttcaagcctcatctcagatttaaaagatgatagtcgtgatacaaaggatattaaagaatggcctgtaagagattttacatacgttaaaaatgttttaggaaagtttgatgttttgtcattgtatccattcatatatgatggaaagataaaagcagtatcatttgcttgcggtgacggatcgttttttgtagagattgatgattatgacaattttaaattgcttaataatgataagcttacgttgataggacacgatctgaaagattttttagtaaacatttcatactgcggtattgaacttaattgtaagattttagatacggccataatgacttatcttttaaatccgtctgagtcgaattacgacataagtcgcgtattgaaaaaatacttgaaagaggatttgcaaaacatagatgatatagtaggcaagggcaggaataaaaagagctacgatgacattgacaaaaagcttttagtcgattatatgtgttcagccgcatcaaacttatctaagttaaaagataagctcatgtcatttataaaagagatggagatggaagatcttttaaaaaatgtggaaattccgcttattgaagtgctaaaatctatggaggtgtacggctttacattagataaagatgtacttagaagtatttctaaagaaatagatgaaaagacagataagattgtaaaagatatttacgatgctgctggatacgaatttaatattaactctacaaagcagttatcagaatttttgtttgataaactgaatttgccagcaataaaaaagactaaaacagggtattcgactgacatggaagtccttgcagaacttataccgtacaatgacatagtaggagaaataatagaatatagacagcttatgaagcttaaatctacgtacatagatggcttcattcccatcatggatgaaaataatagggtccactctacgtttaaacaaacagttgctgctacagggagaattagctcaacagagcctaatctgcagaacatacctgtaagagaagaatttggcaggaggataagaaaggcatttgtatcaagttatgaagatgggcttataatatctgctgattattctcagattgagctaagggttcttgcacatctttcagaggatgaaaaacttattgagtcatttttgaacaacgaagatatacatttaaggacggcatcggaggtttttaaggtttcgaaagaagaagtgacaagtgaaatgagaaggcgggcgaaagctgtcaactttggtattgtatatggtataagcgattacggcttatctaaagacttaaagatttcgcgaaaagaagcgaaagaatacatagacaattattttgacaggtacaagggcgtcaaaaattacatcgactcaattgtcaaatttgcaaaggaaaatgggtatgttacgactatcttaaataggagaagatacataccggaaatcaattcaaaaaattttaaccaaagatctttttgtgagagaatggcaatgaatacacctattcaaggtagcgctgcggatataataaagatgtcgatggttaaagtatacaatgaattaaaggaaagaggattgaaatcaagacttattcttcaggtgcacgatgagcttataattgacacacatcctgatgaagttgaaatagtcaaggagcttctaaaatcaataatggaaaatatcataaagttgaaagttcctttagttgtagatatagggcaagggaaaaactggtatgatgcaaaataaaaggatcc

SEQ ID NO: 878 - DNA, 2678 bp, Artificial Sequence
  Description of Artificial Sequence: Synthetic Clostridium thermosulfurogenes DNA Polymerase G800E
atgaaatacctgctgccgaccgctgctgctggtctgctgctcctcgctgcccagccggcgatggccatggcgaaatttttgatcatagatggtaatagcttgatgtacagggcgtattttgccctgcctgatttgatgaacagcgaaggaatgcatacaaatgccatatacggtttttcaatgatgcttcttaaattgctggaggaggagaaaccagactacatagcaatagctttcgataaaaaggcttctacatttaggcacaaggagtacagtgcttataaaggaacccgccagtcgatgccagaagagctgatagaacaggtggatattttaaaagatgtgataaatgcatttaacataaagaccatcgagatagagggatttgaagcagatgatatcattggtacagtatcaaaaattgcttccgaaagtgggatggatgtgcttatcgtcacaggcgacagagatgcgcttcagcttgtgtcggcaaatgtaaaagtaaaaatatgtaaaaaaggcataacgcagatggatgagtacgatgaaaaggcggtctttgaaaagtatgaagtgacgccgcttcaattcatagacttgaaagggcttatgggagacaaatcagacaacattccaggagtgcccaatataggggagaagacggccataaagcttgttaaagaatttggatcaattgaaaatttactgatgaatacagataagttaaaagggaaaataaaagaaaatgtagaaaacaatgcagaattagctgttttaagcaaacggcttgctacgattgagagaaatgttcctattgatattgatttgaatgaatacgcggttaaaaattacgatgtcaataagcttacagagctatttgaaaaattggaattttcaagcctcatctcagatttaaaagatgatagtcgtgatacaaaggatattaaagaatggcctgtaagagattttacatacgttaaaaatgttttaggaaagtttgatgttttgtcattgtatccattcatatatgatggaaagataaaagcagtatcatttgcttgcggtgacggatcgttttttgtagagattgatgattatgacaattttaaattgcttaataatgataagcttacgttgataggacacgatctgaaagattttttagtaaacatttcatactgcggtattgaacttaattgtaagattttagatacggccataatgacttatcttttaaatccgtctgagtcgaattacgacataagtcgcgtattgaaaaaatacttgaaagaggatttgcaaaacatagatgatatagtaggcaagggcaggaataaaaagagctacgatgacattgacaaaaagcttttagtcgattatatgtgttcagccgcatcaaacttatctaagttaaaagataagctcatgtcatttataaaagagatggagatggaagatcttttaaaaaatgtggaaattccgcttattgaagtgctaaaatctatggaggtgtacggctttacattagataaagatgtacttagaagtatttctaaagaaatagatgaaaagacagataagattgtaaaagatatttacgatgctgctggatacgaatttaatattaactctacaaagcagttatcagaatttttgtttgataaactgaatttgccagcaataaaaaagactaaaacagggtattcgactgacatggaagtccttgcagaacttataccgtacaatgacatagtaggagaaataatagaatatagacagcttatgaagcttaaatctacgtacatagatggcttcattcccatcatggatgaaaataatagggtccactctacgtttaaacaaacagttgctgctacagggagaattagctcaacagagcctaatctgcagaacatacctgtaagagaagaatttggcaggaggataagaaaggcatttgtatcaagttatgaagatgggcttataatatctgctgattattctcagattgagctaagggttcttgcacatctttcagaggatgaaaaacttattgagtcatttttgaacaacgaagatatacatttaaggacggcatcggaggtttttaaggtttcgaaagaagaagtgacaagtgaaatgagaaggcgggcgaaagctgtcaactttggtattgtatatggtataagcgattacggcttatctaaagacttaaagatttcgcgaaaagaagcgaaagaatacatagacaattattttgacaggtacaagggcgtcaaaaattacatcgactcaattgtcaaatttgcaaaggaaaatgggtatgttacgactatcttaaataggagaagatacataccggaaatcaattcaaaaaattttaaccaaagatcttttgaagagagaatggcaatgaatacacctattcaaggtagcgctgcggatataataaagatgtcgatggttaaagtatacaatgaattaaaggaaagaggattgaaatcaagacttattcttcaggtgcacgatgagcttataattgacacacatcctgatgaagttgaaatagtcaaggagcttctaaaatcaataatggaaaatatcataaagttgaaagttcctttagttgtagatatagggcaagggaaaaactggtatgatgcaaaataaaaggatcc

SEQ ID NO: 879 - DNA, 2678 bp, Artificial Sequence
  Description of Artificial Sequence: Synthetic Clostridium thermosulfurogenes DNA Polymerase G800Q
atgaaatacctgctgccgaccgctgctgctggtctgctgctcctcgctgcccagccggcgatggccatggcgaaatttttgatcatagatggtaatagcttgatgtacagggcgtattttgccctgcctgatttgatgaacagcgaaggaatgcatacaaatgccatatacggtttttcaatgatgcttcttaaattgctggaggaggagaaaccagactacatagcaatagctttcgataaaaaggcttctacatttaggcacaaggagtacagtgcttataaaggaacccgccagtcgatgccagaagagctgatagaacaggtggatattttaaaagatgtgataaatgcatttaacataaagaccatcgagatagagggatttgaagcagatgatatcattggtacagtatcaaaaattgcttccgaaagtgggatggatgtgcttatcgtcacaggcgacagagatgcgcttcagcttgtgtcggcaaatgtaaaagtaaaaatatgtaaaaaaggcataacgcagatggatgagtacgatgaaaaggcggtctttgaaaagtatgaagtgacgccgcttcaattcatagacttgaaagggcttatgggagacaaatcagacaacattccaggagtgcccaatataggggagaagacggccataaagcttgttaaagaatttggatcaattgaaaatttactgatgaatacagataagttaaaagggaaaataaaagaaaatgtagaaaacaatgcagaattagctgttttaagcaaacggcttgctacgattgagagaaatgttcctattgatattgatttgaatgaatacgcggttaaaaattacgatgtcaataagcttacagagctatttgaaaaattggaattttcaagcctcatctcagatttaaaagatgatagtcgtgatacaaaggatattaaagaatggcctgtaagagattttacatacgttaaaaatgttttaggaaagtttgatgttttgtcattgtatccattcatatatgatggaaagataaaagcagtatcatttgcttgcggtgacggatcgttttttgtagagattgatgattatgacaattttaaattgcttaataatgataagcttacgttgataggacacgatctgaaagattttttagtaaacatttcatactgcggtattgaacttaattgtaagattttagatacggccataatgacttatcttttaaatccgtctgagtcgaattacgacataagtcgcgtattgaaaaaatacttgaaagaggatttgcaaaacatagatgatatagtaggcaagggcaggaataaaaagagctacgatgacattgacaaaaagcttttagtcgattatatgtgttcagccgcatcaaacttatctaagttaaaagataagctcatgtcatttataaaagagatggagatggaagatcttttaaaaaatgtggaaattccgcttattgaagtgctaaaatctatggaggtgtacggctttacattagataaagatgtacttagaagtatttctaaagaaatagatgaaaagacagataagattgtaaaagatatttacgatgctgctggatacgaatttaatattaactctacaaagcagttatcagaatttttgtttgataaactgaatttgccagcaataaaaaagactaaaacagggtattcgactgacatggaagtccttgcagaacttataccgtacaatgacatagtaggagaaataatagaatatagacagcttatgaagcttaaatctacgtacatagatggcttcattcccatcatggatgaaaataatagggtccactctacgtttaaacaaacagttgctgctacagggagaattagctcaacagagcctaatctgcagaacatacctgtaagagaagaatttggcaggaggataagaaaggcatttgtatcaagttatgaagatgggcttataatatctgctgattattctcagattgagctaagggttcttgcacatctttcagaggatgaaaaacttattgagtcatttttgaacaacgaagatatacatttaaggacggcatcggaggtttttaaggtttcgaaagaagaagtgacaagtgaaatgagaaggcgggcgaaagctgtcaactttggtattgtatatggtataagcgattacggcttatctaaagacttaaagatttcgcgaaaagaagcgaaagaatacatagacaattattttgacaggtacaagggcgtcaaaaattacatcgactcaattgtcaaatttgcaaaggaaaatgggtatgttacgactatcttaaataggagaagatacataccggaaatcaattcaaaaaattttaaccaaagatcttttcaagagagaatggcaatgaatacacctattcaaggtagcgctgcggatataataaagatgtcgatggttaaagtatacaatgaattaaaggaaagaggattgaaatcaagacttattcttcaggtgcacgatgagcttataattgacacacatcctgatgaagttgaaatagtcaaggagcttctaaaatcaataatggaaaatatcataaagttgaaagttcctttagttgtagatatagggcaagggaaaaactggtatgatgcaaaataaaaggatcc

SEQ ID NO: 880 - DNA, 2678 bp, Artificial Sequence
  Description of Artificial Sequence: Synthetic Clostridium thermosulfurogenes DNA Polymerase G800H
atgaaatacctgctgccgaccgctgctgctggtctgctgctcctcgctgcccagccggcgatggccatggcgaaatttttgatcatagatggtaatagcttgatgtacagggcgtattttgccctgcctgatttgatgaacagcgaaggaatgcatacaaatgccatatacggtttttcaatgatgcttcttaaattgctggaggaggagaaaccagactacatagcaatagctttcgataaaaaggcttctacatttaggcacaaggagtacagtgcttataaaggaacccgccagtcgatgccagaagagctgatagaacaggtggatattttaaaagatgtgataaatgcatttaacataaagaccatcgagatagagggatttgaagcagatgatatcattggtacagtatcaaaaattgcttccgaaagtgggatggatgtgcttatcgtcacaggcgacagagatgcgcttcagcttgtgtcggcaaatgtaaaagtaaaaatatgtaaaaaaggcataacgcagatggatgagtacgatgaaaaggcggtctttgaaaagtatgaagtgacgccgcttcaattcatagacttgaaagggcttatgggagacaaatcagacaacattccaggagtgcccaatataggggagaagacggccataaagcttgttaaagaatttggatcaattgaaaatttactgatgaatacagataagttaaaagggaaaataaaagaaaatgtagaaaacaatgcagaattagctgttttaagcaaacggcttgctacgattgagagaaatgttcctattgatattgatttgaatgaatacgcggttaaaaattacgatgtcaataagcttacagagctatttgaaaaattggaattttcaagcctcatctcagatttaaaagatgatagtcgtgatacaaaggatattaaagaatggcctgtaagagattttacatacgttaaaaatgttttaggaaagtttgatgttttgtcattgtatccattcatatatgatggaaagataaaagcagtatcatttgcttgcggtgacggatcgttttttgtagagattgatgattatgacaattttaaattgcttaataatgataagcttacgttgataggacacgatctgaaagattttttagtaaacatttcatactgcggtattgaacttaattgtaagattttagatacggccataatgacttatcttttaaatccgtctgagtcgaattacgacataagtcgcgtattgaaaaaatacttgaaagaggatttgcaaaacatagatgatatagtaggcaagggcaggaataaaaagagctacgatgacattgacaaaaagcttttagtcgattatatgtgttcagccgcatcaaacttatctaagttaaaagataagctcatgtcatttataaaagagatggagatggaagatcttttaaaaaatgtggaaattccgcttattgaagtgctaaaatctatggaggtgtacggctttacattagataaagatgtacttagaagtatttctaaagaaatagatgaaaagacagataagattgtaaaagatatttacgatgctgctggatacgaatttaatattaactctacaaagcagttatcagaatttttgtttgataaactgaatttgccagcaataaaaaagactaaaacagggtattcgactgacatggaagtccttgcagaacttataccgtacaatgacatagtaggagaaataatagaatatagacagcttatgaagcttaaatctacgtacatagatggcttcattcccatcatggatgaaaataatagggtccactctacgtttaaacaaacagttgctgctacagggagaattagctcaacagagcctaatctgcagaacatacctgtaagagaagaatttggcaggaggataagaaaggcatttgtatcaagttatgaagatgggcttataatatctgctgattattctcagattgagctaagggttcttgcacatctttcagaggatgaaaaacttattgagtcatttttgaacaacgaagatatacatttaaggacggcatcggaggtttttaaggtttcgaaagaagaagtgacaagtgaaatgagaaggcgggcgaaagctgtcaactttggtattgtatatggtataagcgattacggcttatctaaagacttaaagatttcgcgaaaagaagcgaaagaatacatagacaattattttgacaggtacaagggcgtcaaaaattacatcgactcaattgtcaaatttgcaaaggaaaatgggtatgttacgactatcttaaataggagaagatacataccggaaatcaattcaaaaaattttaaccaaagatcttttcatgagagaatggcaatgaatacacctattcaaggtagcgctgcggatataataaagatgtcgatggttaaagtatacaatgaattaaaggaaagaggattgaaatcaagacttattcttcaggtgcacgatgagcttataattgacacacatcctgatgaagttgaaatagtcaaggagcttctaaaatcaataatggaaaatatcataaagttgaaagttcctttagttgtagatatagggcaagggaaaaactggtatgatgcaaaataaaaggatcc

SEQ ID NO: 881 - DNA, 2678 bp, Artificial Sequence
  Description of Artificial Sequence: Synthetic Clostridium thermosulfurogenes DNA Polymerase G800I
atgaaatacctgctgccgaccgctgctgctggtctgctgctcctcgctgcccagccggcgatggccatggcgaaatttttgatcatagatggtaatagcttgatgtacagggcgtattttgccctgcctgatttgatgaacagcgaaggaatgcatacaaatgccatatacggtttttcaatgatgcttcttaaattgctggaggaggagaaaccagactacatagcaatagctttcgataaaaaggcttctacatttaggcacaaggagtacagtgcttataaaggaacccgccagtcgatgccagaagagctgatagaacaggtggatattttaaaagatgtgataaatgcatttaacataaagaccatcgagatagagggatttgaagcagatgatatcattggtacagtatcaaaaattgcttccgaaagtgggatggatgtgcttatcgtcacaggcgacagagatgcgcttcagcttgtgtcggcaaatgtaaaagtaaaaatatgtaaaaaaggcataacgcagatggatgagtacgatgaaaaggcggtctttgaaaagtatgaagtgacgccgcttcaattcatagacttgaaagggcttatgggagacaaatcagacaacattccaggagtgcccaatataggggagaagacggccataaagcttgttaaagaatttggatcaattgaaaatttactgatgaatacagataagttaaaagggaaaataaaagaaaatgtagaaaacaatgcagaattagctgttttaagcaaacggcttgctacgattgagagaaatgttcctattgatattgatttgaatgaatacgcggttaaaaattacgatgtcaataagcttacagagctatttgaaaaattggaattttcaagcctcatctcagatttaaaagatgatagtcgtgatacaaaggatattaaagaatggcctgtaagagattttacatacgttaaaaatgttttaggaaagtttgatgttttgtcattgtatccattcatatatgatggaaagataaaagcagtatcatttgcttgcggtgacggatcgttttttgtagagattgatgattatgacaattttaaattgcttaataatgataagcttacgttgataggacacgatctgaaagattttttagtaaacatttcatactgcggtattgaacttaattgtaagattttagatacggccataatgacttatcttttaaatccgtctgagtcgaattacgacataagtcgcgtattgaaaaaatacttgaaagaggatttgcaaaacatagatgatatagtaggcaagggcaggaataaaaagagctacgatgacattgacaaaaagcttttagtcgattatatgtgttcagccgcatcaaacttatctaagttaaaagataagctcatgtcatttataaaagagatggagatggaagatcttttaaaaaatgtggaaattccgcttattgaagtgctaaaatctatggaggtgtacggctttacattagataaagatgtacttagaagtatttctaaagaaatagatgaaaagacagataagattgtaaaagatatttacgatgctgctggatacgaatttaatattaactctacaaagcagttatcagaatttttgtttgataaactgaatttgccagcaataaaaaagactaaaacagggtattcgactgacatggaagtccttgcagaacttataccgtacaatgacatagtaggagaaataatagaatatagacagcttatgaagcttaaatctacgtacatagatggcttcattcccatcatggatgaaaataatagggtccactctacgtttaaacaaacagttgctgctacagggagaattagctcaacagagcctaatctgcagaacatacctgtaagagaagaatttggcaggaggataagaaaggcatttgtatcaagttatgaagatgggcttataatatctgctgattattctcagattgagctaagggttcttgcacatctttcagaggatgaaaaacttattgagtcatttttgaacaacgaagatatacatttaaggacggcatcggaggtttttaaggtttcgaaagaagaagtgacaagtgaaatgagaaggcgggcgaaagctgtcaactttggtattgtatatggtataagcgattacggcttatctaaagacttaaagatttcgcgaaaagaagcgaaagaatacatagacaattattttgacaggtacaagggcgtcaaaaattacatcgactcaattgtcaaatttgcaaaggaaaatgggtatgttacgactatcttaaataggagaagatacataccggaaatcaattcaaaaaattttaaccaaagatcttttattgagagaatggcaatgaatacacctattcaaggtagcgctgcggatataataaagatgtcgatggttaaagtatacaatgaattaaaggaaagaggattgaaatcaagacttattcttcaggtgcacgatgagcttataattgacacacatcctgatgaagttgaaatagtcaaggagcttctaaaatcaataatggaaaatatcataaagttgaaagttcctttagttgtagatatagggcaagggaaaaactggtatgatgcaaaataaaaggatcc

SEQ ID NO: 882 - DNA, 2678 bp, Artificial Sequence
  Description of Artificial Sequence: Synthetic Clostridium thermosulfurogenes DNA Polymerase G800L
atgaaatacctgctgccgaccgctgctgctggtctgctgctcctcgctgcccagccggcgatggccatggcgaaatttttgatcatagatggtaatagcttgatgtacagggcgtattttgccctgcctgatttgatgaacagcgaaggaatgcatacaaatgccatatacggtttttcaatgatgcttcttaaattgctggaggaggagaaaccagactacatagcaatagctttcgataaaaaggcttctacatttaggcacaaggagtacagtgcttataaaggaacccgccagtcgatgccagaagagctgatagaacaggtggatattttaaaagatgtgataaatgcatttaacataaagaccatcgagatagagggatttgaagcagatgatatcattggtacagtatcaaaaattgcttccgaaagtgggatggatgtgcttatcgtcacaggcgacagagatgcgcttcagcttgtgtcggcaaatgtaaaagtaaaaatatgtaaaaaaggcataacgcagatggatgagtacgatgaaaaggcggtctttgaaaagtatgaagtgacgccgcttcaattcatagacttgaaagggcttatgggagacaaatcagacaacattccaggagtgcccaatataggggagaagacggccataaagcttgttaaagaatttggatcaattgaaaatttactgatgaatacagataagttaaaagggaaaataaaagaaaatgtagaaaacaatgcagaattagctgttttaagcaaacggcttgctacgattgagagaaatgttcctattgatattgatttgaatgaatacgcggttaaaaattacgatgtcaataagcttacagagctatttgaaaaattggaattttcaagcctcatctcagatttaaaagatgatagtcgtgatacaaaggatattaaagaatggcctgtaagagattttacatacgttaaaaatgttttaggaaagtttgatgttttgtcattgtatccattcatatatgatggaaagataaaagcagtatcatttgcttgcggtgacggatcgttttttgtagagattgatgattatgacaattttaaattgcttaataatgataagcttacgttgataggacacgatctgaaagattttttagtaaacatttcatactgcggtattgaacttaattgtaagattttagatacggccataatgacttatcttttaaatccgtctgagtcgaattacgacataagtcgcgtattgaaaaaatacttgaaagaggatttgcaaaacatagatgatatagtaggcaagggcaggaataaaaagagctacgatgacattgacaaaaagcttttagtcgattatatgtgttcagccgcatcaaacttatctaagttaaaagataagctcatgtcatttataaaagagatggagatggaagatcttttaaaaaatgtggaaattccgcttattgaagtgctaaaatctatggaggtgtacggctttacattagataaagatgtacttagaagtatttctaaagaaatagatgaaaagacagataagattgtaaaagatatttacgatgctgctggatacgaatttaatattaactctacaaagcagttatcagaatttttgtttgataaactgaatttgccagcaataaaaaagactaaaacagggtattcgactgacatggaagtccttgcagaacttataccgtacaatgacatagtaggagaaataatagaatatagacagcttatgaagcttaaatctacgtacatagatggcttcattcccatcatggatgaaaataatagggtccactctacgtttaaacaaacagttgctgctacagggagaattagctcaacagagcctaatctgcagaacatacctgtaagagaagaatttggcaggaggataagaaaggcatttgtatcaagttatgaagatgggcttataatatctgctgattattctcagattgagctaagggttcttgcacatctttcagaggatgaaaaacttattgagtcatttttgaacaacgaagatatacatttaaggacggcatcggaggtttttaaggtttcgaaagaagaagtgacaagtgaaatgagaaggcgggcgaaagctgtcaactttggtattgtatatggtataagcgattacggcttatctaaagacttaaagatttcgcgaaaagaagcgaaagaatacatagacaattattttgacaggtacaagggcgtcaaaaattacatcgactcaattgtcaaatttgcaaaggaaaatgggtatgttacgactatcttaaataggagaagatacataccggaaatcaattcaaaaaattttaaccaaagatcttttcttgagagaatggcaatgaatacacctattcaaggtagcgctgcggatataataaagatgtcgatggttaaagtatacaatgaattaaaggaaagaggattgaaatcaagacttattcttcaggtgcacgatgagcttataattgacacacatcctgatgaagttgaaatagtcaaggagcttctaaaatcaataatggaaaatatcataaagttgaaagttcctttagttgtagatatagggcaagggaaaaactggtatgatgcaaaataaaaggatcc

SEQ ID NO: 883 - DNA, 2678 bp, Artificial Sequence
  Description of Artificial Sequence: Synthetic Clostridium thermosulfurogenes DNA Polymerase G800K
atgaaatacctgctgccgaccgctgctgctggtctgctgctcctcgctgcccagccggcgatggccatggcgaaatttttgatcatagatggtaatagcttgatgtacagggcgtattttgccctgcctgatttgatgaacagcgaaggaatgcatacaaatgccatatacggtttttcaatgatgcttcttaaattgctggaggaggagaaaccagactacatagcaatagctttcgataaaaaggcttctacatttaggcacaaggagtacagtgcttataaaggaacccgccagtcgatgccagaagagctgatagaacaggtggatattttaaaagatgtgataaatgcatttaacataaagaccatcgagatagagggatttgaagcagatgatatcattggtacagtatcaaaaattgcttccgaaagtgggatggatgtgcttatcgtcacaggcgacagagatgcgcttcagcttgtgtcggcaaatgtaaaagtaaaaatatgtaaaaaaggcataacgcagatggatgagtacgatgaaaaggcggtctttgaaaagtatgaagtgacgccgcttcaattcatagacttgaaagggcttatgggagacaaatcagacaacattccaggagtgcccaatataggggagaagacggccataaagcttgttaaagaatttggatcaattgaaaatttactgatgaatacagataagttaaaagggaaaataaaagaaaatgtagaaaacaatgcagaattagctgttttaagcaaacggcttgctacgattgagagaaatgttcctattgatattgatttgaatgaatacgcggttaaaaattacgatgtcaataagcttacagagctatttgaaaaattggaattttcaagcctcatctcagatttaaaagatgatagtcgtgatacaaaggatattaaagaatggcctgtaagagattttacatacgttaaaaatgttttaggaaagtttgatgttttgtcattgtatccattcatatatgatggaaagataaaagcagtatcatttgcttgcggtgacggatcgttttttgtagagattgatgattatgacaattttaaattgcttaataatgataagcttacgttgataggacacgatctgaaagattttttagtaaacatttcatactgcggtattgaacttaattgtaagattttagatacggccataatgacttatcttttaaatccgtctgagtcgaattacgacataagtcgcgtattgaaaaaatacttgaaagaggatttgcaaaacatagatgatatagtaggcaagggcaggaataaaaagagctacgatgacattgacaaaaagcttttagtcgattatatgtgttcagccgcatcaaacttatctaagttaaaagataagctcatgtcatttataaaagagatggagatggaagatcttttaaaaaatgtggaaattccgcttattgaagtgctaaaatctatggaggtgtacggctttacattagataaagatgtacttagaagtatttctaaagaaatagatgaaaagacagataagattgtaaaagatatttacgatgctgctggatacgaatttaatattaactctacaaagcagttatcagaatttttgtttgataaactgaatttgccagcaataaaaaagactaaaacagggtattcgactgacatggaagtccttgcagaacttataccgtacaatgacatagtaggagaaataatagaatatagacagcttatgaagcttaaatctacgtacatagatggcttcattcccatcatggatgaaaataatagggtccactctacgtttaaacaaacagttgctgctacagggagaattagctcaacagagcctaatctgcagaacatacctgtaagagaagaatttggcaggaggataagaaaggcatttgtatcaagttatgaagatgggcttataatatctgctgattattctcagattgagctaagggttcttgcacatctttcagaggatgaaaaacttattgagtcatttttgaacaacgaagatatacatttaaggacggcatcggaggtttttaaggtttcgaaagaagaagtgacaagtgaaatgagaaggcgggcgaaagctgtcaactttggtattgtatatggtataagcgattacggcttatctaaagacttaaagatttcgcgaaaagaagcgaaagaatacatagacaattattttgacaggtacaagggcgtcaaaaattacatcgactcaattgtcaaatttgcaaaggaaaatgggtatgttacgactatcttaaataggagaagatacataccggaaatcaattcaaaaaattttaaccaaagatcttttaaagagagaatggcaatgaatacacctattcaaggtagcgctgcggatataataaagatgtcgatggttaaagtatacaatgaattaaaggaaagaggattgaaatcaagacttattcttcaggtgcacgatgagcttataattgacacacatcctgatgaagttgaaatagtcaaggagcttctaaaatcaataatggaaaatatcataaagttgaaagttcctttagttgtagatatagggcaagggaaaaactggtatgatgcaaaataaaaggatcc

SEQ ID NO: 884 - DNA, 2678 bp, Artificial Sequence
  Description of Artificial Sequence: Synthetic Clostridium thermosulfurogenes DNA Polymerase G800M
atgaaatacctgctgccgaccgctgctgctggtctgctgctcctcgctgcccagccggcgatggccatggcgaaatttttgatcatagatggtaatagcttgatgtacagggcgtattttgccctgcctgatttgatgaacagcgaaggaatgcatacaaatgccatatacggtttttcaatgatgcttcttaaattgctggaggaggagaaaccagactacatagcaatagctttcgataaaaaggcttctacatttaggcacaaggagtacagtgcttataaaggaacccgccagtcgatgccagaagagctgatagaacaggtggatattttaaaagatgtgataaatgcatttaacataaagaccatcgagatagagggatttgaagcagatgatatcattggtacagtatcaaaaattgcttccgaaagtgggatggatgtgcttatcgtcacaggcgacagagatgcgcttcagcttgtgtcggcaaatgtaaaagtaaaaatatgtaaaaaaggcataacgcagatggatgagtacgatgaaaaggcggtctttgaaaagtatgaagtgacgccgcttcaattcatagacttgaaagggcttatgggagacaaatcagacaacattccaggagtgcccaatataggggagaagacggccataaagcttgttaaagaatttggatcaattgaaaatttactgatgaatacagataagttaaaagggaaaataaaagaaaatgtagaaaacaatgcagaattagctgttttaagcaaacggcttgctacgattgagagaaatgttcctattgatattgatttgaatgaatacgcggttaaaaattacgatgtcaataagcttacagagctatttgaaaaattggaattttcaagcctcatctcagatttaaaagatgatagtcgtgatacaaaggatattaaagaatggcctgtaagagattttacatacgttaaaaatgttttaggaaagtttgatgttttgtcattgtatccattcatatatgatggaaagataaaagcagtatcatttgcttgcggtgacggatcgttttttgtagagattgatgattatgacaattttaaattgcttaataatgataagcttacgttgataggacacgatctgaaagattttttagtaaacatttcatactgcggtattgaacttaattgtaagattttagatacggccataatgacttatcttttaaatccgtctgagtcgaattacgacataagtcgcgtattgaaaaaatacttgaaagaggatttgcaaaacatagatgatatagtaggcaagggcaggaataaaaagagctacgatgacattgacaaaaagcttttagtcgattatatgtgttcagccgcatcaaacttatctaagttaaaagataagctcatgtcatttataaaagagatggagatggaagatcttttaaaaaatgtggaaattccgcttattgaagtgctaaaatctatggaggtgtacggctttacattagataaagatgtacttagaagtatttctaaagaaatagatgaaaagacagataagattgtaaaagatatttacgatgctgctggatacgaatttaatattaactctacaaagcagttatcagaatttttgtttgataaactgaatttgccagcaataaaaaagactaaaacagggtattcgactgacatggaagtccttgcagaacttataccgtacaatgacatagtaggagaaataatagaatatagacagcttatgaagcttaaatctacgtacatagatggcttcattcccatcatggatgaaaataatagggtccactctacgtttaaacaaacagttgctgctacagggagaattagctcaacagagcctaatctgcagaacatacctgtaagagaagaatttggcaggaggataagaaaggcatttgtatcaagttatgaagatgggcttataatatctgctgattattctcagattgagctaagggttcttgcacatctttcagaggatgaaaaacttattgagtcatttttgaacaacgaagatatacatttaaggacggcatcggaggtttttaaggtttcgaaagaagaagtgacaagtgaaatgagaaggcgggcgaaagctgtcaactttggtattgtatatggtataagcgattacggcttatctaaagacttaaagatttcgcgaaaagaagcgaaagaatacatagacaattattttgacaggtacaagggcgtcaaaaattacatcgactcaattgtcaaatttgcaaaggaaaatgggtatgttacgactatcttaaataggagaagatacataccggaaatcaattcaaaaaattttaaccaaagatcttttatggagagaatggcaatgaatacacctattcaaggtagcgctgcggatataataaagatgtcgatggttaaagtatacaatgaattaaaggaaagaggattgaaatcaagacttattcttcaggtgcacgatgagcttataattgacacacatcctgatgaagttgaaatagtcaaggagcttctaaaatcaataatggaaaatatcataaagttgaaagttcctttagttgtagatatagggcaagggaaaaactggtatgatgcaaaataaaaggatcc

SEQ ID NO: 885 - DNA, 2678 bp, Artificial Sequence
  Description of Artificial Sequence: Synthetic Clostridium thermosulfurogenes DNA Polymerase G800F
atgaaatacctgctgccgaccgctgctgctggtctgctgctcctcgctgcccagccggcgatggccatggcgaaatttttgatcatagatggtaatagcttgatgtacagggcgtattttgccctgcctgatttgatgaacagcgaaggaatgcatacaaatgccatatacggtttttcaatgatgcttcttaaattgctggaggaggagaaaccagactacatagcaatagctttcgataaaaaggcttctacatttaggcacaaggagtacagtgcttataaaggaacccgccagtcgatgccagaagagctgatagaacaggtggatattttaaaagatgtgataaatgcatttaacataaagaccatcgagatagagggatttgaagcagatgatatcattggtacagtatcaaaaattgcttccgaaagtgggatggatgtgcttatcgtcacaggcgacagagatgcgcttcagcttgtgtcggcaaatgtaaaagtaaaaatatgtaaaaaaggcataacgcagatggatgagtacgatgaaaaggcggtctttgaaaagtatgaagtgacgccgcttcaattcatagacttgaaagggcttatgggagacaaatcagacaacattccaggagtgcccaatataggggagaagacggccataaagcttgttaaagaatttggatcaattgaaaatttactgatgaatacagataagttaaaagggaaaataaaagaaaatgtagaaaacaatgcagaattagctgttttaagcaaacggcttgctacgattgagagaaatgttcctattgatattgatttgaatgaatacgcggttaaaaattacgatgtcaataagcttacagagctatttgaaaaattggaattttcaagcctcatctcagatttaaaagatgatagtcgtgatacaaaggatattaaagaatggcctgtaagagattttacatacgttaaaaatgttttaggaaagtttgatgttttgtcattgtatccattcatatatgatggaaagataaaagcagtatcatttgcttgcggtgacggatcgttttttgtagagattgatgattatgacaattttaaattgcttaataatgataagcttacgttgataggacacgatctgaaagattttttagtaaacatttcatactgcggtattgaacttaattgtaagattttagatacggccataatgacttatcttttaaatccgtctgagtcgaattacgacataagtcgcgtattgaaaaaatacttgaaagaggatttgcaaaacatagatgatatagtaggcaagggcaggaataaaaagagctacgatgacattgacaaaaagcttttagtcgattatatgtgttcagccgcatcaaacttatctaagttaaaagataagctcatgtcatttataaaagagatggagatggaagatcttttaaaaaatgtggaaattccgcttattgaagtgctaaaatctatggaggtgtacggctttacattagataaagatgtacttagaagtatttctaaagaaatagatgaaaagacagataagattgtaaaagatatttacgatgctgctggatacgaatttaatattaactctacaaagcagttatcagaatttttgtttgataaactgaatttgccagcaataaaaaagactaaaacagggtattcgactgacatggaagtccttgcagaacttataccgtacaatgacatagtaggagaaataatagaatatagacagcttatgaagcttaaatctacgtacatagatggcttcattcccatcatggatgaaaataatagggtccactctacgtttaaacaaacagttgctgctacagggagaattagctcaacagagcctaatctgcagaacatacctgtaagagaagaatttggcaggaggataagaaaggcatttgtatcaagttatgaagatgggcttataatatctgctgattattctcagattgagctaagggttcttgcacatctttcagaggatgaaaaacttattgagtcatttttgaacaacgaagatatacatttaaggacggcatcggaggtttttaaggtttcgaaagaagaagtgacaagtgaaatgagaaggcgggcgaaagctgtcaactttggtattgtatatggtataagcgattacggcttatctaaagacttaaagatttcgcgaaaagaagcgaaagaatacatagacaattattttgacaggtacaagggcgtcaaaaattacatcgactcaattgtcaaatttgcaaaggaaaatgggtatgttacgactatcttaaataggagaagatacataccggaaatcaattcaaaaaattttaaccaaagatctttttttgagagaatggcaatgaatacacctattcaaggtagcgctgcggatataataaagatgtcgatggttaaagtatacaatgaattaaaggaaagaggattgaaatcaagacttattcttcaggtgcacgatgagcttataattgacacacatcctgatgaagttgaaatagtcaaggagcttctaaaatcaataatggaaaatatcataaagttgaaagttcctttagttgtagatatagggcaagggaaaaactggtatgatgcaaaataaaaggatcc

SEQ ID NO: 886 - DNA, 2620 bp, Artificial Sequence
  Description of Artificial Sequence: Synthetic Clostridium thermosulfurogenes DNA Polymerase G800P
atgaaatacctgctgccgaccgctgctgctggtctgctgctcctcgctgcccagccggcgatggccatggcgaaatttttgatcatagatggtaatagcttgatgtacagggcgtattttgccctgcctgatttgatgaacagcgaaggaatgcatacaaatgccatatacggtttttcaatgatgcttcttaaattgctggaggaggagaaaccagactacatagcaatagctttcgataaaaaggcttctacatttaggcacaaggagtacagtgcttataaaggaacccgccagtcgatgccagaagagctgatagaacaggtggatattttaaaagatgtgataaatgcatttaacataaagaccatcgagatagagggatttgaagcagatgatatcattggtacagtatcaaaaattgcttccgaaagtgggatggatgtgcttatcgtcacaggcgacagagatgcgcttcagcttgtgtcggcaaatgtaaaagtaaaaatatgtaaaaaaggcataacgcagatggatgagtacgatgaaaaggcggtctttgaaaagtatgaagtgacgccgcttcaattcatagacttgaaagggcttatgggagacaaatcagacaacattccaggagtgcccaatataggggagaagacggccataaagcttgttaaagaatttggatcaattgaaaatttactgatgaatacagataagttaaaagggaaaataaaagaaaatgtagaaaacaatgcagaattagctgttttaagcaaacggcttgctacgattgagagaaatgttcctattgatattgatttgaatgaatacgcggttaaaaattacgatgtcaataagcttacagagctatttgaaaaattggaattttcaagcctcatctcagatttaaaagatgatagtcgtgatacaaaggatattaaagaatggcctgtaagagattttacatacgttaaaaatgttttaggaaagtttgatgttttgtcattgtatccattcatatatgatggaaagataaaagcagtatcatttgcttgcggtgacggatcgttttttgtagagattgatgattatgacaattttaaattgcttaataatgataagcttacgttgataggacacgatctgaaagattttttagtaaacatttcatactgcggtattgaacttaattgtaagattttagatacggccataatgacttatcttttaaatccgtctgagtcgaattacgacataagtcgcgtattgaaaaaatacttgaaagaggatttgcaaaacatagatgatatagtaggcaagggcaggaataaaaagagctacgatgacattgacaaaaagcttttagtcgattatatgtgttcagccgcatcaaacttatctaagttaaaagataagctcatgtcatttataaaagagatggagatggaagatcttttaaaaaatgtggaaattccgcttattgaagtgctaaaatctatggaggtgtacggctttacattagataaagatgtacttagaagtatttctaaagaaatagatgaaaagacagataagattgtaaaagatatttacgatgctgctggatacgaatttaatattaactctacaaagcagttatcagaatttttgtttgataaactgaatttgccagcaataaaaaagactaaaacagggtattcgactgacatggaagtccttgcagaacttataccgtacaatgacatagtaggagaaataatagaatatagacagcttatgaagcttaaatctacgtacatagatggcttcattcccatcatggatgaaaataatagggtccactctacgtttaaacaaacagttgctgctacagggagaattagctcaacagagcctaatctgcagaacatacctgtaagagaagaatttggcaggaggataagaaaggcatttgtatcaagttatgaagatgggcttataatatctgctgattattctcagattgagctaagggttcttgcacatctttcagaggatgaaaaacttattgagtcatttttgaacaacgaagatatacatttaaggacggcatcggaggtttttaaggtttcgaaagaagaagtgacaagtgaaatgagaaggcgggcgaaagctgtcaactttggtattgtatatggtataagcgattacggcttatctaaagacttaaagatttcgcgaaaagaagcgaaagaatacatagacaattattttgacaggtacaagggcgtcaaaaattacatcgactcaattgtcaaatttgcaaaggaaaatgggtatgttacgactatcttaaataggagaagatacataccggaaatcaattcaaaaaattttaaccaaagatcttttcctgagagaatggcaatgaatacacctattcaaggtagcgctgcggatataataaagatgtcgatggttaaagtatacaatgaattaaaggaaagaggattgaaatcaagacttattcttcaggtgcacgatgagcttataattgacacacatcctgatgaagttgaaatagtcaaggagcttctaaaatcaataatggaaaatatcataaagttgaaagttc

SEQ ID NO: 887 - DNA, 2678 bp, Artificial Sequence
  Description of Artificial Sequence: Synthetic Clostridium thermosulfurogenes DNA Polymerase G800S
atgaaatacctgctgccgaccgctgctgctggtctgctgctcctcgctgcccagccggcgatggccatggcgaaatttttgatcatagatggtaatagcttgatgtacagggcgtattttgccctgcctgatttgatgaacagcgaaggaatgcatacaaatgccatatacggtttttcaatgatgcttcttaaattgctggaggaggagaaaccagactacatagcaatagctttcgataaaaaggcttctacatttaggcacaaggagtacagtgcttataaaggaacccgccagtcgatgccagaagagctgatagaacaggtggatattttaaaagatgtgataaatgcatttaacataaagaccatcgagatagagggatttgaagcagatgatatcattggtacagtatcaaaaattgcttccgaaagtgggatggatgtgcttatcgtcacaggcgacagagatgcgcttcagcttgtgtcggcaaatgtaaaagtaaaaatatgtaaaaaaggcataacgcagatggatgagtacgatgaaaaggcggtctttgaaaagtatgaagtgacgccgcttcaattcatagacttgaaagggcttatgggagacaaatcagacaacattccaggagtgcccaatataggggagaagacggccataaagcttgttaaagaatttggatcaattgaaaatttactgatgaatacagataagttaaaagggaaaataaaagaaaatgtagaaaacaatgcagaattagctgttttaagcaaacggcttgctacgattgagagaaatgttcctattgatattgatttgaatgaatacgcggttaaaaattacgatgtcaataagcttacagagctatttgaaaaattggaattttcaagcctcatctcagatttaaaagatgatagtcgtgatacaaaggatattaaagaatggcctgtaagagattttacatacgttaaaaatgttttaggaaagtttgatgttttgtcattgtatccattcatatatgatggaaagataaaagcagtatcatttgcttgcggtgacggatcgttttttgtagagattgatgattatgacaattttaaattgcttaataatgataagcttacgttgataggacacgatctgaaagattttttagtaaacatttcatactgcggtattgaacttaattgtaagattttagatacggccataatgacttatcttttaaatccgtctgagtcgaattacgacataagtcgcgtattgaaaaaatacttgaaagaggatttgcaaaacatagatgatatagtaggcaagggcaggaataaaaagagctacgatgacattgacaaaaagcttttagtcgattatatgtgttcagccgcatcaaacttatctaagttaaaagataagctcatgtcatttataaaagagatggagatggaagatcttttaaaaaatgtggaaattccgcttattgaagtgctaaaatctatggaggtgtacggctttacattagataaagatgtacttagaagtatttctaaagaaatagatgaaaagacagataagattgtaaaagatatttacgatgctgctggatacgaatttaatattaactctacaaagcagttatcagaatttttgtttgataaactgaatttgccagcaataaaaaagactaaaacagggtattcgactgacatggaagtccttgcagaacttataccgtacaatgacatagtaggagaaataatagaatatagacagcttatgaagcttaaatctacgtacatagatggcttcattcccatcatggatgaaaataatagggtccactctacgtttaaacaaacagttgctgctacagggagaattagctcaacagagcctaatctgcagaacatacctgtaagagaagaatttggcaggaggataagaaaggcatttgtatcaagttatgaagatgggcttataatatctgctgattattctcagattgagctaagggttcttgcacatctttcagaggatgaaaaacttattgagtcatttttgaacaacgaagatatacatttaaggacggcatcggaggtttttaaggtttcgaaagaagaagtgacaagtgaaatgagaaggcgggcgaaagctgtcaactttggtattgtatatggtataagcgattacggcttatctaaagacttaaagatttcgcgaaaagaagcgaaagaatacatagacaattattttgacaggtacaagggcgtcaaaaattacatcgactcaattgtcaaatttgcaaaggaaaatgggtatgttacgactatcttaaataggagaagatacataccggaaatcaattcaaaaaattttaaccaaagatctttttctgagagaatggcaatgaatacacctattcaaggtagcgctgcggatataataaagatgtcgatggttaaagtatacaatgaattaaaggaaagaggattgaaatcaagacttattcttcaggtgcacgatgagcttataattgacacacatcctgatgaagttgaaatagtcaaggagcttctaaaatcaataatggaaaatatcataaagttgaaagttcctttagttgtagatatagggcaagggaaaaactggtatgatgcaaaataaaaggatcc

SEQ ID NO: 888 - DNA, 2678 bp, Artificial Sequence
  Description of Artificial Sequence: Synthetic Clostridium thermosulfurogenes DNA Polymerase G800T
atgaaatacctgctgccgaccgctgctgctggtctgctgctcctcgctgcccagccggcgatggccatggcgaaatttttgatcatagatggtaatagcttgatgtacagggcgtattttgccctgcctgatttgatgaacagcgaaggaatgcatacaaatgccatatacggtttttcaatgatgcttcttaaattgctggaggaggagaaaccagactacatagcaatagctttcgataaaaaggcttctacatttaggcacaaggagtacagtgcttataaaggaacccgccagtcgatgccagaagagctgatagaacaggtggatattttaaaagatgtgataaatgcatttaacataaagaccatcgagatagagggatttgaagcagatgatatcattggtacagtatcaaaaattgcttccgaaagtgggatggatgtgcttatcgtcacaggcgacagagatgcgcttcagcttgtgtcggcaaatgtaaaagtaaaaatatgtaaaaaaggcataacgcagatggatgagtacgatgaaaaggcggtctttgaaaagtatgaagtgacgccgcttcaattcatagacttgaaagggcttatgggagacaaatcagacaacattccaggagtgcccaatataggggagaagacggccataaagcttgttaaagaatttggatcaattgaaaatttactgatgaatacagataagttaaaagggaaaataaaagaaaatgtagaaaacaatgcagaattagctgttttaagcaaacggcttgctacgattgagagaaatgttcctattgatattgatttgaatgaatacgcggttaaaaattacgatgtcaataagcttacagagctatttgaaaaattggaattttcaagcctcatctcagatttaaaagatgatagtcgtgatacaaaggatattaaagaatggcctgtaagagattttacatacgttaaaaatgttttaggaaagtttgatgttttgtcattgtatccattcatatatgatggaaagataaaagcagtatcatttgcttgcggtgacggatcgttttttgtagagattgatgattatgacaattttaaattgcttaataatgataagcttacgttgataggacacgatctgaaagattttttagtaaacatttcatactgcggtattgaacttaattgtaagattttagatacggccataatgacttatcttttaaatccgtctgagtcgaattacgacataagtcgcgtattgaaaaaatacttgaaagaggatttgcaaaacatagatgatatagtaggcaagggcaggaataaaaagagctacgatgacattgacaaaaagcttttagtcgattatatgtgttcagccgcatcaaacttatctaagttaaaagataagctcatgtcatttataaaagagatggagatggaagatcttttaaaaaatgtggaaattccgcttattgaagtgctaaaatctatggaggtgtacggctttacattagataaagatgtacttagaagtatttctaaagaaatagatgaaaagacagataagattgtaaaagatatttacgatgctgctggatacgaatttaatattaactctacaaagcagttatcagaatttttgtttgataaactgaatttgccagcaataaaaaagactaaaacagggtattcgactgacatggaagtccttgcagaacttataccgtacaatgacatagtaggagaaataatagaatatagacagcttatgaagcttaaatctacgtacatagatggcttcattcccatcatggatgaaaataatagggtccactctacgtttaaacaaacagttgctgctacagggagaattagctcaacagagcctaatctgcagaacatacctgtaagagaagaatttggcaggaggataagaaaggcatttgtatcaagttatgaagatgggcttataatatctgctgattattctcagattgagctaagggttcttgcacatctttcagaggatgaaaaacttattgagtcatttttgaacaacgaagatatacatttaaggacggcatcggaggtttttaaggtttcgaaagaagaagtgacaagtgaaatgagaaggcgggcgaaagctgtcaactttggtattgtatatggtataagcgattacggcttatctaaagacttaaagatttcgcgaaaagaagcgaaagaatacatagacaattattttgacaggtacaagggcgtcaaaaattacatcgactcaattgtcaaatttgcaaaggaaaatgggtatgttacgactatcttaaataggagaagatacataccggaaatcaattcaaaaaattttaaccaaagatcttttactgagagaatggcaatgaatacacctattcaaggtagcgctgcggatataataaagatgtcgatggttaaagtatacaatgaattaaaggaaagaggattgaaatcaagacttattcttcaggtgcacgatgagcttataattgacacacatcctgatgaagttgaaatagtcaaggagcttctaaaatcaataatggaaaatatcataaagttgaaagttcctttagttgtagatatagggcaagggaaaaactggtatgatgcaaaataaaaggatcc

SEQ ID NO: 889 - DNA, 2678 bp, Artificial Sequence
  Description of Artificial Sequence: Synthetic Clostridium thermosulfurogenes DNA Polymerase G800W
atgaaatacctgctgccgaccgctgctgctggtctgctgctcctcgctgcccagccggcgatggccatggcgaaatttttgatcatagatggtaatagcttgatgtacagggcgtattttgccctgcctgatttgatgaacagcgaaggaatgcatacaaatgccatatacggtttttcaatgatgcttcttaaattgctggaggaggagaaaccagactacatagcaatagctttcgataaaaaggcttctacatttaggcacaaggagtacagtgcttataaaggaacccgccagtcgatgccagaagagctgatagaacaggtggatattttaaaagatgtgataaatgcatttaacataaagaccatcgagatagagggatttgaagcagatgatatcattggtacagtatcaaaaattgcttccgaaagtgggatggatgtgcttatcgtcacaggcgacagagatgcgcttcagcttgtgtcggcaaatgtaaaagtaaaaatatgtaaaaaaggcataacgcagatggatgagtacgatgaaaaggcggtctttgaaaagtatgaagtgacgccgcttcaattcatagacttgaaagggcttatgggagacaaatcagacaacattccaggagtgcccaatataggggagaagacggccataaagcttgttaaagaatttggatcaattgaaaatttactgatgaatacagataagttaaaagggaaaataaaagaaaatgtagaaaacaatgcagaattagctgttttaagcaaacggcttgctacgattgagagaaatgttcctattgatattgatttgaatgaatacgcggttaaaaattacgatgtcaataagcttacagagctatttgaaaaattggaattttcaagcctcatctcagatttaaaagatgatagtcgtgatacaaaggatattaaagaatggcctgtaagagattttacatacgttaaaaatgttttaggaaagtttgatgttttgtcattgtatccattcatatatgatggaaagataaaagcagtatcatttgcttgcggtgacggatcgttttttgtagagattgatgattatgacaattttaaattgcttaataatgataagcttacgttgataggacacgatctgaaagattttttagtaaacatttcatactgcggtattgaacttaattgtaagattttagatacggccataatgacttatcttttaaatccgtctgagtcgaattacgacataagtcgcgtattgaaaaaatacttgaaagaggatttgcaaaacatagatgatatagtaggcaagggcaggaataaaaagagctacgatgacattgacaaaaagcttttagtcgattatatgtgttcagccgcatcaaacttatctaagttaaaagataagctcatgtcatttataaaagagatggagatggaagatcttttaaaaaatgtggaaattccgcttattgaagtgctaaaatctatggaggtgtacggctttacattagataaagatgtacttagaagtatttctaaagaaatagatgaaaagacagataagattgtaaaagatatttacgatgctgctggatacgaatttaatattaactctacaaagcagttatcagaatttttgtttgataaactgaatttgccagcaataaaaaagactaaaacagggtattcgactgacatggaagtccttgcagaacttataccgtacaatgacatagtaggagaaataatagaatatagacagcttatgaagcttaaatctacgtacatagatggcttcattcccatcatggatgaaaataatagggtccactctacgtttaaacaaacagttgctgctacagggagaattagctcaacagagcctaatctgcagaacatacctgtaagagaagaatttggcaggaggataagaaaggcatttgtatcaagttatgaagatgggcttataatatctgctgattattctcagattgagctaagggttcttgcacatctttcagaggatgaaaaacttattgagtcatttttgaacaacgaagatatacatttaaggacggcatcggaggtttttaaggtttcgaaagaagaagtgacaagtgaaatgagaaggcgggcgaaagctgtcaactttggtattgtatatggtataagcgattacggcttatctaaagacttaaagatttcgcgaaaagaagcgaaagaatacatagacaattattttgacaggtacaagggcgtcaaaaattacatcgactcaattgtcaaatttgcaaaggaaaatgggtatgttacgactatcttaaataggagaagatacataccggaaatcaattcaaaaaattttaaccaaagatctttttgggagagaatggcaatgaatacacctattcaaggtagcgctgcggatataataaagatgtcgatggttaaagtatacaatgaattaaaggaaagaggattgaaatcaagacttattcttcaggtgcacgatgagcttataattgacacacatcctgatgaagttgaaatagtcaaggagcttctaaaatcaataatggaaaatatcataaagttgaaagttcctttagttgtagatatagggcaagggaaaaactggtatgatgcaaaataaaaggatcc

SEQ ID NO: 890 - DNA, 2678 bp, Artificial Sequence
  Description of Artificial Sequence: Synthetic Clostridium thermosulfurogenes DNA Polymerase G800Y
atgaaatacctgctgccgaccgctgctgctggtctgctgctcctcgctgcccagccggcgatggccatggcgaaatttttgatcatagatggtaatagcttgatgtacagggcgtattttgccctgcctgatttgatgaacagcgaaggaatgcatacaaatgccatatacggtttttcaatgatgcttcttaaattgctggaggaggagaaaccagactacatagcaatagctttcgataaaaaggcttctacatttaggcacaaggagtacagtgcttataaaggaacccgccagtcgatgccagaagagctgatagaacaggtggatattttaaaagatgtgataaatgcatttaacataaagaccatcgagatagagggatttgaagcagatgatatcattggtacagtatcaaaaattgcttccgaaagtgggatggatgtgcttatcgtcacaggcgacagagatgcgcttcagcttgtgtcggcaaatgtaaaagtaaaaatatgtaaaaaaggcataacgcagatggatgagtacgatgaaaaggcggtctttgaaaagtatgaagtgacgccgcttcaattcatagacttgaaagggcttatgggagacaaatcagacaacattccaggagtgcccaatataggggagaagacggccataaagcttgttaaagaatttggatcaattgaaaatttactgatgaatacagataagttaaaagggaaaataaaagaaaatgtagaaaacaatgcagaattagctgttttaagcaaacggcttgctacgattgagagaaatgttcctattgatattgatttgaatgaatacgcggttaaaaattacgatgtcaataagcttacagagctatttgaaaaattggaattttcaagcctcatctcagatttaaaagatgatagtcgtgatacaaaggatattaaagaatggcctgtaagagattttacatacgttaaaaatgttttaggaaagtttgatgttttgtcattgtatccattcatatatgatggaaagataaaagcagtatcatttgcttgcggtgacggatcgttttttgtagagattgatgattatgacaattttaaattgcttaataatgataagcttacgttgataggacacgatctgaaagattttttagtaaacatttcatactgcggtattgaacttaattgtaagattttagatacggccataatgacttatcttttaaatccgtctgagtcgaattacgacataagtcgcgtattgaaaaaatacttgaaagaggatttgcaaaacatagatgatatagtaggcaagggcaggaataaaaagagctacgatgacattgacaaaaagcttttagtcgattatatgtgttcagccgcatcaaacttatctaagttaaaagataagctcatgtcatttataaaagagatggagatggaagatcttttaaaaaatgtggaaattccgcttattgaagtgctaaaatctatggaggtgtacggctttacattagataaagatgtacttagaagtatttctaaagaaatagatgaaaagacagataagattgtaaaagatatttacgatgctgctggatacgaatttaatattaactctacaaagcagttatcagaatttttgtttgataaactgaatttgccagcaataaaaaagactaaaacagggtattcgactgacatggaagtccttgcagaacttataccgtacaatgacatagtaggagaaataatagaatatagacagcttatgaagcttaaatctacgtacatagatggcttcattcccatcatggatgaaaataatagggtccactctacgtttaaacaaacagttgctgctacagggagaattagctcaacagagcctaatctgcagaacatacctgtaagagaagaatttggcaggaggataagaaaggcatttgtatcaagttatgaagatgggcttataatatctgctgattattctcagattgagctaagggttcttgcacatctttcagaggatgaaaaacttattgagtcatttttgaacaacgaagatatacatttaaggacggcatcggaggtttttaaggtttcgaaagaagaagtgacaagtgaaatgagaaggcgggcgaaagctgtcaactttggtattgtatatggtataagcgattacggcttatctaaagacttaaagatttcgcgaaaagaagcgaaagaatacatagacaattattttgacaggtacaagggcgtcaaaaattacatcgactcaattgtcaaatttgcaaaggaaaatgggtatgttacgactatcttaaataggagaagatacataccggaaatcaattcaaaaaattttaaccaaagatctttttatgagagaatggcaatgaatacacctattcaaggtagcgctgcggatataataaagatgtcgatggttaaagtatacaatgaattaaaggaaagaggattgaaatcaagacttattcttcaggtgcacgatgagcttataattgacacacatcctgatgaagttgaaatagtcaaggagcttctaaaatcaataatggaaaatatcataaagttgaaagttcctttagttgtagatatagggcaagggaaaaactggtatgatgcaaaataaaaggatcc

SEQ ID NO: 891 - DNA, 2678 bp, Artificial Sequence
  Description of Artificial Sequence: Synthetic Clostridium thermosulfurogenes DNA Polymerase G800V
atgaaatacctgctgccgaccgctgctgctggtctgctgctcctcgctgcccagccggcgatggccatggcgaaatttttgatcatagatggtaatagcttgatgtacagggcgtattttgccctgcctgatttgatgaacagcgaaggaatgcatacaaatgccatatacggtttttcaatgatgcttcttaaattgctggaggaggagaaaccagactacatagcaatagctttcgataaaaaggcttctacatttaggcacaaggagtacagtgcttataaaggaacccgccagtcgatgccagaagagctgatagaacaggtggatattttaaaagatgtgataaatgcatttaacataaagaccatcgagatagagggatttgaagcagatgatatcattggtacagtatcaaaaattgcttccgaaagtgggatggatgtgcttatcgtcacaggcgacagagatgcgcttcagcttgtgtcggcaaatgtaaaagtaaaaatatgtaaaaaaggcataacgcagatggatgagtacgatgaaaaggcggtctttgaaaagtatgaagtgacgccgcttcaattcatagacttgaaagggcttatgggagacaaatcagacaacattccaggagtgcccaatataggggagaagacggccataaagcttgttaaagaatttggatcaattgaaaatttactgatgaatacagataagttaaaagggaaaataaaagaaaatgtagaaaacaatgcagaattagctgttttaagcaaacggcttgctacgattgagagaaatgttcctattgatattgatttgaatgaatacgcggttaaaaattacgatgtcaataagcttacagagctatttgaaaaattggaattttcaagcctcatctcagatttaaaagatgatagtcgtgatacaaaggatattaaagaatggcctgtaagagattttacatacgttaaaaatgttttaggaaagtttgatgttttgtcattgtatccattcatatatgatggaaagataaaagcagtatcatttgcttgcggtgacggatcgttttttgtagagattgatgattatgacaattttaaattgcttaataatgataagcttacgttgataggacacgatctgaaagattttttagtaaacatttcatactgcggtattgaacttaattgtaagattttagatacggccataatgacttatcttttaaatccgtctgagtcgaattacgacataagtcgcgtattgaaaaaatacttgaaagaggatttgcaaaacatagatgatatagtaggcaagggcaggaataaaaagagctacgatgacattgacaaaaagcttttagtcgattatatgtgttcagccgcatcaaacttatctaagttaaaagataagctcatgtcatttataaaagagatggagatggaagatcttttaaaaaatgtggaaattccgcttattgaagtgctaaaatctatggaggtgtacggctttacattagataaagatgtacttagaagtatttctaaagaaatagatgaaaagacagataagattgtaaaagatatttacgatgctgctggatacgaatttaatattaactctacaaagcagttatcagaatttttgtttgataaactgaatttgccagcaataaaaaagactaaaacagggtattcgactgacatggaagtccttgcagaacttataccgtacaatgacatagtaggagaaataatagaatatagacagcttatgaagcttaaatctacgtacatagatggcttcattcccatcatggatgaaaataatagggtccactctacgtttaaacaaacagttgctgctacagggagaattagctcaacagagcctaatctgcagaacatacctgtaagagaagaatttggcaggaggataagaaaggcatttgtatcaagttatgaagatgggcttataatatctgctgattattctcagattgagctaagggttcttgcacatctttcagaggatgaaaaacttattgagtcatttttgaacaacgaagatatacatttaaggacggcatcggaggtttttaaggtttcgaaagaagaagtgacaagtgaaatgagaaggcgggcgaaagctgtcaactttggtattgtatatggtataagcgattacggcttatctaaagacttaaagatttcgcgaaaagaagcgaaagaatacatagacaattattttgacaggtacaagggcgtcaaaaattacatcgactcaattgtcaaatttgcaaaggaaaatgggtatgttacgactatcttaaataggagaagatacataccggaaatcaattcaaaaaattttaaccaaagatcttttgttgagagaatggcaatgaatacacctattcaaggtagcgctgcggatataataaagatgtcgatggttaaagtatacaatgaattaaaggaaagaggattgaaatcaagacttattcttcaggtgcacgatgagcttataattgacacacatcctgatgaagttgaaatagtcaaggagcttctaaaatcaataatggaaaatatcataaagttgaaagttcctttagttgtagatatagggcaagggaaaaactggtatgatgcaaaataaaaggatcc

SEQ ID NO: 892 - DNA, 2678 bp, Artificial Sequence
  Description of Artificial Sequence: Synthetic Clostridium thermosulfurogenes DNA Polymerase E801A
atgaaatacctgctgccgaccgctgctgctggtctgctgctcctcgctgcccagccggcgatggccatggcgaaatttttgatcatagatggtaatagcttgatgtacagggcgtattttgccctgcctgatttgatgaacagcgaaggaatgcatacaaatgccatatacggtttttcaatgatgcttcttaaattgctggaggaggagaaaccagactacatagcaatagctttcgataaaaaggcttctacatttaggcacaaggagtacagtgcttataaaggaacccgccagtcgatgccagaagagctgatagaacaggtggatattttaaaagatgtgataaatgcatttaacataaagaccatcgagatagagggatttgaagcagatgatatcattggtacagtatcaaaaattgcttccgaaagtgggatggatgtgcttatcgtcacaggcgacagagatgcgcttcagcttgtgtcggcaaatgtaaaagtaaaaatatgtaaaaaaggcataacgcagatggatgagtacgatgaaaaggcggtctttgaaaagtatgaagtgacgccgcttcaattcatagacttgaaagggcttatgggagacaaatcagacaacattccaggagtgcccaatataggggagaagacggccataaagcttgttaaagaatttggatcaattgaaaatttactgatgaatacagataagttaaaagggaaaataaaagaaaatgtagaaaacaatgcagaattagctgttttaagcaaacggcttgctacgattgagagaaatgttcctattgatattgatttgaatgaatacgcggttaaaaattacgatgtcaataagcttacagagctatttgaaaaattggaattttcaagcctcatctcagatttaaaagatgatagtcgtgatacaaaggatattaaagaatggcctgtaagagattttacatacgttaaaaatgttttaggaaagtttgatgttttgtcattgtatccattcatatatgatggaaagataaaagcagtatcatttgcttgcggtgacggatcgttttttgtagagattgatgattatgacaattttaaattgcttaataatgataagcttacgttgataggacacgatctgaaagattttttagtaaacatttcatactgcggtattgaacttaattgtaagattttagatacggccataatgacttatcttttaaatccgtctgagtcgaattacgacataagtcgcgtattgaaaaaatacttgaaagaggatttgcaaaacatagatgatatagtaggcaagggcaggaataaaaagagctacgatgacattgacaaaaagcttttagtcgattatatgtgttcagccgcatcaaacttatctaagttaaaagataagctcatgtcatttataaaagagatggagatggaagatcttttaaaaaatgtggaaattccgcttattgaagtgctaaaatctatggaggtgtacggctttacattagataaagatgtacttagaagtatttctaaagaaatagatgaaaagacagataagattgtaaaagatatttacgatgctgctggatacgaatttaatattaactctacaaagcagttatcagaatttttgtttgataaactgaatttgccagcaataaaaaagactaaaacagggtattcgactgacatggaagtccttgcagaacttataccgtacaatgacatagtaggagaaataatagaatatagacagcttatgaagcttaaatctacgtacatagatggcttcattcccatcatggatgaaaataatagggtccactctacgtttaaacaaacagttgctgctacagggagaattagctcaacagagcctaatctgcagaacatacctgtaagagaagaatttggcaggaggataagaaaggcatttgtatcaagttatgaagatgggcttataatatctgctgattattctcagattgagctaagggttcttgcacatctttcagaggatgaaaaacttattgagtcatttttgaacaacgaagatatacatttaaggacggcatcggaggtttttaaggtttcgaaagaagaagtgacaagtgaaatgagaaggcgggcgaaagctgtcaactttggtattgtatatggtataagcgattacggcttatctaaagacttaaagatttcgcgaaaagaagcgaaagaatacatagacaattattttgacaggtacaagggcgtcaaaaattacatcgactcaattgtcaaatttgcaaaggaaaatgggtatgttacgactatcttaaataggagaagatacataccggaaatcaattcaaaaaattttaaccaaagatcttttggcgctagaatggcaatgaatacacctattcaaggtagcgctgcggatataataaagatgtcgatggttaaagtatacaatgaattaaaggaaagaggattgaaatcaagacttattcttcaggtgcacgatgagcttataattgacacacatcctgatgaagttgaaatagtcaaggagcttctaaaatcaataatggaaaatatcataaagttgaaagttcctttagttgtagatatagggcaagggaaaaactggtatgatgcaaaataaaaggatcc

SEQ ID NO: 893 - DNA, 2678 bp, Artificial Sequence
  Description of Artificial Sequence: Synthetic Clostridium thermosulfurogenes DNA Polymerase E801R
atgaaatacctgctgccgaccgctgctgctggtctgctgctcctcgctgcccagccggcgatggccatggcgaaatttttgatcatagatggtaatagcttgatgtacagggcgtattttgccctgcctgatttgatgaacagcgaaggaatgcatacaaatgccatatacggtttttcaatgatgcttcttaaattgctggaggaggagaaaccagactacatagcaatagctttcgataaaaaggcttctacatttaggcacaaggagtacagtgcttataaaggaacccgccagtcgatgccagaagagctgatagaacaggtggatattttaaaagatgtgataaatgcatttaacataaagaccatcgagatagagggatttgaagcagatgatatcattggtacagtatcaaaaattgcttccgaaagtgggatggatgtgcttatcgtcacaggcgacagagatgcgcttcagcttgtgtcggcaaatgtaaaagtaaaaatatgtaaaaaaggcataacgcagatggatgagtacgatgaaaaggcggtctttgaaaagtatgaagtgacgccgcttcaattcatagacttgaaagggcttatgggagacaaatcagacaacattccaggagtgcccaatataggggagaagacggccataaagcttgttaaagaatttggatcaattgaaaatttactgatgaatacagataagttaaaagggaaaataaaagaaaatgtagaaaacaatgcagaattagctgttttaagcaaacggcttgctacgattgagagaaatgttcctattgatattgatttgaatgaatacgcggttaaaaattacgatgtcaataagcttacagagctatttgaaaaattggaattttcaagcctcatctcagatttaaaagatgatagtcgtgatacaaaggatattaaagaatggcctgtaagagattttacatacgttaaaaatgttttaggaaagtttgatgttttgtcattgtatccattcatatatgatggaaagataaaagcagtatcatttgcttgcggtgacggatcgttttttgtagagattgatgattatgacaattttaaattgcttaataatgataagcttacgttgataggacacgatctgaaagattttttagtaaacatttcatactgcggtattgaacttaattgtaagattttagatacggccataatgacttatcttttaaatccgtctgagtcgaattacgacataagtcgcgtattgaaaaaatacttgaaagaggatttgcaaaacatagatgatatagtaggcaagggcaggaataaaaagagctacgatgacattgacaaaaagcttttagtcgattatatgtgttcagccgcatcaaacttatctaagttaaaagataagctcatgtcatttataaaagagatggagatggaagatcttttaaaaaatgtggaaattccgcttattgaagtgctaaaatctatggaggtgtacggctttacattagataaagatgtacttagaagtatttctaaagaaatagatgaaaagacagataagattgtaaaagatatttacgatgctgctggatacgaatttaatattaactctacaaagcagttatcagaatttttgtttgataaactgaatttgccagcaataaaaaagactaaaacagggtattcgactgacatggaagtccttgcagaacttataccgtacaatgacatagtaggagaaataatagaatatagacagcttatgaagcttaaatctacgtacatagatggcttcattcccatcatggatgaaaataatagggtccactctacgtttaaacaaacagttgctgctacagggagaattagctcaacagagcctaatctgcagaacatacctgtaagagaagaatttggcaggaggataagaaaggcatttgtatcaagttatgaagatgggcttataatatctgctgattattctcagattgagctaagggttcttgcacatctttcagaggatgaaaaacttattgagtcatttttgaacaacgaagatatacatttaaggacggcatcggaggtttttaaggtttcgaaagaagaagtgacaagtgaaatgagaaggcgggcgaaagctgtcaactttggtattgtatatggtataagcgattacggcttatctaaagacttaaagatttcgcgaaaagaagcgaaagaatacatagacaattattttgacaggtacaagggcgtcaaaaattacatcgactcaattgtcaaatttgcaaaggaaaatgggtatgttacgactatcttaaataggagaagatacataccggaaatcaattcaaaaaattttaaccaaagatcttttggccgtagaatggcaatgaatacacctattcaaggtagcgctgcggatataataaagatgtcgatggttaaagtatacaatgaattaaaggaaagaggattgaaatcaagacttattcttcaggtgcacgatgagcttataattgacacacatcctgatgaagttgaaatagtcaaggagcttctaaaatcaataatggaaaatatcataaagttgaaagttcctttagttgtagatatagggcaagggaaaaactggtatgatgcaaaataaaaggatcc

SEQ ID NO: 894 - DNA, 2678 bp, Artificial Sequence
  Description of Artificial Sequence: Synthetic Clostridium thermosulfurogenes DNA Polymerase E801N
atgaaatacctgctgccgaccgctgctgctggtctgctgctcctcgctgcccagccggcgatggccatggcgaaatttttgatcatagatggtaatagcttgatgtacagggcgtattttgccctgcctgatttgatgaacagcgaaggaatgcatacaaatgccatatacggtttttcaatgatgcttcttaaattgctggaggaggagaaaccagactacatagcaatagctttcgataaaaaggcttctacatttaggcacaaggagtacagtgcttataaaggaacccgccagtcgatgccagaagagctgatagaacaggtggatattttaaaagatgtgataaatgcatttaacataaagaccatcgagatagagggatttgaagcagatgatatcattggtacagtatcaaaaattgcttccgaaagtgggatggatgtgcttatcgtcacaggcgacagagatgcgcttcagcttgtgtcggcaaatgtaaaagtaaaaatatgtaaaaaaggcataacgcagatggatgagtacgatgaaaaggcggtctttgaaaagtatgaagtgacgccgcttcaattcatagacttgaaagggcttatgggagacaaatcagacaacattccaggagtgcccaatataggggagaagacggccataaagcttgttaaagaatttggatcaattgaaaatttactgatgaatacagataagttaaaagggaaaataaaagaaaatgtagaaaacaatgcagaattagctgttttaagcaaacggcttgctacgattgagagaaatgttcctattgatattgatttgaatgaatacgcggttaaaaattacgatgtcaataagcttacagagctatttgaaaaattggaattttcaagcctcatctcagatttaaaagatgatagtcgtgatacaaaggatattaaagaatggcctgtaagagattttacatacgttaaaaatgttttaggaaagtttgatgttttgtcattgtatccattcatatatgatggaaagataaaagcagtatcatttgcttgcggtgacggatcgttttttgtagagattgatgattatgacaattttaaattgcttaataatgataagcttacgttgataggacacgatctgaaagattttttagtaaacatttcatactgcggtattgaacttaattgtaagattttagatacggccataatgacttatcttttaaatccgtctgagtcgaattacgacataagtcgcgtattgaaaaaatacttgaaagaggatttgcaaaacatagatgatatagtaggcaagggcaggaataaaaagagctacgatgacattgacaaaaagcttttagtcgattatatgtgttcagccgcatcaaacttatctaagttaaaagataagctcatgtcatttataaaagagatggagatggaagatcttttaaaaaatgtggaaattccgcttattgaagtgctaaaatctatggaggtgtacggctttacattagataaagatgtacttagaagtatttctaaagaaatagatgaaaagacagataagattgtaaaagatatttacgatgctgctggatacgaatttaatattaactctacaaagcagttatcagaatttttgtttgataaactgaatttgccagcaataaaaaagactaaaacagggtattcgactgacatggaagtccttgcagaacttataccgtacaatgacatagtaggagaaataatagaatatagacagcttatgaagcttaaatctacgtacatagatggcttcattcccatcatggatgaaaataatagggtccactctacgtttaaacaaacagttgctgctacagggagaattagctcaacagagcctaatctgcagaacatacctgtaagagaagaatttggcaggaggataagaaaggcatttgtatcaagttatgaagatgggcttataatatctgctgattattctcagattgagctaagggttcttgcacatctttcagaggatgaaaaacttattgagtcatttttgaacaacgaagatatacatttaaggacggcatcggaggtttttaaggtttcgaaagaagaagtgacaagtgaaatgagaaggcgggcgaaagctgtcaactttggtattgtatatggtataagcgattacggcttatctaaagacttaaagatttcgcgaaaagaagcgaaagaatacatagacaattattttgacaggtacaagggcgtcaaaaattacatcgactcaattgtcaaatttgcaaaggaaaatgggtatgttacgactatcttaaataggagaagatacataccggaaatcaattcaaaaaattttaaccaaagatcttttggcaatagaatggcaatgaatacacctattcaaggtagcgctgcggatataataaagatgtcgatggttaaagtatacaatgaattaaaggaaagaggattgaaatcaagacttattcttcaggtgcacgatgagcttataattgacacacatcctgatgaagttgaaatagtcaaggagcttctaaaatcaataatggaaaatatcataaagttgaaagttcctttagttgtagatatagggcaagggaaaaactggtatgatgcaaaataaaaggatcc

SEQ ID NO: 895 - DNA, 2678 bp, Artificial Sequence
  Description of Artificial Sequence: Synthetic Clostridium thermosulfurogenes DNA Polymerase E801D
atgaaatacctgctgccgaccgctgctgctggtctgctgctcctcgctgcccagccggcgatggccatggcgaaatttttgatcatagatggtaatagcttgatgtacagggcgtattttgccctgcctgatttgatgaacagcgaaggaatgcatacaaatgccatatacggtttttcaatgatgcttcttaaattgctggaggaggagaaaccagactacatagcaatagctttcgataaaaaggcttctacatttaggcacaaggagtacagtgcttataaaggaacccgccagtcgatgccagaagagctgatagaacaggtggatattttaaaagatgtgataaatgcatttaacataaagaccatcgagatagagggatttgaagcagatgatatcattggtacagtatcaaaaattgcttccgaaagtgggatggatgtgcttatcgtcacaggcgacagagatgcgcttcagcttgtgtcggcaaatgtaaaagtaaaaatatgtaaaaaaggcataacgcagatggatgagtacgatgaaaaggcggtctttgaaaagtatgaagtgacgccgcttcaattcatagacttgaaagggcttatgggagacaaatcagacaacattccaggagtgcccaatataggggagaagacggccataaagcttgttaaagaatttggatcaattgaaaatttactgatgaatacagataagttaaaagggaaaataaaagaaaatgtagaaaacaatgcagaattagctgttttaagcaaacggcttgctacgattgagagaaatgttcctattgatattgatttgaatgaatacgcggttaaaaattacgatgtcaataagcttacagagctatttgaaaaattggaattttcaagcctcatctcagatttaaaagatgatagtcgtgatacaaaggatattaaagaatggcctgtaagagattttacatacgttaaaaatgttttaggaaagtttgatgttttgtcattgtatccattcatatatgatggaaagataaaagcagtatcatttgcttgcggtgacggatcgttttttgtagagattgatgattatgacaattttaaattgcttaataatgataagcttacgttgataggacacgatctgaaagattttttagtaaacatttcatactgcggtattgaacttaattgtaagattttagatacggccataatgacttatcttttaaatccgtctgagtcgaattacgacataagtcgcgtattgaaaaaatacttgaaagaggatttgcaaaacatagatgatatagtaggcaagggcaggaataaaaagagctacgatgacattgacaaaaagcttttagtcgattatatgtgttcagccgcatcaaacttatctaagttaaaagataagctcatgtcatttataaaagagatggagatggaagatcttttaaaaaatgtggaaattccgcttattgaagtgctaaaatctatggaggtgtacggctttacattagataaagatgtacttagaagtatttctaaagaaatagatgaaaagacagataagattgtaaaagatatttacgatgctgctggatacgaatttaatattaactctacaaagcagttatcagaatttttgtttgataaactgaatttgccagcaataaaaaagactaaaacagggtattcgactgacatggaagtccttgcagaacttataccgtacaatgacatagtaggagaaataatagaatatagacagcttatgaagcttaaatctacgtacatagatggcttcattcccatcatggatgaaaataatagggtccactctacgtttaaacaaacagttgctgctacagggagaattagctcaacagagcctaatctgcagaacatacctgtaagagaagaatttggcaggaggataagaaaggcatttgtatcaagttatgaagatgggcttataatatctgctgattattctcagattgagctaagggttcttgcacatctttcagaggatgaaaaacttattgagtcatttttgaacaacgaagatatacatttaaggacggcatcggaggtttttaaggtttcgaaagaagaagtgacaagtgaaatgagaaggcgggcgaaagctgtcaactttggtattgtatatggtataagcgattacggcttatctaaagacttaaagatttcgcgaaaagaagcgaaagaatacatagacaattattttgacaggtacaagggcgtcaaaaattacatcgactcaattgtcaaatttgcaaaggaaaatgggtatgttacgactatcttaaataggagaagatacataccggaaatcaattcaaaaaattttaaccaaagatcttttggcgatagaatggcaatgaatacacctattcaaggtagcgctgcggatataataaagatgtcgatggttaaagtatacaatgaattaaaggaaagaggattgaaatcaagacttattcttcaggtgcacgatgagcttataattgacacacatcctgatgaagttgaaatagtcaaggagcttctaaaatcaataatggaaaatatcataaagttgaaagttcctttagttgtagatatagggcaagggaaaaactggtatgatgcaaaataaaaggatcc

SEQ ID NO: 896 - DNA, 2678 bp, Artificial Sequence
  Description of Artificial Sequence: Synthetic Clostridium thermosulfurogenes DNA Polymerase E801C
atgaaatacctgctgccgaccgctgctgctggtctgctgctcctcgctgcccagccggcgatggccatggcgaaatttttgatcatagatggtaatagcttgatgtacagggcgtattttgccctgcctgatttgatgaacagcgaaggaatgcatacaaatgccatatacggtttttcaatgatgcttcttaaattgctggaggaggagaaaccagactacatagcaatagctttcgataaaaaggcttctacatttaggcacaaggagtacagtgcttataaaggaacccgccagtcgatgccagaagagctgatagaacaggtggatattttaaaagatgtgataaatgcatttaacataaagaccatcgagatagagggatttgaagcagatgatatcattggtacagtatcaaaaattgcttccgaaagtgggatggatgtgcttatcgtcacaggcgacagagatgcgcttcagcttgtgtcggcaaatgtaaaagtaaaaatatgtaaaaaaggcataacgcagatggatgagtacgatgaaaaggcggtctttgaaaagtatgaagtgacgccgcttcaattcatagacttgaaagggcttatgggagacaaatcagacaacattccaggagtgcccaatataggggagaagacggccataaagcttgttaaagaatttggatcaattgaaaatttactgatgaatacagataagttaaaagggaaaataaaagaaaatgtagaaaacaatgcagaattagctgttttaagcaaacggcttgctacgattgagagaaatgttcctattgatattgatttgaatgaatacgcggttaaaaattacgatgtcaataagcttacagagctatttgaaaaattggaattttcaagcctcatctcagatttaaaagatgatagtcgtgatacaaaggatattaaagaatggcctgtaagagattttacatacgttaaaaatgttttaggaaagtttgatgttttgtcattgtatccattcatatatgatggaaagataaaagcagtatcatttgcttgcggtgacggatcgttttttgtagagattgatgattatgacaattttaaattgcttaataatgataagcttacgttgataggacacgatctgaaagattttttagtaaacatttcatactgcggtattgaacttaattgtaagattttagatacggccataatgacttatcttttaaatccgtctgagtcgaattacgacataagtcgcgtattgaaaaaatacttgaaagaggatttgcaaaacatagatgatatagtaggcaagggcaggaataaaaagagctacgatgacattgacaaaaagcttttagtcgattatatgtgttcagccgcatcaaacttatctaagttaaaagataagctcatgtcatttataaaagagatggagatggaagatcttttaaaaaatgtggaaattccgcttattgaagtgctaaaatctatggaggtgtacggctttacattagataaagatgtacttagaagtatttctaaagaaatagatgaaaagacagataagattgtaaaagatatttacgatgctgctggatacgaatttaatattaactctacaaagcagttatcagaatttttgtttgataaactgaatttgccagcaataaaaaagactaaaacagggtattcgactgacatggaagtccttgcagaacttataccgtacaatgacatagtaggagaaataatagaatatagacagcttatgaagcttaaatctacgtacatagatggcttcattcccatcatggatgaaaataatagggtccactctacgtttaaacaaacagttgctgctacagggagaattagctcaacagagcctaatctgcagaacatacctgtaagagaagaatttggcaggaggataagaaaggcatttgtatcaagttatgaagatgggcttataatatctgctgattattctcagattgagctaagggttcttgcacatctttcagaggatgaaaaacttattgagtcatttttgaacaacgaagatatacatttaaggacggcatcggaggtttttaaggtttcgaaagaagaagtgacaagtgaaatgagaaggcgggcgaaagctgtcaactttggtattgtatatggtataagcgattacggcttatctaaagacttaaagatttcgcgaaaagaagcgaaagaatacatagacaattattttgacaggtacaagggcgtcaaaaattacatcgactcaattgtcaaatttgcaaaggaaaatgggtatgttacgactatcttaaataggagaagatacataccggaaatcaattcaaaaaattttaaccaaagatcttttggctgtagaatggcaatgaatacacctattcaaggtagcgctgcggatataataaagatgtcgatggttaaagtatacaatgaattaaaggaaagaggattgaaatcaagacttattcttcaggtgcacgatgagcttataattgacacacatcctgatgaagttgaaatagtcaaggagcttctaaaatcaataatggaaaatatcataaagttgaaagttcctttagttgtagatatagggcaagggaaaaactggtatgatgcaaaataaaaggatcc

SEQ ID NO: 897 - DNA, 2678 bp, Artificial Sequence
  Description of Artificial Sequence: Synthetic Clostridium thermosulfurogenes DNA Polymerase E801Q
atgaaatacctgctgccgaccgctgctgctggtctgctgctcctcgctgcccagccggcgatggccatggcgaaatttttgatcatagatggtaatagcttgatgtacagggcgtattttgccctgcctgatttgatgaacagcgaaggaatgcatacaaatgccatatacggtttttcaatgatgcttcttaaattgctggaggaggagaaaccagactacatagcaatagctttcgataaaaaggcttctacatttaggcacaaggagtacagtgcttataaaggaacccgccagtcgatgccagaagagctgatagaacaggtggatattttaaaagatgtgataaatgcatttaacataaagaccatcgagatagagggatttgaagcagatgatatcattggtacagtatcaaaaattgcttccgaaagtgggatggatgtgcttatcgtcacaggcgacagagatgcgcttcagcttgtgtcggcaaatgtaaaagtaaaaatatgtaaaaaaggcataacgcagatggatgagtacgatgaaaaggcggtctttgaaaagtatgaagtgacgccgcttcaattcatagacttgaaagggcttatgggagacaaatcagacaacattccaggagtgcccaatataggggagaagacggccataaagcttgttaaagaatttggatcaattgaaaatttactgatgaatacagataagttaaaagggaaaataaaagaaaatgtagaaaacaatgcagaattagctgttttaagcaaacggcttgctacgattgagagaaatgttcctattgatattgatttgaatgaatacgcggttaaaaattacgatgtcaataagcttacagagctatttgaaaaattggaattttcaagcctcatctcagatttaaaagatgatagtcgtgatacaaaggatattaaagaatggcctgtaagagattttacatacgttaaaaatgttttaggaaagtttgatgttttgtcattgtatccattcatatatgatggaaagataaaagcagtatcatttgcttgcggtgacggatcgttttttgtagagattgatgattatgacaattttaaattgcttaataatgataagcttacgttgataggacacgatctgaaagattttttagtaaacatttcatactgcggtattgaacttaattgtaagattttagatacggccataatgacttatcttttaaatccgtctgagtcgaattacgacataagtcgcgtattgaaaaaatacttgaaagaggatttgcaaaacatagatgatatagtaggcaagggcaggaataaaaagagctacgatgacattgacaaaaagcttttagtcgattatatgtgttcagccgcatcaaacttatctaagttaaaagataagctcatgtcatttataaaagagatggagatggaagatcttttaaaaaatgtggaaattccgcttattgaagtgctaaaatctatggaggtgtacggctttacattagataaagatgtacttagaagtatttctaaagaaatagatgaaaagacagataagattgtaaaagatatttacgatgctgctggatacgaatttaatattaactctacaaagcagttatcagaatttttgtttgataaactgaatttgccagcaataaaaaagactaaaacagggtattcgactgacatggaagtccttgcagaacttataccgtacaatgacatagtaggagaaataatagaatatagacagcttatgaagcttaaatctacgtacatagatggcttcattcccatcatggatgaaaataatagggtccactctacgtttaaacaaacagttgctgctacagggagaattagctcaacagagcctaatctgcagaacatacctgtaagagaagaatttggcaggaggataagaaaggcatttgtatcaagttatgaagatgggcttataatatctgctgattattctcagattgagctaagggttcttgcacatctttcagaggatgaaaaacttattgagtcatttttgaacaacgaagatatacatttaaggacggcatcggaggtttttaaggtttcgaaagaagaagtgacaagtgaaatgagaaggcgggcgaaagctgtcaactttggtattgtatatggtataagcgattacggcttatctaaagacttaaagatttcgcgaaaagaagcgaaagaatacatagacaattattttgacaggtacaagggcgtcaaaaattacatcgactcaattgtcaaatttgcaaaggaaaatgggtatgttacgactatcttaaataggagaagatacataccggaaatcaattcaaaaaattttaaccaaagatcttttggccaaagaatggcaatgaatacacctattcaaggtagcgctgcggatataataaagatgtcgatggttaaagtatacaatgaattaaaggaaagaggattgaaatcaagacttattcttcaggtgcacgatgagcttataattgacacacatcctgatgaagttgaaatagtcaaggagcttctaaaatcaataatggaaaatatcataaagttgaaagttcctttagttgtagatatagggcaagggaaaaactggtatgatgcaaaataaaaggatcc

SEQ ID NO: 898 - DNA, 2678 bp, Artificial Sequence
  Description of Artificial Sequence: Synthetic Clostridium thermosulfurogenes DNA Polymerase E801G
atgaaatacctgctgccgaccgctgctgctggtctgctgctcctcgctgcccagccggcgatggccatggcgaaatttttgatcatagatggtaatagcttgatgtacagggcgtattttgccctgcctgatttgatgaacagcgaaggaatgcatacaaatgccatatacggtttttcaatgatgcttcttaaattgctggaggaggagaaaccagactacatagcaatagctttcgataaaaaggcttctacatttaggcacaaggagtacagtgcttataaaggaacccgccagtcgatgccagaagagctgatagaacaggtggatattttaaaagatgtgataaatgcatttaacataaagaccatcgagatagagggatttgaagcagatgatatcattggtacagtatcaaaaattgcttccgaaagtgggatggatgtgcttatcgtcacaggcgacagagatgcgcttcagcttgtgtcggcaaatgtaaaagtaaaaatatgtaaaaaaggcataacgcagatggatgagtacgatgaaaaggcggtctttgaaaagtatgaagtgacgccgcttcaattcatagacttgaaagggcttatgggagacaaatcagacaacattccaggagtgcccaatataggggagaagacggccataaagcttgttaaagaatttggatcaattgaaaatttactgatgaatacagataagttaaaagggaaaataaaagaaaatgtagaaaacaatgcagaattagctgttttaagcaaacggcttgctacgattgagagaaatgttcctattgatattgatttgaatgaatacgcggttaaaaattacgatgtcaataagcttacagagctatttgaaaaattggaattttcaagcctcatctcagatttaaaagatgatagtcgtgatacaaaggatattaaagaatggcctgtaagagattttacatacgttaaaaatgttttaggaaagtttgatgttttgtcattgtatccattcatatatgatggaaagataaaagcagtatcatttgcttgcggtgacggatcgttttttgtagagattgatgattatgacaattttaaattgcttaataatgataagcttacgttgataggacacgatctgaaagattttttagtaaacatttcatactgcggtattgaacttaattgtaagattttagatacggccataatgacttatcttttaaatccgtctgagtcgaattacgacataagtcgcgtattgaaaaaatacttgaaagaggatttgcaaaacatagatgatatagtaggcaagggcaggaataaaaagagctacgatgacattgacaaaaagcttttagtcgattatatgtgttcagccgcatcaaacttatctaagttaaaagataagctcatgtcatttataaaagagatggagatggaagatcttttaaaaaatgtggaaattccgcttattgaagtgctaaaatctatggaggtgtacggctttacattagataaagatgtacttagaagtatttctaaagaaatagatgaaaagacagataagattgtaaaagatatttacgatgctgctggatacgaatttaatattaactctacaaagcagttatcagaatttttgtttgataaactgaatttgccagcaataaaaaagactaaaacagggtattcgactgacatggaagtccttgcagaacttataccgtacaatgacatagtaggagaaataatagaatatagacagcttatgaagcttaaatctacgtacatagatggcttcattcccatcatggatgaaaataatagggtccactctacgtttaaacaaacagttgctgctacagggagaattagctcaacagagcctaatctgcagaacatacctgtaagagaagaatttggcaggaggataagaaaggcatttgtatcaagttatgaagatgggcttataatatctgctgattattctcagattgagctaagggttcttgcacatctttcagaggatgaaaaacttattgagtcatttttgaacaacgaagatatacatttaaggacggcatcggaggtttttaaggtttcgaaagaagaagtgacaagtgaaatgagaaggcgggcgaaagctgtcaactttggtattgtatatggtataagcgattacggcttatctaaagacttaaagatttcgcgaaaagaagcgaaagaatacatagacaattattttgacaggtacaagggcgtcaaaaattacatcgactcaattgtcaaatttgcaaaggaaaatgggtatgttacgactatcttaaataggagaagatacataccggaaatcaattcaaaaaattttaaccaaagatcttttggcggtagaatggcaatgaatacacctattcaaggtagcgctgcggatataataaagatgtcgatggttaaagtatacaatgaattaaaggaaagaggattgaaatcaagacttattcttcaggtgcacgatgagcttataattgacacacatcctgatgaagttgaaatagtcaaggagcttctaaaatcaataatggaaaatatcataaagttgaaagttcctttagttgtagatatagggcaagggaaaaactggtatgatgcaaaataaaaggatcc

SEQ ID NO: 899 - DNA, 2678 bp, Artificial Sequence
  Description of Artificial Sequence: Synthetic Clostridium thermosulfurogenes DNA Polymerase E801H
atgaaatacctgctgccgaccgctgctgctggtctgctgctcctcgctgcccagccggcgatggccatggcgaaatttttgatcatagatggtaatagcttgatgtacagggcgtattttgccctgcctgatttgatgaacagcgaaggaatgcatacaaatgccatatacggtttttcaatgatgcttcttaaattgctggaggaggagaaaccagactacatagcaatagctttcgataaaaaggcttctacatttaggcacaaggagtacagtgcttataaaggaacccgccagtcgatgccagaagagctgatagaacaggtggatattttaaaagatgtgataaatgcatttaacataaagaccatcgagatagagggatttgaagcagatgatatcattggtacagtatcaaaaattgcttccgaaagtgggatggatgtgcttatcgtcacaggcgacagagatgcgcttcagcttgtgtcggcaaatgtaaaagtaaaaatatgtaaaaaaggcataacgcagatggatgagtacgatgaaaaggcggtctttgaaaagtatgaagtgacgccgcttcaattcatagacttgaaagggcttatgggagacaaatcagacaacattccaggagtgcccaatataggggagaagacggccataaagcttgttaaagaatttggatcaattgaaaatttactgatgaatacagataagttaaaagggaaaataaaagaaaatgtagaaaacaatgcagaattagctgttttaagcaaacggcttgctacgattgagagaaatgttcctattgatattgatttgaatgaatacgcggttaaaaattacgatgtcaataagcttacagagctatttgaaaaattggaattttcaagcctcatctcagatttaaaagatgatagtcgtgatacaaaggatattaaagaatggcctgtaagagattttacatacgttaaaaatgttttaggaaagtttgatgttttgtcattgtatccattcatatatgatggaaagataaaagcagtatcatttgcttgcggtgacggatcgttttttgtagagattgatgattatgacaattttaaattgcttaataatgataagcttacgttgataggacacgatctgaaagattttttagtaaacatttcatactgcggtattgaacttaattgtaagattttagatacggccataatgacttatcttttaaatccgtctgagtcgaattacgacataagtcgcgtattgaaaaaatacttgaaagaggatttgcaaaacatagatgatatagtaggcaagggcaggaataaaaagagctacgatgacattgacaaaaagcttttagtcgattatatgtgttcagccgcatcaaacttatctaagttaaaagataagctcatgtcatttataaaagagatggagatggaagatcttttaaaaaatgtggaaattccgcttattgaagtgctaaaatctatggaggtgtacggctttacattagataaagatgtacttagaagtatttctaaagaaatagatgaaaagacagataagattgtaaaagatatttacgatgctgctggatacgaatttaatattaactctacaaagcagttatcagaatttttgtttgataaactgaatttgccagcaataaaaaagactaaaacagggtattcgactgacatggaagtccttgcagaacttataccgtacaatgacatagtaggagaaataatagaatatagacagcttatgaagcttaaatctacgtacatagatggcttcattcccatcatggatgaaaataatagggtccactctacgtttaaacaaacagttgctgctacagggagaattagctcaacagagcctaatctgcagaacatacctgtaagagaagaatttggcaggaggataagaaaggcatttgtatcaagttatgaagatgggcttataatatctgctgattattctcagattgagctaagggttcttgcacatctttcagaggatgaaaaacttattgagtcatttttgaacaacgaagatatacatttaaggacggcatcggaggtttttaaggtttcgaaagaagaagtgacaagtgaaatgagaaggcgggcgaaagctgtcaactttggtattgtatatggtataagcgattacggcttatctaaagacttaaagatttcgcgaaaagaagcgaaagaatacatagacaattattttgacaggtacaagggcgtcaaaaattacatcgactcaattgtcaaatttgcaaaggaaaatgggtatgttacgactatcttaaataggagaagatacataccggaaatcaattcaaaaaattttaaccaaagatcttttggccatagaatggcaatgaatacacctattcaaggtagcgctgcggatataataaagatgtcgatggttaaagtatacaatgaattaaaggaaagaggattgaaatcaagacttattcttcaggtgcacgatgagcttataattgacacacatcctgatgaagttgaaatagtcaaggagcttctaaaatcaataatggaaaatatcataaagttgaaagttcctttagttgtagatatagggcaagggaaaaactggtatgatgcaaaataaaaggatcc

SEQ ID NO: 900 - DNA, 2678 bp, Artificial Sequence
  Description of Artificial Sequence: Synthetic Clostridium thermosulfurogenes DNA Polymerase E801I
atgaaatacctgctgccgaccgctgctgctggtctgctgctcctcgctgcccagccggcgatggccatggcgaaatttttgatcatagatggtaatagcttgatgtacagggcgtattttgccctgcctgatttgatgaacagcgaaggaatgcatacaaatgccatatacggtttttcaatgatgcttcttaaattgctggaggaggagaaaccagactacatagcaatagctttcgataaaaaggcttctacatttaggcacaaggagtacagtgcttataaaggaacccgccagtcgatgccagaagagctgatagaacaggtggatattttaaaagatgtgataaatgcatttaacataaagaccatcgagatagagggatttgaagcagatgatatcattggtacagtatcaaaaattgcttccgaaagtgggatggatgtgcttatcgtcacaggcgacagagatgcgcttcagcttgtgtcggcaaatgtaaaagtaaaaatatgtaaaaaaggcataacgcagatggatgagtacgatgaaaaggcggtctttgaaaagtatgaagtgacgccgcttcaattcatagacttgaaagggcttatgggagacaaatcagacaacattccaggagtgcccaatataggggagaagacggccataaagcttgttaaagaatttggatcaattgaaaatttactgatgaatacagataagttaaaagggaaaataaaagaaaatgtagaaaacaatgcagaattagctgttttaagcaaacggcttgctacgattgagagaaatgttcctattgatattgatttgaatgaatacgcggttaaaaattacgatgtcaataagcttacagagctatttgaaaaattggaattttcaagcctcatctcagatttaaaagatgatagtcgtgatacaaaggatattaaagaatggcctgtaagagattttacatacgttaaaaatgttttaggaaagtttgatgttttgtcattgtatccattcatatatgatggaaagataaaagcagtatcatttgcttgcggtgacggatcgttttttgtagagattgatgattatgacaattttaaattgcttaataatgataagcttacgttgataggacacgatctgaaagattttttagtaaacatttcatactgcggtattgaacttaattgtaagattttagatacggccataatgacttatcttttaaatccgtctgagtcgaattacgacataagtcgcgtattgaaaaaatacttgaaagaggatttgcaaaacatagatgatatagtaggcaagggcaggaataaaaagagctacgatgacattgacaaaaagcttttagtcgattatatgtgttcagccgcatcaaacttatctaagttaaaagataagctcatgtcatttataaaagagatggagatggaagatcttttaaaaaatgtggaaattccgcttattgaagtgctaaaatctatggaggtgtacggctttacattagataaagatgtacttagaagtatttctaaagaaatagatgaaaagacagataagattgtaaaagatatttacgatgctgctggatacgaatttaatattaactctacaaagcagttatcagaatttttgtttgataaactgaatttgccagcaataaaaaagactaaaacagggtattcgactgacatggaagtccttgcagaacttataccgtacaatgacatagtaggagaaataatagaatatagacagcttatgaagcttaaatctacgtacatagatggcttcattcccatcatggatgaaaataatagggtccactctacgtttaaacaaacagttgctgctacagggagaattagctcaacagagcctaatctgcagaacatacctgtaagagaagaatttggcaggaggataagaaaggcatttgtatcaagttatgaagatgggcttataatatctgctgattattctcagattgagctaagggttcttgcacatctttcagaggatgaaaaacttattgagtcatttttgaacaacgaagatatacatttaaggacggcatcggaggtttttaaggtttcgaaagaagaagtgacaagtgaaatgagaaggcgggcgaaagctgtcaactttggtattgtatatggtataagcgattacggcttatctaaagacttaaagatttcgcgaaaagaagcgaaagaatacatagacaattattttgacaggtacaagggcgtcaaaaattacatcgactcaattgtcaaatttgcaaaggaaaatgggtatgttacgactatcttaaataggagaagatacataccggaaatcaattcaaaaaattttaaccaaagatcttttggcattagaatggcaatgaatacacctattcaaggtagcgctgcggatataataaagatgtcgatggttaaagtatacaatgaattaaaggaaagaggattgaaatcaagacttattcttcaggtgcacgatgagcttataattgacacacatcctgatgaagttgaaatagtcaaggagcttctaaaatcaataatggaaaatatcataaagttgaaagttcctttagttgtagatatagggcaagggaaaaactggtatgatgcaaaataaaaggatcc

SEQ ID NO: 901 - DNA, 2678 bp, Artificial Sequence
  Description of Artificial Sequence: Synthetic Clostridium thermosulfurogenes DNA Polymerase E801L
atgaaatacctgctgccgaccgctgctgctggtctgctgctcctcgctgcccagccggcgatggccatggcgaaatttttgatcatagatggtaatagcttgatgtacagggcgtattttgccctgcctgatttgatgaacagcgaaggaatgcatacaaatgccatatacggtttttcaatgatgcttcttaaattgctggaggaggagaaaccagactacatagcaatagctttcgataaaaaggcttctacatttaggcacaaggagtacagtgcttataaaggaacccgccagtcgatgccagaagagctgatagaacaggtggatattttaaaagatgtgataaatgcatttaacataaagaccatcgagatagagggatttgaagcagatgatatcattggtacagtatcaaaaattgcttccgaaagtgggatggatgtgcttatcgtcacaggcgacagagatgcgcttcagcttgtgtcggcaaatgtaaaagtaaaaatatgtaaaaaaggcataacgcagatggatgagtacgatgaaaaggcggtctttgaaaagtatgaagtgacgccgcttcaattcatagacttgaaagggcttatgggagacaaatcagacaacattccaggagtgcccaatataggggagaagacggccataaagcttgttaaagaatttggatcaattgaaaatttactgatgaatacagataagttaaaagggaaaataaaagaaaatgtagaaaacaatgcagaattagctgttttaagcaaacggcttgctacgattgagagaaatgttcctattgatattgatttgaatgaatacgcggttaaaaattacgatgtcaataagcttacagagctatttgaaaaattggaattttcaagcctcatctcagatttaaaagatgatagtcgtgatacaaaggatattaaagaatggcctgtaagagattttacatacgttaaaaatgttttaggaaagtttgatgttttgtcattgtatccattcatatatgatggaaagataaaagcagtatcatttgcttgcggtgacggatcgttttttgtagagattgatgattatgacaattttaaattgcttaataatgataagcttacgttgataggacacgatctgaaagattttttagtaaacatttcatactgcggtattgaacttaattgtaagattttagatacggccataatgacttatcttttaaatccgtctgagtcgaattacgacataagtcgcgtattgaaaaaatacttgaaagaggatttgcaaaacatagatgatatagtaggcaagggcaggaataaaaagagctacgatgacattgacaaaaagcttttagtcgattatatgtgttcagccgcatcaaacttatctaagttaaaagataagctcatgtcatttataaaagagatggagatggaagatcttttaaaaaatgtggaaattccgcttattgaagtgctaaaatctatggaggtgtacggctttacattagataaagatgtacttagaagtatttctaaagaaatagatgaaaagacagataagattgtaaaagatatttacgatgctgctggatacgaatttaatattaactctacaaagcagttatcagaatttttgtttgataaactgaatttgccagcaataaaaaagactaaaacagggtattcgactgacatggaagtccttgcagaacttataccgtacaatgacatagtaggagaaataatagaatatagacagcttatgaagcttaaatctacgtacatagatggcttcattcccatcatggatgaaaataatagggtccactctacgtttaaacaaacagttgctgctacagggagaattagctcaacagagcctaatctgcagaacatacctgtaagagaagaatttggcaggaggataagaaaggcatttgtatcaagttatgaagatgggcttataatatctgctgattattctcagattgagctaagggttcttgcacatctttcagaggatgaaaaacttattgagtcatttttgaacaacgaagatatacatttaaggacggcatcggaggtttttaaggtttcgaaagaagaagtgacaagtgaaatgagaaggcgggcgaaagctgtcaactttggtattgtatatggtataagcgattacggcttatctaaagacttaaagatttcgcgaaaagaagcgaaagaatacatagacaattattttgacaggtacaagggcgtcaaaaattacatcgactcaattgtcaaatttgcaaaggaaaatgggtatgttacgactatcttaaataggagaagatacataccggaaatcaattcaaaaaattttaaccaaagatcttttggccttagaatggcaatgaatacacctattcaaggtagcgctgcggatataataaagatgtcgatggttaaagtatacaatgaattaaaggaaagaggattgaaatcaagacttattcttcaggtgcacgatgagcttataattgacacacatcctgatgaagttgaaatagtcaaggagcttctaaaatcaataatggaaaatatcataaagttgaaagttcctttagttgtagatatagggcaagggaaaaactggtatgatgcaaaataaaaggatcc

SEQ ID NO: 902 - DNA, 2678 bp, Artificial Sequence
  Description of Artificial Sequence: Synthetic Clostridium thermosulfurogenes DNA Polymerase E801K
atgaaatacctgctgccgaccgctgctgctggtctgctgctcctcgctgcccagccggcgatggccatggcgaaatttttgatcatagatggtaatagcttgatgtacagggcgtattttgccctgcctgatttgatgaacagcgaaggaatgcatacaaatgccatatacggtttttcaatgatgcttcttaaattgctggaggaggagaaaccagactacatagcaatagctttcgataaaaaggcttctacatttaggcacaaggagtacagtgcttataaaggaacccgccagtcgatgccagaagagctgatagaacaggtggatattttaaaagatgtgataaatgcatttaacataaagaccatcgagatagagggatttgaagcagatgatatcattggtacagtatcaaaaattgcttccgaaagtgggatggatgtgcttatcgtcacaggcgacagagatgcgcttcagcttgtgtcggcaaatgtaaaagtaaaaatatgtaaaaaaggcataacgcagatggatgagtacgatgaaaaggcggtctttgaaaagtatgaagtgacgccgcttcaattcatagacttgaaagggcttatgggagacaaatcagacaacattccaggagtgcccaatataggggagaagacggccataaagcttgttaaagaatttggatcaattgaaaatttactgatgaatacagataagttaaaagggaaaataaaagaaaatgtagaaaacaatgcagaattagctgttttaagcaaacggcttgctacgattgagagaaatgttcctattgatattgatttgaatgaatacgcggttaaaaattacgatgtcaataagcttacagagctatttgaaaaattggaattttcaagcctcatctcagatttaaaagatgatagtcgtgatacaaaggatattaaagaatggcctgtaagagattttacatacgttaaaaatgttttaggaaagtttgatgttttgtcattgtatccattcatatatgatggaaagataaaagcagtatcatttgcttgcggtgacggatcgttttttgtagagattgatgattatgacaattttaaattgcttaataatgataagcttacgttgataggacacgatctgaaagattttttagtaaacatttcatactgcggtattgaacttaattgtaagattttagatacggccataatgacttatcttttaaatccgtctgagtcgaattacgacataagtcgcgtattgaaaaaatacttgaaagaggatttgcaaaacatagatgatatagtaggcaagggcaggaataaaaagagctacgatgacattgacaaaaagcttttagtcgattatatgtgttcagccgcatcaaacttatctaagttaaaagataagctcatgtcatttataaaagagatggagatggaagatcttttaaaaaatgtggaaattccgcttattgaagtgctaaaatctatggaggtgtacggctttacattagataaagatgtacttagaagtatttctaaagaaatagatgaaaagacagataagattgtaaaagatatttacgatgctgctggatacgaatttaatattaactctacaaagcagttatcagaatttttgtttgataaactgaatttgccagcaataaaaaagactaaaacagggtattcgactgacatggaagtccttgcagaacttataccgtacaatgacatagtaggagaaataatagaatatagacagcttatgaagcttaaatctacgtacatagatggcttcattcccatcatggatgaaaataatagggtccactctacgtttaaacaaacagttgctgctacagggagaattagctcaacagagcctaatctgcagaacatacctgtaagagaagaatttggcaggaggataagaaaggcatttgtatcaagttatgaagatgggcttataatatctgctgattattctcagattgagctaagggttcttgcacatctttcagaggatgaaaaacttattgagtcatttttgaacaacgaagatatacatttaaggacggcatcggaggtttttaaggtttcgaaagaagaagtgacaagtgaaatgagaaggcgggcgaaagctgtcaactttggtattgtatatggtataagcgattacggcttatctaaagacttaaagatttcgcgaaaagaagcgaaagaatacatagacaattattttgacaggtacaagggcgtcaaaaattacatcgactcaattgtcaaatttgcaaaggaaaatgggtatgttacgactatcttaaataggagaagatacataccggaaatcaattcaaaaaattttaaccaaagatcttttggcaaaagaatggcaatgaatacacctattcaaggtagcgctgcggatataataaagatgtcgatggttaaagtatacaatgaattaaaggaaagaggattgaaatcaagacttattcttcaggtgcacgatgagcttataattgacacacatcctgatgaagttgaaatagtcaaggagcttctaaaatcaataatggaaaatatcataaagttgaaagttcctttagttgtagatatagggcaagggaaaaactggtatgatgcaaaataaaaggatcc

SEQ ID NO: 903 - DNA, 2678 bp, Artificial Sequence
  Description of Artificial Sequence: Synthetic Clostridium thermosulfurogenes DNA Polymerase E801M
atgaaatacctgctgccgaccgctgctgctggtctgctgctcctcgctgcccagccggcgatggccatggcgaaatttttgatcatagatggtaatagcttgatgtacagggcgtattttgccctgcctgatttgatgaacagcgaaggaatgcatacaaatgccatatacggtttttcaatgatgcttcttaaattgctggaggaggagaaaccagactacatagcaatagctttcgataaaaaggcttctacatttaggcacaaggagtacagtgcttataaaggaacccgccagtcgatgccagaagagctgatagaacaggtggatattttaaaagatgtgataaatgcatttaacataaagaccatcgagatagagggatttgaagcagatgatatcattggtacagtatcaaaaattgcttccgaaagtgggatggatgtgcttatcgtcacaggcgacagagatgcgcttcagcttgtgtcggcaaatgtaaaagtaaaaatatgtaaaaaaggcataacgcagatggatgagtacgatgaaaaggcggtctttgaaaagtatgaagtgacgccgcttcaattcatagacttgaaagggcttatgggagacaaatcagacaacattccaggagtgcccaatataggggagaagacggccataaagcttgttaaagaatttggatcaattgaaaatttactgatgaatacagataagttaaaagggaaaataaaagaaaatgtagaaaacaatgcagaattagctgttttaagcaaacggcttgctacgattgagagaaatgttcctattgatattgatttgaatgaatacgcggttaaaaattacgatgtcaataagcttacagagctatttgaaaaattggaattttcaagcctcatctcagatttaaaagatgatagtcgtgatacaaaggatattaaagaatggcctgtaagagattttacatacgttaaaaatgttttaggaaagtttgatgttttgtcattgtatccattcatatatgatggaaagataaaagcagtatcatttgcttgcggtgacggatcgttttttgtagagattgatgattatgacaattttaaattgcttaataatgataagcttacgttgataggacacgatctgaaagattttttagtaaacatttcatactgcggtattgaacttaattgtaagattttagatacggccataatgacttatcttttaaatccgtctgagtcgaattacgacataagtcgcgtattgaaaaaatacttgaaagaggatttgcaaaacatagatgatatagtaggcaagggcaggaataaaaagagctacgatgacattgacaaaaagcttttagtcgattatatgtgttcagccgcatcaaacttatctaagttaaaagataagctcatgtcatttataaaagagatggagatggaagatcttttaaaaaatgtggaaattccgcttattgaagtgctaaaatctatggaggtgtacggctttacattagataaagatgtacttagaagtatttctaaagaaatagatgaaaagacagataagattgtaaaagatatttacgatgctgctggatacgaatttaatattaactctacaaagcagttatcagaatttttgtttgataaactgaatttgccagcaataaaaaagactaaaacagggtattcgactgacatggaagtccttgcagaacttataccgtacaatgacatagtaggagaaataatagaatatagacagcttatgaagcttaaatctacgtacatagatggcttcattcccatcatggatgaaaataatagggtccactctacgtttaaacaaacagttgctgctacagggagaattagctcaacagagcctaatctgcagaacatacctgtaagagaagaatttggcaggaggataagaaaggcatttgtatcaagttatgaagatgggcttataatatctgctgattattctcagattgagctaagggttcttgcacatctttcagaggatgaaaaacttattgagtcatttttgaacaacgaagatatacatttaaggacggcatcggaggtttttaaggtttcgaaagaagaagtgacaagtgaaatgagaaggcgggcgaaagctgtcaactttggtattgtatatggtataagcgattacggcttatctaaagacttaaagatttcgcgaaaagaagcgaaagaatacatagacaattattttgacaggtacaagggcgtcaaaaattacatcgactcaattgtcaaatttgcaaaggaaaatgggtatgttacgactatcttaaataggagaagatacataccggaaatcaattcaaaaaattttaaccaaagatcttttggcatgagaatggcaatgaatacacctattcaaggtagcgctgcggatataataaagatgtcgatggttaaagtatacaatgaattaaaggaaagaggattgaaatcaagacttattcttcaggtgcacgatgagcttataattgacacacatcctgatgaagttgaaatagtcaaggagcttctaaaatcaataatggaaaatatcataaagttgaaagttcctttagttgtagatatagggcaagggaaaaactggtatgatgcaaaataaaaggatcc

SEQ ID NO: 904 - DNA, 2678 bp, Artificial Sequence
  Description of Artificial Sequence: Synthetic Clostridium thermosulfurogenes DNA Polymerase E801F
atgaaatacctgctgccgaccgctgctgctggtctgctgctcctcgctgcccagccggcgatggccatggcgaaatttttgatcatagatggtaatagcttgatgtacagggcgtattttgccctgcctgatttgatgaacagcgaaggaatgcatacaaatgccatatacggtttttcaatgatgcttcttaaattgctggaggaggagaaaccagactacatagcaatagctttcgataaaaaggcttctacatttaggcacaaggagtacagtgcttataaaggaacccgccagtcgatgccagaagagctgatagaacaggtggatattttaaaagatgtgataaatgcatttaacataaagaccatcgagatagagggatttgaagcagatgatatcattggtacagtatcaaaaattgcttccgaaagtgggatggatgtgcttatcgtcacaggcgacagagatgcgcttcagcttgtgtcggcaaatgtaaaagtaaaaatatgtaaaaaaggcataacgcagatggatgagtacgatgaaaaggcggtctttgaaaagtatgaagtgacgccgcttcaattcatagacttgaaagggcttatgggagacaaatcagacaacattccaggagtgcccaatataggggagaagacggccataaagcttgttaaagaatttggatcaattgaaaatttactgatgaatacagataagttaaaagggaaaataaaagaaaatgtagaaaacaatgcagaattagctgttttaagcaaacggcttgctacgattgagagaaatgttcctattgatattgatttgaatgaatacgcggttaaaaattacgatgtcaataagcttacagagctatttgaaaaattggaattttcaagcctcatctcagatttaaaagatgatagtcgtgatacaaaggatattaaagaatggcctgtaagagattttacatacgttaaaaatgttttaggaaagtttgatgttttgtcattgtatccattcatatatgatggaaagataaaagcagtatcatttgcttgcggtgacggatcgttttttgtagagattgatgattatgacaattttaaattgcttaataatgataagcttacgttgataggacacgatctgaaagattttttagtaaacatttcatactgcggtattgaacttaattgtaagattttagatacggccataatgacttatcttttaaatccgtctgagtcgaattacgacataagtcgcgtattgaaaaaatacttgaaagaggatttgcaaaacatagatgatatagtaggcaagggcaggaataaaaagagctacgatgacattgacaaaaagcttttagtcgattatatgtgttcagccgcatcaaacttatctaagttaaaagataagctcatgtcatttataaaagagatggagatggaagatcttttaaaaaatgtggaaattccgcttattgaagtgctaaaatctatggaggtgtacggctttacattagataaagatgtacttagaagtatttctaaagaaatagatgaaaagacagataagattgtaaaagatatttacgatgctgctggatacgaatttaatattaactctacaaagcagttatcagaatttttgtttgataaactgaatttgccagcaataaaaaagactaaaacagggtattcgactgacatggaagtccttgcagaacttataccgtacaatgacatagtaggagaaataatagaatatagacagcttatgaagcttaaatctacgtacatagatggcttcattcccatcatggatgaaaataatagggtccactctacgtttaaacaaacagttgctgctacagggagaattagctcaacagagcctaatctgcagaacatacctgtaagagaagaatttggcaggaggataagaaaggcatttgtatcaagttatgaagatgggcttataatatctgctgattattctcagattgagctaagggttcttgcacatctttcagaggatgaaaaacttattgagtcatttttgaacaacgaagatatacatttaaggacggcatcggaggtttttaaggtttcgaaagaagaagtgacaagtgaaatgagaaggcgggcgaaagctgtcaactttggtattgtatatggtataagcgattacggcttatctaaagacttaaagatttcgcgaaaagaagcgaaagaatacatagacaattattttgacaggtacaagggcgtcaaaaattacatcgactcaattgtcaaatttgcaaaggaaaatgggtatgttacgactatcttaaataggagaagatacataccggaaatcaattcaaaaaattttaaccaaagatcttttggctttagaatggcaatgaatacacctattcaaggtagcgctgcggatataataaagatgtcgatggttaaagtatacaatgaattaaaggaaagaggattgaaatcaagacttattcttcaggtgcacgatgagcttataattgacacacatcctgatgaagttgaaatagtcaaggagcttctaaaatcaataatggaaaatatcataaagttgaaagttcctttagttgtagatatagggcaagggaaaaactggtatgatgcaaaataaaaggatcc

SEQ ID NO: 905 - DNA, 2678 bp, Artificial Sequence
  Description of Artificial Sequence: Synthetic Clostridium thermosulfurogenes DNA Polymerase E801P
atgaaatacctgctgccgaccgctgctgctggtctgctgctcctcgctgcccagccggcgatggccatggcgaaatttttgatcatagatggtaatagcttgatgtacagggcgtattttgccctgcctgatttgatgaacagcgaaggaatgcatacaaatgccatatacggtttttcaatgatgcttcttaaattgctggaggaggagaaaccagactacatagcaatagctttcgataaaaaggcttctacatttaggcacaaggagtacagtgcttataaaggaacccgccagtcgatgccagaagagctgatagaacaggtggatattttaaaagatgtgataaatgcatttaacataaagaccatcgagatagagggatttgaagcagatgatatcattggtacagtatcaaaaattgcttccgaaagtgggatggatgtgcttatcgtcacaggcgacagagatgcgcttcagcttgtgtcggcaaatgtaaaagtaaaaatatgtaaaaaaggcataacgcagatggatgagtacgatgaaaaggcggtctttgaaaagtatgaagtgacgccgcttcaattcatagacttgaaagggcttatgggagacaaatcagacaacattccaggagtgcccaatataggggagaagacggccataaagcttgttaaagaatttggatcaattgaaaatttactgatgaatacagataagttaaaagggaaaataaaagaaaatgtagaaaacaatgcagaattagctgttttaagcaaacggcttgctacgattgagagaaatgttcctattgatattgatttgaatgaatacgcggttaaaaattacgatgtcaataagcttacagagctatttgaaaaattggaattttcaagcctcatctcagatttaaaagatgatagtcgtgatacaaaggatattaaagaatggcctgtaagagattttacatacgttaaaaatgttttaggaaagtttgatgttttgtcattgtatccattcatatatgatggaaagataaaagcagtatcatttgcttgcggtgacggatcgttttttgtagagattgatgattatgacaattttaaattgcttaataatgataagcttacgttgataggacacgatctgaaagattttttagtaaacatttcatactgcggtattgaacttaattgtaagattttagatacggccataatgacttatcttttaaatccgtctgagtcgaattacgacataagtcgcgtattgaaaaaatacttgaaagaggatttgcaaaacatagatgatatagtaggcaagggcaggaataaaaagagctacgatgacattgacaaaaagcttttagtcgattatatgtgttcagccgcatcaaacttatctaagttaaaagataagctcatgtcatttataaaagagatggagatggaagatcttttaaaaaatgtggaaattccgcttattgaagtgctaaaatctatggaggtgtacggctttacattagataaagatgtacttagaagtatttctaaagaaatagatgaaaagacagataagattgtaaaagatatttacgatgctgctggatacgaatttaatattaactctacaaagcagttatcagaatttttgtttgataaactgaatttgccagcaataaaaaagactaaaacagggtattcgactgacatggaagtccttgcagaacttataccgtacaatgacatagtaggagaaataatagaatatagacagcttatgaagcttaaatctacgtacatagatggcttcattcccatcatggatgaaaataatagggtccactctacgtttaaacaaacagttgctgctacagggagaattagctcaacagagcctaatctgcagaacatacctgtaagagaagaatttggcaggaggataagaaaggcatttgtatcaagttatgaagatgggcttataatatctgctgattattctcagattgagctaagggttcttgcacatctttcagaggatgaaaaacttattgagtcatttttgaacaacgaagatatacatttaaggacggcatcggaggtttttaaggtttcgaaagaagaagtgacaagtgaaatgagaaggcgggcgaaagctgtcaactttggtattgtatatggtataagcgattacggcttatctaaagacttaaagatttcgcgaaaagaagcgaaagaatacatagacaattattttgacaggtacaagggcgtcaaaaattacatcgactcaattgtcaaatttgcaaaggaaaatgggtatgttacgactatcttaaataggagaagatacataccggaaatcaattcaaaaaattttaaccaaagatcttttggccctagaatggcaatgaatacacctattcaaggtagcgctgcggatataataaagatgtcgatggttaaagtatacaatgaattaaaggaaagaggattgaaatcaagacttattcttcaggtgcacgatgagcttataattgacacacatcctgatgaagttgaaatagtcaaggagcttctaaaatcaataatggaaaatatcataaagttgaaagttcctttagttgtagatatagggcaagggaaaaactggtatgatgcaaaataaaaggatcc

SEQ ID NO: 906 - DNA, 2678 bp, Artificial Sequence
  Description of Artificial Sequence: Synthetic Clostridium thermosulfurogenes DNA Polymerase E801S
atgaaatacctgctgccgaccgctgctgctggtctgctgctcctcgctgcccagccggcgatggccatggcgaaatttttgatcatagatggtaatagcttgatgtacagggcgtattttgccctgcctgatttgatgaacagcgaaggaatgcatacaaatgccatatacggtttttcaatgatgcttcttaaattgctggaggaggagaaaccagactacatagcaatagctttcgataaaaaggcttctacatttaggcacaaggagtacagtgcttataaaggaacccgccagtcgatgccagaagagctgatagaacaggtggatattttaaaagatgtgataaatgcatttaacataaagaccatcgagatagagggatttgaagcagatgatatcattggtacagtatcaaaaattgcttccgaaagtgggatggatgtgcttatcgtcacaggcgacagagatgcgcttcagcttgtgtcggcaaatgtaaaagtaaaaatatgtaaaaaaggcataacgcagatggatgagtacgatgaaaaggcggtctttgaaaagtatgaagtgacgccgcttcaattcatagacttgaaagggcttatgggagacaaatcagacaacattccaggagtgcccaatataggggagaagacggccataaagcttgttaaagaatttggatcaattgaaaatttactgatgaatacagataagttaaaagggaaaataaaagaaaatgtagaaaacaatgcagaattagctgttttaagcaaacggcttgctacgattgagagaaatgttcctattgatattgatttgaatgaatacgcggttaaaaattacgatgtcaataagcttacagagctatttgaaaaattggaattttcaagcctcatctcagatttaaaagatgatagtcgtgatacaaaggatattaaagaatggcctgtaagagattttacatacgttaaaaatgttttaggaaagtttgatgttttgtcattgtatccattcatatatgatggaaagataaaagcagtatcatttgcttgcggtgacggatcgttttttgtagagattgatgattatgacaattttaaattgcttaataatgataagcttacgttgataggacacgatctgaaagattttttagtaaacatttcatactgcggtattgaacttaattgtaagattttagatacggccataatgacttatcttttaaatccgtctgagtcgaattacgacataagtcgcgtattgaaaaaatacttgaaagaggatttgcaaaacatagatgatatagtaggcaagggcaggaataaaaagagctacgatgacattgacaaaaagcttttagtcgattatatgtgttcagccgcatcaaacttatctaagttaaaagataagctcatgtcatttataaaagagatggagatggaagatcttttaaaaaatgtggaaattccgcttattgaagtgctaaaatctatggaggtgtacggctttacattagataaagatgtacttagaagtatttctaaagaaatagatgaaaagacagataagattgtaaaagatatttacgatgctgctggatacgaatttaatattaactctacaaagcagttatcagaatttttgtttgataaactgaatttgccagcaataaaaaagactaaaacagggtattcgactgacatggaagtccttgcagaacttataccgtacaatgacatagtaggagaaataatagaatatagacagcttatgaagcttaaatctacgtacatagatggcttcattcccatcatggatgaaaataatagggtccactctacgtttaaacaaacagttgctgctacagggagaattagctcaacagagcctaatctgcagaacatacctgtaagagaagaatttggcaggaggataagaaaggcatttgtatcaagttatgaagatgggcttataatatctgctgattattctcagattgagctaagggttcttgcacatctttcagaggatgaaaaacttattgagtcatttttgaacaacgaagatatacatttaaggacggcatcggaggtttttaaggtttcgaaagaagaagtgacaagtgaaatgagaaggcgggcgaaagctgtcaactttggtattgtatatggtataagcgattacggcttatctaaagacttaaagatttcgcgaaaagaagcgaaagaatacatagacaattattttgacaggtacaagggcgtcaaaaattacatcgactcaattgtcaaatttgcaaaggaaaatgggtatgttacgactatcttaaataggagaagatacataccggaaatcaattcaaaaaattttaaccaaagatcttttggctctagaatggcaatgaatacacctattcaaggtagcgctgcggatataataaagatgtcgatggttaaagtatacaatgaattaaaggaaagaggattgaaatcaagacttattcttcaggtgcacgatgagcttataattgacacacatcctgatgaagttgaaatagtcaaggagcttctaaaatcaataatggaaaatatcataaagttgaaagttcctttagttgtagatatagggcaagggaaaaactggtatgatgcaaaataaaaggatcc

SEQ ID NO: 907 - DNA, 2678 bp, Artificial Sequence
  Description of Artificial Sequence: Synthetic Clostridium thermosulfurogenes DNA Polymerase E801T
atgaaatacctgctgccgaccgctgctgctggtctgctgctcctcgctgcccagccggcgatggccatggcgaaatttttgatcatagatggtaatagcttgatgtacagggcgtattttgccctgcctgatttgatgaacagcgaaggaatgcatacaaatgccatatacggtttttcaatgatgcttcttaaattgctggaggaggagaaaccagactacatagcaatagctttcgataaaaaggcttctacatttaggcacaaggagtacagtgcttataaaggaacccgccagtcgatgccagaagagctgatagaacaggtggatattttaaaagatgtgataaatgcatttaacataaagaccatcgagatagagggatttgaagcagatgatatcattggtacagtatcaaaaattgcttccgaaagtgggatggatgtgcttatcgtcacaggcgacagagatgcgcttcagcttgtgtcggcaaatgtaaaagtaaaaatatgtaaaaaaggcataacgcagatggatgagtacgatgaaaaggcggtctttgaaaagtatgaagtgacgccgcttcaattcatagacttgaaagggcttatgggagacaaatcagacaacattccaggagtgcccaatataggggagaagacggccataaagcttgttaaagaatttggatcaattgaaaatttactgatgaatacagataagttaaaagggaaaataaaagaaaatgtagaaaacaatgcagaattagctgttttaagcaaacggcttgctacgattgagagaaatgttcctattgatattgatttgaatgaatacgcggttaaaaattacgatgtcaataagcttacagagctatttgaaaaattggaattttcaagcctcatctcagatttaaaagatgatagtcgtgatacaaaggatattaaagaatggcctgtaagagattttacatacgttaaaaatgttttaggaaagtttgatgttttgtcattgtatccattcatatatgatggaaagataaaagcagtatcatttgcttgcggtgacggatcgttttttgtagagattgatgattatgacaattttaaattgcttaataatgataagcttacgttgataggacacgatctgaaagattttttagtaaacatttcatactgcggtattgaacttaattgtaagattttagatacggccataatgacttatcttttaaatccgtctgagtcgaattacgacataagtcgcgtattgaaaaaatacttgaaagaggatttgcaaaacatagatgatatagtaggcaagggcaggaataaaaagagctacgatgacattgacaaaaagcttttagtcgattatatgtgttcagccgcatcaaacttatctaagttaaaagataagctcatgtcatttataaaagagatggagatggaagatcttttaaaaaatgtggaaattccgcttattgaagtgctaaaatctatggaggtgtacggctttacattagataaagatgtacttagaagtatttctaaagaaatagatgaaaagacagataagattgtaaaagatatttacgatgctgctggatacgaatttaatattaactctacaaagcagttatcagaatttttgtttgataaactgaatttgccagcaataaaaaagactaaaacagggtattcgactgacatggaagtccttgcagaacttataccgtacaatgacatagtaggagaaataatagaatatagacagcttatgaagcttaaatctacgtacatagatggcttcattcccatcatggatgaaaataatagggtccactctacgtttaaacaaacagttgctgctacagggagaattagctcaacagagcctaatctgcagaacatacctgtaagagaagaatttggcaggaggataagaaaggcatttgtatcaagttatgaagatgggcttataatatctgctgattattctcagattgagctaagggttcttgcacatctttcagaggatgaaaaacttattgagtcatttttgaacaacgaagatatacatttaaggacggcatcggaggtttttaaggtttcgaaagaagaagtgacaagtgaaatgagaaggcgggcgaaagctgtcaactttggtattgtatatggtataagcgattacggcttatctaaagacttaaagatttcgcgaaaagaagcgaaagaatacatagacaattattttgacaggtacaagggcgtcaaaaattacatcgactcaattgtcaaatttgcaaaggaaaatgggtatgttacgactatcttaaataggagaagatacataccggaaatcaattcaaaaaattttaaccaaagatcttttggcactagaatggcaatgaatacacctattcaaggtagcgctgcggatataataaagatgtcgatggttaaagtatacaatgaattaaaggaaagaggattgaaatcaagacttattcttcaggtgcacgatgagcttataattgacacacatcctgatgaagttgaaatagtcaaggagcttctaaaatcaataatggaaaatatcataaagttgaaagttcctttagttgtagatatagggcaagggaaaaactggtatgatgcaaaataaaaggatcc

SEQ ID NO: 908 - DNA, 2678 bp, Artificial Sequence
  Description of Artificial Sequence: Synthetic DNA sequence of Clostridium thermosulfurogenes DNA Polymerase E80 1W
atgaaatacctgctgccgaccgctgctgctggtctgctgctcctcgctgcccagccggcgatggccatggcgaaatttttgatcatagatggtaatagcttgatgtacagggcgtattttgccctgcctgatttgatgaacagcgaaggaatgcatacaaatgccatatacggtttttcaatgatgcttcttaaattgctggaggaggagaaaccagactacatagcaatagctttcgataaaaaggcttctacatttaggcacaaggagtacagtgcttataaaggaacccgccagtcgatgccagaagagctgatagaacaggtggatattttaaaagatgtgataaatgcatttaacataaagaccatcgagatagagggatttgaagcagatgatatcattggtacagtatcaaaaattgcttccgaaagtgggatggatgtgcttatcgtcacaggcgacagagatgcgcttcagcttgtgtcggcaaatgtaaaagtaaaaatatgtaaaaaaggcataacgcagatggatgagtacgatgaaaaggcggtctttgaaaagtatgaagtgacgccgcttcaattcatagacttgaaagggcttatgggagacaaatcagacaacattccaggagtgcccaatataggggagaagacggccataaagcttgttaaagaatttggatcaattgaaaatttactgatgaatacagataagttaaaagggaaaataaaagaaaatgtagaaaacaatgcagaattagctgttttaagcaaacggcttgctacgattgagagaaatgttcctattgatattgatttgaatgaatacgcggttaaaaattacgatgtcaataagcttacagagctatttgaaaaattggaattttcaagcctcatctcagatttaaaagatgatagtcgtgatacaaaggatattaaagaatggcctgtaagagattttacatacgttaaaaatgttttaggaaagtttgatgttttgtcattgtatccattcatatatgatggaaagataaaagcagtatcatttgcttgcggtgacggatcgttttttgtagagattgatgattatgacaattttaaattgcttaataatgataagcttacgttgataggacacgatctgaaagattttttagtaaacatttcatactgcggtattgaacttaattgtaagattttagatacggccataatgacttatcttttaaatccgtctgagtcgaattacgacataagtcgcgtattgaaaaaatacttgaaagaggatttgcaaaacatagatgatatagtaggcaagggcaggaataaaaagagctacgatgacattgacaaaaagcttttagtcgattatatgtgttcagccgcatcaaacttatctaagttaaaagataagctcatgtcatttataaaagagatggagatggaagatcttttaaaaaatgtggaaattccgcttattgaagtgctaaaatctatggaggtgtacggctttacattagataaagatgtacttagaagtatttctaaagaaatagatgaaaagacagataagattgtaaaagatatttacgatgctgctggatacgaatttaatattaactctacaaagcagttatcagaatttttgtttgataaactgaatttgccagcaataaaaaagactaaaacagggtattcgactgacatggaagtccttgcagaacttataccgtacaatgacatagtaggagaaataatagaatatagacagcttatgaagcttaaatctacgtacatagatggcttcattcccatcatggatgaaaataatagggtccactctacgtttaaacaaacagttgctgctacagggagaattagctcaacagagcctaatctgcagaacatacctgtaagagaagaatttggcaggaggataagaaaggcatttgtatcaagttatgaagatgggcttataatatctgctgattattctcagattgagctaagggttcttgcacatctttcagaggatgaaaaacttattgagtcatttttgaacaacgaagatatacatttaaggacggcatcggaggtttttaaggtttcgaaagaagaagtgacaagtgaaatgagaaggcgggcgaaagctgtcaactttggtattgtatatggtataagcgattacggcttatctaaagacttaaagatttcgcgaaaagaagcgaaagaatacatagacaattattttgacaggtacaagggcgtcaaaaattacatcgactcaattgtcaaatttgcaaaggaaaatgggtatgttacgactatcttaaataggagaagatacataccggaaatcaattcaaaaaattttaaccaaagatcttttggctggagaatggcaatgaatacacctattcaaggtagcgctgcggatataataaagatgtcgatggttaaagtatacaatgaattaaaggaaagaggattgaaatcaagacttattcttcaggtgcacgatgagcttataattgacacacatcctgatgaagttgaaatagtcaaggagcttctaaaatcaataatggaaaatatcataaagttgaaagttcctttagttgtagatatagggcaagggaaaaactggtatgatgcaaaataaaaggatcc

SEQ ID NO: 909 - DNA, 2678 bp, Artificial Sequence
  Description of Artificial Sequence: Synthetic Clostridium thermosulfurogenes DNA Polymerase E801Y
atgaaatacctgctgccgaccgctgctgctggtctgctgctcctcgctgcccagccggcgatggccatggcgaaatttttgatcatagatggtaatagcttgatgtacagggcgtattttgccctgcctgatttgatgaacagcgaaggaatgcatacaaatgccatatacggtttttcaatgatgcttcttaaattgctggaggaggagaaaccagactacatagcaatagctttcgataaaaaggcttctacatttaggcacaaggagtacagtgcttataaaggaacccgccagtcgatgccagaagagctgatagaacaggtggatattttaaaagatgtgataaatgcatttaacataaagaccatcgagatagagggatttgaagcagatgatatcattggtacagtatcaaaaattgcttccgaaagtgggatggatgtgcttatcgtcacaggcgacagagatgcgcttcagcttgtgtcggcaaatgtaaaagtaaaaatatgtaaaaaaggcataacgcagatggatgagtacgatgaaaaggcggtctttgaaaagtatgaagtgacgccgcttcaattcatagacttgaaagggcttatgggagacaaatcagacaacattccaggagtgcccaatataggggagaagacggccataaagcttgttaaagaatttggatcaattgaaaatttactgatgaatacagataagttaaaagggaaaataaaagaaaatgtagaaaacaatgcagaattagctgttttaagcaaacggcttgctacgattgagagaaatgttcctattgatattgatttgaatgaatacgcggttaaaaattacgatgtcaataagcttacagagctatttgaaaaattggaattttcaagcctcatctcagatttaaaagatgatagtcgtgatacaaaggatattaaagaatggcctgtaagagattttacatacgttaaaaatgttttaggaaagtttgatgttttgtcattgtatccattcatatatgatggaaagataaaagcagtatcatttgcttgcggtgacggatcgttttttgtagagattgatgattatgacaattttaaattgcttaataatgataagcttacgttgataggacacgatctgaaagattttttagtaaacatttcatactgcggtattgaacttaattgtaagattttagatacggccataatgacttatcttttaaatccgtctgagtcgaattacgacataagtcgcgtattgaaaaaatacttgaaagaggatttgcaaaacatagatgatatagtaggcaagggcaggaataaaaagagctacgatgacattgacaaaaagcttttagtcgattatatgtgttcagccgcatcaaacttatctaagttaaaagataagctcatgtcatttataaaagagatggagatggaagatcttttaaaaaatgtggaaattccgcttattgaagtgctaaaatctatggaggtgtacggctttacattagataaagatgtacttagaagtatttctaaagaaatagatgaaaagacagataagattgtaaaagatatttacgatgctgctggatacgaatttaatattaactctacaaagcagttatcagaatttttgtttgataaactgaatttgccagcaataaaaaagactaaaacagggtattcgactgacatggaagtccttgcagaacttataccgtacaatgacatagtaggagaaataatagaatatagacagcttatgaagcttaaatctacgtacatagatggcttcattcccatcatggatgaaaataatagggtccactctacgtttaaacaaacagttgctgctacagggagaattagctcaacagagcctaatctgcagaacatacctgtaagagaagaatttggcaggaggataagaaaggcatttgtatcaagttatgaagatgggcttataatatctgctgattattctcagattgagctaagggttcttgcacatctttcagaggatgaaaaacttattgagtcatttttgaacaacgaagatatacatttaaggacggcatcggaggtttttaaggtttcgaaagaagaagtgacaagtgaaatgagaaggcgggcgaaagctgtcaactttggtattgtatatggtataagcgattacggcttatctaaagacttaaagatttcgcgaaaagaagcgaaagaatacatagacaattattttgacaggtacaagggcgtcaaaaattacatcgactcaattgtcaaatttgcaaaggaaaatgggtatgttacgactatcttaaataggagaagatacataccggaaatcaattcaaaaaattttaaccaaagatcttttggctatagaatggcaatgaatacacctattcaaggtagcgctgcggatataataaagatgtcgatggttaaagtatacaatgaattaaaggaaagaggattgaaatcaagacttattcttcaggtgcacgatgagcttataattgacacacatcctgatgaagttgaaatagtcaaggagcttctaaaatcaataatggaaaatatcataaagttgaaagttcctttagttgtagatatagggcaagggaaaaactggtatgatgcaaaataaaaggatcc

SEQ ID NO: 910 - DNA, 2678 bp, Artificial Sequence
  Description of Artificial Sequence: Synthetic Clostridium thermosulfurogenes DNA Polymerase E801V
atgaaatacctgctgccgaccgctgctgctggtctgctgctcctcgctgcccagccggcgatggccatggcgaaatttttgatcatagatggtaatagcttgatgtacagggcgtattttgccctgcctgatttgatgaacagcgaaggaatgcatacaaatgccatatacggtttttcaatgatgcttcttaaattgctggaggaggagaaaccagactacatagcaatagctttcgataaaaaggcttctacatttaggcacaaggagtacagtgcttataaaggaacccgccagtcgatgccagaagagctgatagaacaggtggatattttaaaagatgtgataaatgcatttaacataaagaccatcgagatagagggatttgaagcagatgatatcattggtacagtatcaaaaattgcttccgaaagtgggatggatgtgcttatcgtcacaggcgacagagatgcgcttcagcttgtgtcggcaaatgtaaaagtaaaaatatgtaaaaaaggcataacgcagatggatgagtacgatgaaaaggcggtctttgaaaagtatgaagtgacgccgcttcaattcatagacttgaaagggcttatgggagacaaatcagacaacattccaggagtgcccaatataggggagaagacggccataaagcttgttaaagaatttggatcaattgaaaatttactgatgaatacagataagttaaaagggaaaataaaagaaaatgtagaaaacaatgcagaattagctgttttaagcaaacggcttgctacgattgagagaaatgttcctattgatattgatttgaatgaatacgcggttaaaaattacgatgtcaataagcttacagagctatttgaaaaattggaattttcaagcctcatctcagatttaaaagatgatagtcgtgatacaaaggatattaaagaatggcctgtaagagattttacatacgttaaaaatgttttaggaaagtttgatgttttgtcattgtatccattcatatatgatggaaagataaaagcagtatcatttgcttgcggtgacggatcgttttttgtagagattgatgattatgacaattttaaattgcttaataatgataagcttacgttgataggacacgatctgaaagattttttagtaaacatttcatactgcggtattgaacttaattgtaagattttagatacggccataatgacttatcttttaaatccgtctgagtcgaattacgacataagtcgcgtattgaaaaaatacttgaaagaggatttgcaaaacatagatgatatagtaggcaagggcaggaataaaaagagctacgatgacattgacaaaaagcttttagtcgattatatgtgttcagccgcatcaaacttatctaagttaaaagataagctcatgtcatttataaaagagatggagatggaagatcttttaaaaaatgtggaaattccgcttattgaagtgctaaaatctatggaggtgtacggctttacattagataaagatgtacttagaagtatttctaaagaaatagatgaaaagacagataagattgtaaaagatatttacgatgctgctggatacgaatttaatattaactctacaaagcagttatcagaatttttgtttgataaactgaatttgccagcaataaaaaagactaaaacagggtattcgactgacatggaagtccttgcagaacttataccgtacaatgacatagtaggagaaataatagaatatagacagcttatgaagcttaaatctacgtacatagatggcttcattcccatcatggatgaaaataatagggtccactctacgtttaaacaaacagttgctgctacagggagaattagctcaacagagcctaatctgcagaacatacctgtaagagaagaatttggcaggaggataagaaaggcatttgtatcaagttatgaagatgggcttataatatctgctgattattctcagattgagctaagggttcttgcacatctttcagaggatgaaaaacttattgagtcatttttgaacaacgaagatatacatttaaggacggcatcggaggtttttaaggtttcgaaagaagaagtgacaagtgaaatgagaaggcgggcgaaagctgtcaactttggtattgtatatggtataagcgattacggcttatctaaagacttaaagatttcgcgaaaagaagcgaaagaatacatagacaattattttgacaggtacaagggcgtcaaaaattacatcgactcaattgtcaaatttgcaaaggaaaatgggtatgttacgactatcttaaataggagaagatacataccggaaatcaattcaaaaaattttaaccaaagatcttttggcgttagaatggcaatgaatacacctattcaaggtagcgctgcggatataataaagatgtcgatggttaaagtatacaatgaattaaaggaaagaggattgaaatcaagacttattcttcaggtgcacgatgagcttataattgacacacatcctgatgaagttgaaatagtcaaggagcttctaaaatcaataatggaaaatatcataaagttgaaagttcctttagttgtagatatagggcaagggaaaaactggtatgatgcaaaataaaaggatcc

SEQ ID NO: 911 - DNA, 2678 bp, Artificial Sequence
  Description of Artificial Sequence: Synthetic Clostridium thermosulfurogenes DNA Polymerase R802A
atgaaatacctgctgccgaccgctgctgctggtctgctgctcctcgctgcccagccggcgatggccatggcgaaatttttgatcatagatggtaatagcttgatgtacagggcgtattttgccctgcctgatttgatgaacagcgaaggaatgcatacaaatgccatatacggtttttcaatgatgcttcttaaattgctggaggaggagaaaccagactacatagcaatagctttcgataaaaaggcttctacatttaggcacaaggagtacagtgcttataaaggaacccgccagtcgatgccagaagagctgatagaacaggtggatattttaaaagatgtgataaatgcatttaacataaagaccatcgagatagagggatttgaagcagatgatatcattggtacagtatcaaaaattgcttccgaaagtgggatggatgtgcttatcgtcacaggcgacagagatgcgcttcagcttgtgtcggcaaatgtaaaagtaaaaatatgtaaaaaaggcataacgcagatggatgagtacgatgaaaaggcggtctttgaaaagtatgaagtgacgccgcttcaattcatagacttgaaagggcttatgggagacaaatcagacaacattccaggagtgcccaatataggggagaagacggccataaagcttgttaaagaatttggatcaattgaaaatttactgatgaatacagataagttaaaagggaaaataaaagaaaatgtagaaaacaatgcagaattagctgttttaagcaaacggcttgctacgattgagagaaatgttcctattgatattgatttgaatgaatacgcggttaaaaattacgatgtcaataagcttacagagctatttgaaaaattggaattttcaagcctcatctcagatttaaaagatgatagtcgtgatacaaaggatattaaagaatggcctgtaagagattttacatacgttaaaaatgttttaggaaagtttgatgttttgtcattgtatccattcatatatgatggaaagataaaagcagtatcatttgcttgcggtgacggatcgttttttgtagagattgatgattatgacaattttaaattgcttaataatgataagcttacgttgataggacacgatctgaaagattttttagtaaacatttcatactgcggtattgaacttaattgtaagattttagatacggccataatgacttatcttttaaatccgtctgagtcgaattacgacataagtcgcgtattgaaaaaatacttgaaagaggatttgcaaaacatagatgatatagtaggcaagggcaggaataaaaagagctacgatgacattgacaaaaagcttttagtcgattatatgtgttcagccgcatcaaacttatctaagttaaaagataagctcatgtcatttataaaagagatggagatggaagatcttttaaaaaatgtggaaattccgcttattgaagtgctaaaatctatggaggtgtacggctttacattagataaagatgtacttagaagtatttctaaagaaatagatgaaaagacagataagattgtaaaagatatttacgatgctgctggatacgaatttaatattaactctacaaagcagttatcagaatttttgtttgataaactgaatttgccagcaataaaaaagactaaaacagggtattcgactgacatggaagtccttgcagaacttataccgtacaatgacatagtaggagaaataatagaatatagacagcttatgaagcttaaatctacgtacatagatggcttcattcccatcatggatgaaaataatagggtccactctacgtttaaacaaacagttgctgctacagggagaattagctcaacagagcctaatctgcagaacatacctgtaagagaagaatttggcaggaggataagaaaggcatttgtatcaagttatgaagatgggcttataatatctgctgattattctcagattgagctaagggttcttgcacatctttcagaggatgaaaaacttattgagtcatttttgaacaacgaagatatacatttaaggacggcatcggaggtttttaaggtttcgaaagaagaagtgacaagtgaaatgagaaggcgggcgaaagctgtcaactttggtattgtatatggtataagcgattacggcttatctaaagacttaaagatttcgcgaaaagaagcgaaagaatacatagacaattattttgacaggtacaagggcgtcaaaaattacatcgactcaattgtcaaatttgcaaaggaaaatgggtatgttacgactatcttaaataggagaagatacataccggaaatcaattcaaaaaattttaaccaaagatcttttggcgaggctatggcaatgaatacacctattcaaggtagcgctgcggatataataaagatgtcgatggttaaagtatacaatgaattaaaggaaagaggattgaaatcaagacttattcttcaggtgcacgatgagcttataattgacacacatcctgatgaagttgaaatagtcaaggagcttctaaaatcaataatggaaaatatcataaagttgaaagttcctttagttgtagatatagggcaagggaaaaactggtatgatgcaaaataaaaggatcc

SEQ ID NO: 912 - DNA, 2678 bp, Artificial Sequence
  Description of Artificial Sequence: Synthetic Clostridium thermosulfurogenes DNA Polymerase R802N
atgaaatacctgctgccgaccgctgctgctggtctgctgctcctcgctgcccagccggcgatggccatggcgaaatttttgatcatagatggtaatagcttgatgtacagggcgtattttgccctgcctgatttgatgaacagcgaaggaatgcatacaaatgccatatacggtttttcaatgatgcttcttaaattgctggaggaggagaaaccagactacatagcaatagctttcgataaaaaggcttctacatttaggcacaaggagtacagtgcttataaaggaacccgccagtcgatgccagaagagctgatagaacaggtggatattttaaaagatgtgataaatgcatttaacataaagaccatcgagatagagggatttgaagcagatgatatcattggtacagtatcaaaaattgcttccgaaagtgggatggatgtgcttatcgtcacaggcgacagagatgcgcttcagcttgtgtcggcaaatgtaaaagtaaaaatatgtaaaaaaggcataacgcagatggatgagtacgatgaaaaggcggtctttgaaaagtatgaagtgacgccgcttcaattcatagacttgaaagggcttatgggagacaaatcagacaacattccaggagtgcccaatataggggagaagacggccataaagcttgttaaagaatttggatcaattgaaaatttactgatgaatacagataagttaaaagggaaaataaaagaaaatgtagaaaacaatgcagaattagctgttttaagcaaacggcttgctacgattgagagaaatgttcctattgatattgatttgaatgaatacgcggttaaaaattacgatgtcaataagcttacagagctatttgaaaaattggaattttcaagcctcatctcagatttaaaagatgatagtcgtgatacaaaggatattaaagaatggcctgtaagagattttacatacgttaaaaatgttttaggaaagtttgatgttttgtcattgtatccattcatatatgatggaaagataaaagcagtatcatttgcttgcggtgacggatcgttttttgtagagattgatgattatgacaattttaaattgcttaataatgataagcttacgttgataggacacgatctgaaagattttttagtaaacatttcatactgcggtattgaacttaattgtaagattttagatacggccataatgacttatcttttaaatccgtctgagtcgaattacgacataagtcgcgtattgaaaaaatacttgaaagaggatttgcaaaacatagatgatatagtaggcaagggcaggaataaaaagagctacgatgacattgacaaaaagcttttagtcgattatatgtgttcagccgcatcaaacttatctaagttaaaagataagctcatgtcatttataaaagagatggagatggaagatcttttaaaaaatgtggaaattccgcttattgaagtgctaaaatctatggaggtgtacggctttacattagataaagatgtacttagaagtatttctaaagaaatagatgaaaagacagataagattgtaaaagatatttacgatgctgctggatacgaatttaatattaactctacaaagcagttatcagaatttttgtttgataaactgaatttgccagcaataaaaaagactaaaacagggtattcgactgacatggaagtccttgcagaacttataccgtacaatgacatagtaggagaaataatagaatatagacagcttatgaagcttaaatctacgtacatagatggcttcattcccatcatggatgaaaataatagggtccactctacgtttaaacaaacagttgctgctacagggagaattagctcaacagagcctaatctgcagaacatacctgtaagagaagaatttggcaggaggataagaaaggcatttgtatcaagttatgaagatgggcttataatatctgctgattattctcagattgagctaagggttcttgcacatctttcagaggatgaaaaacttattgagtcatttttgaacaacgaagatatacatttaaggacggcatcggaggtttttaaggtttcgaaagaagaagtgacaagtgaaatgagaaggcgggcgaaagctgtcaactttggtattgtatatggtataagcgattacggcttatctaaagacttaaagatttcgcgaaaagaagcgaaagaatacatagacaattattttgacaggtacaagggcgtcaaaaattacatcgactcaattgtcaaatttgcaaaggaaaatgggtatgttacgactatcttaaataggagaagatacataccggaaatcaattcaaaaaattttaaccaaagatcttttggcgagattatggcaatgaatacacctattcaaggtagcgctgcggatataataaagatgtcgatggttaaagtatacaatgaattaaaggaaagaggattgaaatcaagacttattcttcaggtgcacgatgagcttataattgacacacatcctgatgaagttgaaatagtcaaggagcttctaaaatcaataatggaaaatatcataaagttgaaagttcctttagttgtagatatagggcaagggaaaaactggtatgatgcaaaataaaaggatcc

SEQ ID NO: 913 - DNA, 2678 bp, Artificial Sequence
  Description of Artificial Sequence: Synthetic Clostridium thermosulfurogenes DNA Polymerase R802D
atgaaatacctgctgccgaccgctgctgctggtctgctgctcctcgctgcccagccggcgatggccatggcgaaatttttgatcatagatggtaatagcttgatgtacagggcgtattttgccctgcctgatttgatgaacagcgaaggaatgcatacaaatgccatatacggtttttcaatgatgcttcttaaattgctggaggaggagaaaccagactacatagcaatagctttcgataaaaaggcttctacatttaggcacaaggagtacagtgcttataaaggaacccgccagtcgatgccagaagagctgatagaacaggtggatattttaaaagatgtgataaatgcatttaacataaagaccatcgagatagagggatttgaagcagatgatatcattggtacagtatcaaaaattgcttccgaaagtgggatggatgtgcttatcgtcacaggcgacagagatgcgcttcagcttgtgtcggcaaatgtaaaagtaaaaatatgtaaaaaaggcataacgcagatggatgagtacgatgaaaaggcggtctttgaaaagtatgaagtgacgccgcttcaattcatagacttgaaagggcttatgggagacaaatcagacaacattccaggagtgcccaatataggggagaagacggccataaagcttgttaaagaatttggatcaattgaaaatttactgatgaatacagataagttaaaagggaaaataaaagaaaatgtagaaaacaatgcagaattagctgttttaagcaaacggcttgctacgattgagagaaatgttcctattgatattgatttgaatgaatacgcggttaaaaattacgatgtcaataagcttacagagctatttgaaaaattggaattttcaagcctcatctcagatttaaaagatgatagtcgtgatacaaaggatattaaagaatggcctgtaagagattttacatacgttaaaaatgttttaggaaagtttgatgttttgtcattgtatccattcatatatgatggaaagataaaagcagtatcatttgcttgcggtgacggatcgttttttgtagagattgatgattatgacaattttaaattgcttaataatgataagcttacgttgataggacacgatctgaaagattttttagtaaacatttcatactgcggtattgaacttaattgtaagattttagatacggccataatgacttatcttttaaatccgtctgagtcgaattacgacataagtcgcgtattgaaaaaatacttgaaagaggatttgcaaaacatagatgatatagtaggcaagggcaggaataaaaagagctacgatgacattgacaaaaagcttttagtcgattatatgtgttcagccgcatcaaacttatctaagttaaaagataagctcatgtcatttataaaagagatggagatggaagatcttttaaaaaatgtggaaattccgcttattgaagtgctaaaatctatggaggtgtacggctttacattagataaagatgtacttagaagtatttctaaagaaatagatgaaaagacagataagattgtaaaagatatttacgatgctgctggatacgaatttaatattaactctacaaagcagttatcagaatttttgtttgataaactgaatttgccagcaataaaaaagactaaaacagggtattcgactgacatggaagtccttgcagaacttataccgtacaatgacatagtaggagaaataatagaatatagacagcttatgaagcttaaatctacgtacatagatggcttcattcccatcatggatgaaaataatagggtccactctacgtttaaacaaacagttgctgctacagggagaattagctcaacagagcctaatctgcagaacatacctgtaagagaagaatttggcaggaggataagaaaggcatttgtatcaagttatgaagatgggcttataatatctgctgattattctcagattgagctaagggttcttgcacatctttcagaggatgaaaaacttattgagtcatttttgaacaacgaagatatacatttaaggacggcatcggaggtttttaaggtttcgaaagaagaagtgacaagtgaaatgagaaggcgggcgaaagctgtcaactttggtattgtatatggtataagcgattacggcttatctaaagacttaaagatttcgcgaaaagaagcgaaagaatacatagacaattattttgacaggtacaagggcgtcaaaaattacatcgactcaattgtcaaatttgcaaaggaaaatgggtatgttacgactatcttaaataggagaagatacataccggaaatcaattcaaaaaattttaaccaaagatcttttggcgaggatatggcaatgaatacacctattcaaggtagcgctgcggatataataaagatgtcgatggttaaagtatacaatgaattaaaggaaagaggattgaaatcaagacttattcttcaggtgcacgatgagcttataattgacacacatcctgatgaagttgaaatagtcaaggagcttctaaaatcaataatggaaaatatcataaagttgaaagttcctttagttgtagatatagggcaagggaaaaactggtatgatgcaaaataaaaggatcc

SEQ ID NO: 914 - DNA, 2678 bp, Artificial Sequence
  Description of Artificial Sequence: Synthetic Clostridium thermosulfurogenes DNA Polymerase R802C
atgaaatacctgctgccgaccgctgctgctggtctgctgctcctcgctgcccagccggcgatggccatggcgaaatttttgatcatagatggtaatagcttgatgtacagggcgtattttgccctgcctgatttgatgaacagcgaaggaatgcatacaaatgccatatacggtttttcaatgatgcttcttaaattgctggaggaggagaaaccagactacatagcaatagctttcgataaaaaggcttctacatttaggcacaaggagtacagtgcttataaaggaacccgccagtcgatgccagaagagctgatagaacaggtggatattttaaaagatgtgataaatgcatttaacataaagaccatcgagatagagggatttgaagcagatgatatcattggtacagtatcaaaaattgcttccgaaagtgggatggatgtgcttatcgtcacaggcgacagagatgcgcttcagcttgtgtcggcaaatgtaaaagtaaaaatatgtaaaaaaggcataacgcagatggatgagtacgatgaaaaggcggtctttgaaaagtatgaagtgacgccgcttcaattcatagacttgaaagggcttatgggagacaaatcagacaacattccaggagtgcccaatataggggagaagacggccataaagcttgttaaagaatttggatcaattgaaaatttactgatgaatacagataagttaaaagggaaaataaaagaaaatgtagaaaacaatgcagaattagctgttttaagcaaacggcttgctacgattgagagaaatgttcctattgatattgatttgaatgaatacgcggttaaaaattacgatgtcaataagcttacagagctatttgaaaaattggaattttcaagcctcatctcagatttaaaagatgatagtcgtgatacaaaggatattaaagaatggcctgtaagagattttacatacgttaaaaatgttttaggaaagtttgatgttttgtcattgtatccattcatatatgatggaaagataaaagcagtatcatttgcttgcggtgacggatcgttttttgtagagattgatgattatgacaattttaaattgcttaataatgataagcttacgttgataggacacgatctgaaagattttttagtaaacatttcatactgcggtattgaacttaattgtaagattttagatacggccataatgacttatcttttaaatccgtctgagtcgaattacgacataagtcgcgtattgaaaaaatacttgaaagaggatttgcaaaacatagatgatatagtaggcaagggcaggaataaaaagagctacgatgacattgacaaaaagcttttagtcgattatatgtgttcagccgcatcaaacttatctaagttaaaagataagctcatgtcatttataaaagagatggagatggaagatcttttaaaaaatgtggaaattccgcttattgaagtgctaaaatctatggaggtgtacggctttacattagataaagatgtacttagaagtatttctaaagaaatagatgaaaagacagataagattgtaaaagatatttacgatgctgctggatacgaatttaatattaactctacaaagcagttatcagaatttttgtttgataaactgaatttgccagcaataaaaaagactaaaacagggtattcgactgacatggaagtccttgcagaacttataccgtacaatgacatagtaggagaaataatagaatatagacagcttatgaagcttaaatctacgtacatagatggcttcattcccatcatggatgaaaataatagggtccactctacgtttaaacaaacagttgctgctacagggagaattagctcaacagagcctaatctgcagaacatacctgtaagagaagaatttggcaggaggataagaaaggcatttgtatcaagttatgaagatgggcttataatatctgctgattattctcagattgagctaagggttcttgcacatctttcagaggatgaaaaacttattgagtcatttttgaacaacgaagatatacatttaaggacggcatcggaggtttttaaggtttcgaaagaagaagtgacaagtgaaatgagaaggcgggcgaaagctgtcaactttggtattgtatatggtataagcgattacggcttatctaaagacttaaagatttcgcgaaaagaagcgaaagaatacatagacaattattttgacaggtacaagggcgtcaaaaattacatcgactcaattgtcaaatttgcaaaggaaaatgggtatgttacgactatcttaaataggagaagatacataccggaaatcaattcaaaaaattttaaccaaagatcttttggcgagtgtatggcaatgaatacacctattcaaggtagcgctgcggatataataaagatgtcgatggttaaagtatacaatgaattaaaggaaagaggattgaaatcaagacttattcttcaggtgcacgatgagcttataattgacacacatcctgatgaagttgaaatagtcaaggagcttctaaaatcaataatggaaaatatcataaagttgaaagttcctttagttgtagatatagggcaagggaaaaactggtatgatgcaaaataaaaggatcc

SEQ ID NO: 915 - DNA, 2678 bp, Artificial Sequence
  Description of Artificial Sequence: Synthetic Clostridium thermosulfurogenes DNA Polymerase R802E
atgaaatacctgctgccgaccgctgctgctggtctgctgctcctcgctgcccagccggcgatggccatggcgaaatttttgatcatagatggtaatagcttgatgtacagggcgtattttgccctgcctgatttgatgaacagcgaaggaatgcatacaaatgccatatacggtttttcaatgatgcttcttaaattgctggaggaggagaaaccagactacatagcaatagctttcgataaaaaggcttctacatttaggcacaaggagtacagtgcttataaaggaacccgccagtcgatgccagaagagctgatagaacaggtggatattttaaaagatgtgataaatgcatttaacataaagaccatcgagatagagggatttgaagcagatgatatcattggtacagtatcaaaaattgcttccgaaagtgggatggatgtgcttatcgtcacaggcgacagagatgcgcttcagcttgtgtcggcaaatgtaaaagtaaaaatatgtaaaaaaggcataacgcagatggatgagtacgatgaaaaggcggtctttgaaaagtatgaagtgacgccgcttcaattcatagacttgaaagggcttatgggagacaaatcagacaacattccaggagtgcccaatataggggagaagacggccataaagcttgttaaagaatttggatcaattgaaaatttactgatgaatacagataagttaaaagggaaaataaaagaaaatgtagaaaacaatgcagaattagctgttttaagcaaacggcttgctacgattgagagaaatgttcctattgatattgatttgaatgaatacgcggttaaaaattacgatgtcaataagcttacagagctatttgaaaaattggaattttcaagcctcatctcagatttaaaagatgatagtcgtgatacaaaggatattaaagaatggcctgtaagagattttacatacgttaaaaatgttttaggaaagtttgatgttttgtcattgtatccattcatatatgatggaaagataaaagcagtatcatttgcttgcggtgacggatcgttttttgtagagattgatgattatgacaattttaaattgcttaataatgataagcttacgttgataggacacgatctgaaagattttttagtaaacatttcatactgcggtattgaacttaattgtaagattttagatacggccataatgacttatcttttaaatccgtctgagtcgaattacgacataagtcgcgtattgaaaaaatacttgaaagaggatttgcaaaacatagatgatatagtaggcaagggcaggaataaaaagagctacgatgacattgacaaaaagcttttagtcgattatatgtgttcagccgcatcaaacttatctaagttaaaagataagctcatgtcatttataaaagagatggagatggaagatcttttaaaaaatgtggaaattccgcttattgaagtgctaaaatctatggaggtgtacggctttacattagataaagatgtacttagaagtatttctaaagaaatagatgaaaagacagataagattgtaaaagatatttacgatgctgctggatacgaatttaatattaactctacaaagcagttatcagaatttttgtttgataaactgaatttgccagcaataaaaaagactaaaacagggtattcgactgacatggaagtccttgcagaacttataccgtacaatgacatagtaggagaaataatagaatatagacagcttatgaagcttaaatctacgtacatagatggcttcattcccatcatggatgaaaataatagggtccactctacgtttaaacaaacagttgctgctacagggagaattagctcaacagagcctaatctgcagaacatacctgtaagagaagaatttggcaggaggataagaaaggcatttgtatcaagttatgaagatgggcttataatatctgctgattattctcagattgagctaagggttcttgcacatctttcagaggatgaaaaacttattgagtcatttttgaacaacgaagatatacatttaaggacggcatcggaggtttttaaggtttcgaaagaagaagtgacaagtgaaatgagaaggcgggcgaaagctgtcaactttggtattgtatatggtataagcgattacggcttatctaaagacttaaagatttcgcgaaaagaagcgaaagaatacatagacaattattttgacaggtacaagggcgtcaaaaattacatcgactcaattgtcaaatttgcaaaggaaaatgggtatgttacgactatcttaaataggagaagatacataccggaaatcaattcaaaaaattttaaccaaagatcttttggcgaggaaatggcaatgaatacacctattcaaggtagcgctgcggatataataaagatgtcgatggttaaagtatacaatgaattaaaggaaagaggattgaaatcaagacttattcttcaggtgcacgatgagcttataattgacacacatcctgatgaagttgaaatagtcaaggagcttctaaaatcaataatggaaaatatcataaagttgaaagttcctttagttgtagatatagggcaagggaaaaactggtatgatgcaaaataaaaggatcc

SEQ ID NO: 916 - DNA, 2678 bp, Artificial Sequence
  Description of Artificial Sequence: Synthetic Clostridium thermosulfurogenes DNA Polymerase R802Q
atgaaatacctgctgccgaccgctgctgctggtctgctgctcctcgctgcccagccggcgatggccatggcgaaatttttgatcatagatggtaatagcttgatgtacagggcgtattttgccctgcctgatttgatgaacagcgaaggaatgcatacaaatgccatatacggtttttcaatgatgcttcttaaattgctggaggaggagaaaccagactacatagcaatagctttcgataaaaaggcttctacatttaggcacaaggagtacagtgcttataaaggaacccgccagtcgatgccagaagagctgatagaacaggtggatattttaaaagatgtgataaatgcatttaacataaagaccatcgagatagagggatttgaagcagatgatatcattggtacagtatcaaaaattgcttccgaaagtgggatggatgtgcttatcgtcacaggcgacagagatgcgcttcagcttgtgtcggcaaatgtaaaagtaaaaatatgtaaaaaaggcataacgcagatggatgagtacgatgaaaaggcggtctttgaaaagtatgaagtgacgccgcttcaattcatagacttgaaagggcttatgggagacaaatcagacaacattccaggagtgcccaatataggggagaagacggccataaagcttgttaaagaatttggatcaattgaaaatttactgatgaatacagataagttaaaagggaaaataaaagaaaatgtagaaaacaatgcagaattagctgttttaagcaaacggcttgctacgattgagagaaatgttcctattgatattgatttgaatgaatacgcggttaaaaattacgatgtcaataagcttacagagctatttgaaaaattggaattttcaagcctcatctcagatttaaaagatgatagtcgtgatacaaaggatattaaagaatggcctgtaagagattttacatacgttaaaaatgttttaggaaagtttgatgttttgtcattgtatccattcatatatgatggaaagataaaagcagtatcatttgcttgcggtgacggatcgttttttgtagagattgatgattatgacaattttaaattgcttaataatgataagcttacgttgataggacacgatctgaaagattttttagtaaacatttcatactgcggtattgaacttaattgtaagattttagatacggccataatgacttatcttttaaatccgtctgagtcgaattacgacataagtcgcgtattgaaaaaatacttgaaagaggatttgcaaaacatagatgatatagtaggcaagggcaggaataaaaagagctacgatgacattgacaaaaagcttttagtcgattatatgtgttcagccgcatcaaacttatctaagttaaaagataagctcatgtcatttataaaagagatggagatggaagatcttttaaaaaatgtggaaattccgcttattgaagtgctaaaatctatggaggtgtacggctttacattagataaagatgtacttagaagtatttctaaagaaatagatgaaaagacagataagattgtaaaagatatttacgatgctgctggatacgaatttaatattaactctacaaagcagttatcagaatttttgtttgataaactgaatttgccagcaataaaaaagactaaaacagggtattcgactgacatggaagtccttgcagaacttataccgtacaatgacatagtaggagaaataatagaatatagacagcttatgaagcttaaatctacgtacatagatggcttcattcccatcatggatgaaaataatagggtccactctacgtttaaacaaacagttgctgctacagggagaattagctcaacagagcctaatctgcagaacatacctgtaagagaagaatttggcaggaggataagaaaggcatttgtatcaagttatgaagatgggcttataatatctgctgattattctcagattgagctaagggttcttgcacatctttcagaggatgaaaaacttattgagtcatttttgaacaacgaagatatacatttaaggacggcatcggaggtttttaaggtttcgaaagaagaagtgacaagtgaaatgagaaggcgggcgaaagctgtcaactttggtattgtatatggtataagcgattacggcttatctaaagacttaaagatttcgcgaaaagaagcgaaagaatacatagacaattattttgacaggtacaagggcgtcaaaaattacatcgactcaattgtcaaatttgcaaaggaaaatgggtatgttacgactatcttaaataggagaagatacataccggaaatcaattcaaaaaattttaaccaaagatcttttggcgagcaaatggcaatgaatacacctattcaaggtagcgctgcggatataataaagatgtcgatggttaaagtatacaatgaattaaaggaaagaggattgaaatcaagacttattcttcaggtgcacgatgagcttataattgacacacatcctgatgaagttgaaatagtcaaggagcttctaaaatcaataatggaaaatatcataaagttgaaagttcctttagttgtagatatagggcaagggaaaaactggtatgatgcaaaataaaaggatcc

SEQ ID NO: 917 - DNA, 2678 bp, Artificial Sequence
  Description of Artificial Sequence: Synthetic Clostridium thermosulfurogenes DNA Polymerase R802G
atgaaatacctgctgccgaccgctgctgctggtctgctgctcctcgctgcccagccggcgatggccatggcgaaatttttgatcatagatggtaatagcttgatgtacagggcgtattttgccctgcctgatttgatgaacagcgaaggaatgcatacaaatgccatatacggtttttcaatgatgcttcttaaattgctggaggaggagaaaccagactacatagcaatagctttcgataaaaaggcttctacatttaggcacaaggagtacagtgcttataaaggaacccgccagtcgatgccagaagagctgatagaacaggtggatattttaaaagatgtgataaatgcatttaacataaagaccatcgagatagagggatttgaagcagatgatatcattggtacagtatcaaaaattgcttccgaaagtgggatggatgtgcttatcgtcacaggcgacagagatgcgcttcagcttgtgtcggcaaatgtaaaagtaaaaatatgtaaaaaaggcataacgcagatggatgagtacgatgaaaaggcggtctttgaaaagtatgaagtgacgccgcttcaattcatagacttgaaagggcttatgggagacaaatcagacaacattccaggagtgcccaatataggggagaagacggccataaagcttgttaaagaatttggatcaattgaaaatttactgatgaatacagataagttaaaagggaaaataaaagaaaatgtagaaaacaatgcagaattagctgttttaagcaaacggcttgctacgattgagagaaatgttcctattgatattgatttgaatgaatacgcggttaaaaattacgatgtcaataagcttacagagctatttgaaaaattggaattttcaagcctcatctcagatttaaaagatgatagtcgtgatacaaaggatattaaagaatggcctgtaagagattttacatacgttaaaaatgttttaggaaagtttgatgttttgtcattgtatccattcatatatgatggaaagataaaagcagtatcatttgcttgcggtgacggatcgttttttgtagagattgatgattatgacaattttaaattgcttaataatgataagcttacgttgataggacacgatctgaaagattttttagtaaacatttcatactgcggtattgaacttaattgtaagattttagatacggccataatgacttatcttttaaatccgtctgagtcgaattacgacataagtcgcgtattgaaaaaatacttgaaagaggatttgcaaaacatagatgatatagtaggcaagggcaggaataaaaagagctacgatgacattgacaaaaagcttttagtcgattatatgtgttcagccgcatcaaacttatctaagttaaaagataagctcatgtcatttataaaagagatggagatggaagatcttttaaaaaatgtggaaattccgcttattgaagtgctaaaatctatggaggtgtacggctttacattagataaagatgtacttagaagtatttctaaagaaatagatgaaaagacagataagattgtaaaagatatttacgatgctgctggatacgaatttaatattaactctacaaagcagttatcagaatttttgtttgataaactgaatttgccagcaataaaaaagactaaaacagggtattcgactgacatggaagtccttgcagaacttataccgtacaatgacatagtaggagaaataatagaatatagacagcttatgaagcttaaatctacgtacatagatggcttcattcccatcatggatgaaaataatagggtccactctacgtttaaacaaacagttgctgctacagggagaattagctcaacagagcctaatctgcagaacatacctgtaagagaagaatttggcaggaggataagaaaggcatttgtatcaagttatgaagatgggcttataatatctgctgattattctcagattgagctaagggttcttgcacatctttcagaggatgaaaaacttattgagtcatttttgaacaacgaagatatacatttaaggacggcatcggaggtttttaaggtttcgaaagaagaagtgacaagtgaaatgagaaggcgggcgaaagctgtcaactttggtattgtatatggtataagcgattacggcttatctaaagacttaaagatttcgcgaaaagaagcgaaagaatacatagacaattattttgacaggtacaagggcgtcaaaaattacatcgactcaattgtcaaatttgcaaaggaaaatgggtatgttacgactatcttaaataggagaagatacataccggaaatcaattcaaaaaattttaaccaaagatcttttggcgagggtatggcaatgaatacacctattcaaggtagcgctgcggatataataaagatgtcgatggttaaagtatacaatgaattaaaggaaagaggattgaaatcaagacttattcttcaggtgcacgatgagcttataattgacacacatcctgatgaagttgaaatagtcaaggagcttctaaaatcaataatggaaaatatcataaagttgaaagttcctttagttgtagatatagggcaagggaaaaactggtatgatgcaaaataaaaggatcc

SEQ ID NO: 918 - DNA, 2678 bp, Artificial Sequence
  Description of Artificial Sequence: Synthetic Clostridium thermosulfurogenes DNA Polymerase R802H
atgaaatacctgctgccgaccgctgctgctggtctgctgctcctcgctgcccagccggcgatggccatggcgaaatttttgatcatagatggtaatagcttgatgtacagggcgtattttgccctgcctgatttgatgaacagcgaaggaatgcatacaaatgccatatacggtttttcaatgatgcttcttaaattgctggaggaggagaaaccagactacatagcaatagctttcgataaaaaggcttctacatttaggcacaaggagtacagtgcttataaaggaacccgccagtcgatgccagaagagctgatagaacaggtggatattttaaaagatgtgataaatgcatttaacataaagaccatcgagatagagggatttgaagcagatgatatcattggtacagtatcaaaaattgcttccgaaagtgggatggatgtgcttatcgtcacaggcgacagagatgcgcttcagcttgtgtcggcaaatgtaaaagtaaaaatatgtaaaaaaggcataacgcagatggatgagtacgatgaaaaggcggtctttgaaaagtatgaagtgacgccgcttcaattcatagacttgaaagggcttatgggagacaaatcagacaacattccaggagtgcccaatataggggagaagacggccataaagcttgttaaagaatttggatcaattgaaaatttactgatgaatacagataagttaaaagggaaaataaaagaaaatgtagaaaacaatgcagaattagctgttttaagcaaacggcttgctacgattgagagaaatgttcctattgatattgatttgaatgaatacgcggttaaaaattacgatgtcaataagcttacagagctatttgaaaaattggaattttcaagcctcatctcagatttaaaagatgatagtcgtgatacaaaggatattaaagaatggcctgtaagagattttacatacgttaaaaatgttttaggaaagtttgatgttttgtcattgtatccattcatatatgatggaaagataaaagcagtatcatttgcttgcggtgacggatcgttttttgtagagattgatgattatgacaattttaaattgcttaataatgataagcttacgttgataggacacgatctgaaagattttttagtaaacatttcatactgcggtattgaacttaattgtaagattttagatacggccataatgacttatcttttaaatccgtctgagtcgaattacgacataagtcgcgtattgaaaaaatacttgaaagaggatttgcaaaacatagatgatatagtaggcaagggcaggaataaaaagagctacgatgacattgacaaaaagcttttagtcgattatatgtgttcagccgcatcaaacttatctaagttaaaagataagctcatgtcatttataaaagagatggagatggaagatcttttaaaaaatgtggaaattccgcttattgaagtgctaaaatctatggaggtgtacggctttacattagataaagatgtacttagaagtatttctaaagaaatagatgaaaagacagataagattgtaaaagatatttacgatgctgctggatacgaatttaatattaactctacaaagcagttatcagaatttttgtttgataaactgaatttgccagcaataaaaaagactaaaacagggtattcgactgacatggaagtccttgcagaacttataccgtacaatgacatagtaggagaaataatagaatatagacagcttatgaagcttaaatctacgtacatagatggcttcattcccatcatggatgaaaataatagggtccactctacgtttaaacaaacagttgctgctacagggagaattagctcaacagagcctaatctgcagaacatacctgtaagagaagaatttggcaggaggataagaaaggcatttgtatcaagttatgaagatgggcttataatatctgctgattattctcagattgagctaagggttcttgcacatctttcagaggatgaaaaacttattgagtcatttttgaacaacgaagatatacatttaaggacggcatcggaggtttttaaggtttcgaaagaagaagtgacaagtgaaatgagaaggcgggcgaaagctgtcaactttggtattgtatatggtataagcgattacggcttatctaaagacttaaagatttcgcgaaaagaagcgaaagaatacatagacaattattttgacaggtacaagggcgtcaaaaattacatcgactcaattgtcaaatttgcaaaggaaaatgggtatgttacgactatcttaaataggagaagatacataccggaaatcaattcaaaaaattttaaccaaagatcttttggcgagcatatggcaatgaatacacctattcaaggtagcgctgcggatataataaagatgtcgatggttaaagtatacaatgaattaaaggaaagaggattgaaatcaagacttattcttcaggtgcacgatgagcttataattgacacacatcctgatgaagttgaaatagtcaaggagcttctaaaatcaataatggaaaatatcataaagttgaaagttcctttagttgtagatatagggcaagggaaaaactggtatgatgcaaaataaaaggatcc

SEQ ID NO: 919 - DNA, 2678 bp, Artificial Sequence; identical to SEQ ID NO: 912
  Description of Artificial Sequence: Synthetic Clostridium thermosulfurogenes DNA Polymerase R802I

SEQ ID NO: 920 - DNA, 2678 bp, Artificial Sequence
  Description of Artificial Sequence: Synthetic Clostridium thermosulfurogenes DNA Polymerase R802L
atgaaatacctgctgccgaccgctgctgctggtctgctgctcctcgctgcccagccggcgatggccatggcgaaatttttgatcatagatggtaatagcttgatgtacagggcgtattttgccctgcctgatttgatgaacagcgaaggaatgcatacaaatgccatatacggtttttcaatgatgcttcttaaattgctggaggaggagaaaccagactacatagcaatagctttcgataaaaaggcttctacatttaggcacaaggagtacagtgcttataaaggaacccgccagtcgatgccagaagagctgatagaacaggtggatattttaaaagatgtgataaatgcatttaacataaagaccatcgagatagagggatttgaagcagatgatatcattggtacagtatcaaaaattgcttccgaaagtgggatggatgtgcttatcgtcacaggcgacagagatgcgcttcagcttgtgtcggcaaatgtaaaagtaaaaatatgtaaaaaaggcataacgcagatggatgagtacgatgaaaaggcggtctttgaaaagtatgaagtgacgccgcttcaattcatagacttgaaagggcttatgggagacaaatcagacaacattccaggagtgcccaatataggggagaagacggccataaagcttgttaaagaatttggatcaattgaaaatttactgatgaatacagataagttaaaagggaaaataaaagaaaatgtagaaaacaatgcagaattagctgttttaagcaaacggcttgctacgattgagagaaatgttcctattgatattgatttgaatgaatacgcggttaaaaattacgatgtcaataagcttacagagctatttgaaaaattggaattttcaagcctcatctcagatttaaaagatgatagtcgtgatacaaaggatattaaagaatggcctgtaagagattttacatacgttaaaaatgttttaggaaagtttgatgttttgtcattgtatccattcatatatgatggaaagataaaagcagtatcatttgcttgcggtgacggatcgttttttgtagagattgatgattatgacaattttaaattgcttaataatgataagcttacgttgataggacacgatctgaaagattttttagtaaacatttcatactgcggtattgaacttaattgtaagattttagatacggccataatgacttatcttttaaatccgtctgagtcgaattacgacataagtcgcgtattgaaaaaatacttgaaagaggatttgcaaaacatagatgatatagtaggcaagggcaggaataaaaagagctacgatgacattgacaaaaagcttttagtcgattatatgtgttcagccgcatcaaacttatctaagttaaaagataagctcatgtcatttataaaagagatggagatggaagatcttttaaaaaatgtggaaattccgcttattgaagtgctaaaatctatggaggtgtacggctttacattagataaagatgtacttagaagtatttctaaagaaatagatgaaaagacagataagattgtaaaagatatttacgatgctgctggatacgaatttaatattaactctacaaagcagttatcagaatttttgtttgataaactgaatttgccagcaataaaaaagactaaaacagggtattcgactgacatggaagtccttgcagaacttataccgtacaatgacatagtaggagaaataatagaatatagacagcttatgaagcttaaatctacgtacatagatggcttcattcccatcatggatgaaaataatagggtccactctacgtttaaacaaacagttgctgctacagggagaattagctcaacagagcctaatctgcagaacatacctgtaagagaagaatttggcaggaggataagaaaggcatttgtatcaagttatgaagatgggcttataatatctgctgattattctcagattgagctaagggttcttgcacatctttcagaggatgaaaaacttattgagtcatttttgaacaacgaagatatacatttaaggacggcatcggaggtttttaaggtttcgaaagaagaagtgacaagtgaaatgagaaggcgggcgaaagctgtcaactttggtattgtatatggtataagcgattacggcttatctaaagacttaaagatttcgcgaaaagaagcgaaagaatacatagacaattattttgacaggtacaagggcgtcaaaaattacatcgactcaattgtcaaatttgcaaaggaaaatgggtatgttacgactatcttaaataggagaagatacataccggaaatcaattcaaaaaattttaaccaaagatcttttggcgagcttatggcaatgaatacacctattcaaggtagcgctgcggatataataaagatgtcgatggttaaagtatacaatgaattaaaggaaagaggattgaaatcaagacttattcttcaggtgcacgatgagcttataattgacacacatcctgatgaagttgaaatagtcaaggagcttctaaaatcaataatggaaaatatcataaagttgaaagttcctttagttgtagatatagggcaagggaaaaactggtatgatgcaaaataaaaggatcc

SEQ ID NO: 921 - DNA, 2678 bp, Artificial Sequence
  Description of Artificial Sequence: Synthetic Clostridium thermosulfurogenes DNA Polymerase R802K
atgaaatacctgctgccgaccgctgctgctggtctgctgctcctcgctgcccagccggcgatggccatggcgaaatttttgatcatagatggtaatagcttgatgtacagggcgtattttgccctgcctgatttgatgaacagcgaaggaatgcatacaaatgccatatacggtttttcaatgatgcttcttaaattgctggaggaggagaaaccagactacatagcaatagctttcgataaaaaggcttctacatttaggcacaaggagtacagtgcttataaaggaacccgccagtcgatgccagaagagctgatagaacaggtggatattttaaaagatgtgataaatgcatttaacataaagaccatcgagatagagggatttgaagcagatgatatcattggtacagtatcaaaaattgcttccgaaagtgggatggatgtgcttatcgtcacaggcgacagagatgcgcttcagcttgtgtcggcaaatgtaaaagtaaaaatatgtaaaaaaggcataacgcagatggatgagtacgatgaaaaggcggtctttgaaaagtatgaagtgacgccgcttcaattcatagacttgaaagggcttatgggagacaaatcagacaacattccaggagtgcccaatataggggagaagacggccataaagcttgttaaagaatttggatcaattgaaaatttactgatgaatacagataagttaaaagggaaaataaaagaaaatgtagaaaacaatgcagaattagctgttttaagcaaacggcttgctacgattgagagaaatgttcctattgatattgatttgaatgaatacgcggttaaaaattacgatgtcaataagcttacagagctatttgaaaaattggaattttcaagcctcatctcagatttaaaagatgatagtcgtgatacaaaggatattaaagaatggcctgtaagagattttacatacgttaaaaatgttttaggaaagtttgatgttttgtcattgtatccattcatatatgatggaaagataaaagcagtatcatttgcttgcggtgacggatcgttttttgtagagattgatgattatgacaattttaaattgcttaataatgataagcttacgttgataggacacgatctgaaagattttttagtaaacatttcatactgcggtattgaacttaattgtaagattttagatacggccataatgacttatcttttaaatccgtctgagtcgaattacgacataagtcgcgtattgaaaaaatacttgaaagaggatttgcaaaacatagatgatatagtaggcaagggcaggaataaaaagagctacgatgacattgacaaaaagcttttagtcgattatatgtgttcagccgcatcaaacttatctaagttaaaagataagctcatgtcatttataaaagagatggagatggaagatcttttaaaaaatgtggaaattccgcttattgaagtgctaaaatctatggaggtgtacggctttacattagataaagatgtacttagaagtatttctaaagaaatagatgaaaagacagataagattgtaaaagatatttacgatgctgctggatacgaatttaatattaactctacaaagcagttatcagaatttttgtttgataaactgaatttgccagcaataaaaaagactaaaacagggtattcgactgacatggaagtccttgcagaacttataccgtacaatgacatagtaggagaaataatagaatatagacagcttatgaagcttaaatctacgtacatagatggcttcattcccatcatggatgaaaataatagggtccactctacgtttaaacaaacagttgctgctacagggagaattagctcaacagagcctaatctgcagaacatacctgtaagagaagaatttggcaggaggataagaaaggcatttgtatcaagttatgaagatgggcttataatatctgctgattattctcagattgagctaagggttcttgcacatctttcagaggatgaaaaacttattgagtcatttttgaacaacgaagatatacatttaaggacggcatcggaggtttttaaggtttcgaaagaagaagtgacaagtgaaatgagaaggcgggcgaaagctgtcaactttggtattgtatatggtataagcgattacggcttatctaaagacttaaagatttcgcgaaaagaagcgaaagaatacatagacaattattttgacaggtacaagggcgtcaaaaattacatcgactcaattgtcaaatttgcaaaggaaaatgggtatgttacgactatcttaaataggagaagatacataccggaaatcaattcaaaaaattttaaccaaagatcttttggcgagaaaatggcaatgaatacacctattcaaggtagcgctgcggatataataaagatgtcgatggttaaagtatacaatgaattaaaggaaagaggattgaaatcaagacttattcttcaggtgcacgatgagcttataattgacacacatcctgatgaagttgaaatagtcaaggagcttctaaaatcaataatggaaaatatcataaagttgaaagttcctttagttgtagatatagggcaagggaaaaactggtatgatgcaaaataaaaggatcc

SEQ ID NO: 922 - DNA, 2678 bp, Artificial Sequence
  Description of Artificial Sequence: Synthetic Clostridium thermosulfurogenes DNA Polymerase R802M
atgaaatacctgctgccgaccgctgctgctggtctgctgctcctcgctgcccagccggcgatggccatggcgaaatttttgatcatagatggtaatagcttgatgtacagggcgtattttgccctgcctgatttgatgaacagcgaaggaatgcatacaaatgccatatacggtttttcaatgatgcttcttaaattgctggaggaggagaaaccagactacatagcaatagctttcgataaaaaggcttctacatttaggcacaaggagtacagtgcttataaaggaacccgccagtcgatgccagaagagctgatagaacaggtggatattttaaaagatgtgataaatgcatttaacataaagaccatcgagatagagggatttgaagcagatgatatcattggtacagtatcaaaaattgcttccgaaagtgggatggatgtgcttatcgtcacaggcgacagagatgcgcttcagcttgtgtcggcaaatgtaaaagtaaaaatatgtaaaaaaggcataacgcagatggatgagtacgatgaaaaggcggtctttgaaaagtatgaagtgacgccgcttcaattcatagacttgaaagggcttatgggagacaaatcagacaacattccaggagtgcccaatataggggagaagacggccataaagcttgttaaagaatttggatcaattgaaaatttactgatgaatacagataagttaaaagggaaaataaaagaaaatgtagaaaacaatgcagaattagctgttttaagcaaacggcttgctacgattgagagaaatgttcctattgatattgatttgaatgaatacgcggttaaaaattacgatgtcaataagcttacagagctatttgaaaaattggaattttcaagcctcatctcagatttaaaagatgatagtcgtgatacaaaggatattaaagaatggcctgtaagagattttacatacgttaaaaatgttttaggaaagtttgatgttttgtcattgtatccattcatatatgatggaaagataaaagcagtatcatttgcttgcggtgacggatcgttttttgtagagattgatgattatgacaattttaaattgcttaataatgataagcttacgttgataggacacgatctgaaagattttttagtaaacatttcatactgcggtattgaacttaattgtaagattttagatacggccataatgacttatcttttaaatccgtctgagtcgaattacgacataagtcgcgtattgaaaaaatacttgaaagaggatttgcaaaacatagatgatatagtaggcaagggcaggaataaaaagagctacgatgacattgacaaaaagcttttagtcgattatatgtgttcagccgcatcaaacttatctaagttaaaagataagctcatgtcatttataaaagagatggagatggaagatcttttaaaaaatgtggaaattccgcttattgaagtgctaaaatctatggaggtgtacggctttacattagataaagatgtacttagaagtatttctaaagaaatagatgaaaagacagataagattgtaaaagatatttacgatgctgctggatacgaatttaatattaactctacaaagcagttatcagaatttttgtttgataaactgaatttgccagcaataaaaaagactaaaacagggtattcgactgacatggaagtccttgcagaacttataccgtacaatgacatagtaggagaaataatagaatatagacagcttatgaagcttaaatctacgtacatagatggcttcattcccatcatggatgaaaataatagggtccactctacgtttaaacaaacagttgctgctacagggagaattagctcaacagagcctaatctgcagaacatacctgtaagagaagaatttggcaggaggataagaaaggcatttgtatcaagttatgaagatgggcttataatatctgctgattattctcagattgagctaagggttcttgcacatctttcagaggatgaaaaacttattgagtcatttttgaacaacgaagatatacatttaaggacggcatcggaggtttttaaggtttcgaaagaagaagtgacaagtgaaatgagaaggcgggcgaaagctgtcaactttggtattgtatatggtataagcgattacggcttatctaaagacttaaagatttcgcgaaaagaagcgaaagaatacatagacaattattttgacaggtacaagggcgtcaaaaattacatcgactcaattgtcaaatttgcaaaggaaaatgggtatgttacgactatcttaaataggagaagatacataccggaaatcaattcaaaaaattttaaccaaagatcttttggcgagatgatggcaatgaatacacctattcaaggtagcgctgcggatataataaagatgtcgatggttaaagtatacaatgaattaaaggaaagaggattgaaatcaagacttattcttcaggtgcacgatgagcttataattgacacacatcctgatgaagttgaaatagtcaaggagcttctaaaatcaataatggaaaatatcataaagttgaaagttcctttagttgtagatatagggcaagggaaaaactggtatgatgcaaaataaaaggatcc

SEQ ID NO: 923 - DNA, 2670 bp, Artificial Sequence
  Description of Artificial Sequence: Synthetic Clostridium thermosulfurogenes DNA Polymerase R802F
atgaaatacctgctgccgaccgctgctgctggtctgctgctcctcgctgcccagccggcgatggccatggcgaaatttttgatcatagatggtaatagcttgatgtacagggcgtattttgccctgcctgatttgatgaacagcgaaggaatgcatacaaatgccatatacggtttttcaatgatgcttcttaaattgctggaggaggagaaaccagactacatagcaatagctttcgataaaaaggcttctacatttaggcacaaggagtacagtgcttataaaggaacccgccagtcgatgccagaagagctgatagaacaggtggatattttaaaagatgtgataaatgcatttaacataaagaccatcgagatagagggatttgaagcagatgatatcattggtacagtatcaaaaattgcttccgaaagtgggatggatgtgcttatcgtcacaggcgacagagatgcgcttcagcttgtgtcggcaaatgtaaaagtaaaaatatgtaaaaaaggcataacgcagatggatgagtacgatgaaaaggcggtctttgaaaagtatgaagtgacgccgcttcaattcatagacttgaaagggcttatgggagacaaatcagacaacattccaggagtgcccaatataggggagaagacggccataaagcttgttaaagaatttggatcaattgaaaatttactgatgaatacagataagttaaaagggaaaataaaagaaaatgtagaaaacaatgcagaattagctgttttaagcaaacggcttgctacgattgagagaaatgttcctattgatattgatttgaatgaatacgcggttaaaaattacgatgtcaataagcttacagagctatttgaaaaattggaattttcaagcctcatctcagatttaaaagatgatagtcgtgatacaaaggatattaaagaatggcctgtaagagattttacatacgttaaaaatgttttaggaaagtttgatgttttgtcattgtatccattcatatatgatggaaagataaaagcagtatcatttgcttgcggtgacggatcgttttttgtagagattgatgattatgacaattttaaattgcttaataatgataagcttacgttgataggacacgatctgaaagattttttagtaaacatttcatactgcggtattgaacttaattgtaagattttagatacggccataatgacttatcttttaaatccgtctgagtcgaattacgacataagtcgcgtattgaaaaaatacttgaaagaggatttgcaaaacatagatgatatagtaggcaagggcaggaataaaaagagctacgatgacattgacaaaaagcttttagtcgattatatgtgttcagccgcatcaaacttatctaagttaaaagataagctcatgtcatttataaaagagatggagatggaagatcttttaaaaaatgtggaaattccgcttattgaagtgctaaaatctatggaggtgtacggctttacattagataaagatgtacttagaagtatttctaaagaaatagatgaaaagacagataagattgtaaaagatatttacgatgctgctggatacgaatttaatattaactctacaaagcagttatcagaatttttgtttgataaactgaatttgccagcaataaaaaagactaaaacagggtattcgactgacatggaagtccttgcagaacttataccgtacaatgacatagtaggagaaataatagaatatagacagcttatgaagcttaaatctacgtacatagatggcttcattcccatcatggatgaaaataatagggtccactctacgtttaaacaaacagttgctgctacagggagaattagctcaacagagcctaatctgcagaacatacctgtaagagaagaatttggcaggaggataagaaaggcatttgtatcaagttatgaagatgggcttataatatctgctgattattctcagattgagctaagggttcttgcacatctttcagaggatgaaaaacttattgagtcatttttgaacaacgaagatatacatttaaggacggcatcggaggtttttaaggtttcgaaagaagaagtgacaagtgaaatgagaaggcgggcgaaagctgtcaactttggtattgtatatggtataagcgattacggcttatctaaagacttaaagatttcgcgaaaagaagcgaaagaatacatagacaattattttgacaggtacaagggcgtcaaaaattacatcgactcaattgtcaaatttgcaaaggaaaatgggtatgttacgactatcttaaataggagaagatacataccggaaatcaattcaaaaaattttaaccaaagatcttttggcgagtttatggcaatgaatacacctattcaaggtagcgctgcggatataataaagatgtcgatggttaaagtatacaatgaattaaaggaaagaggattgaaatcaagacttattcttcaggtgcacgatgagcttataattgacacacatcctgatgaagttgaaatagtcaaggagcttctaaaatcaataatggaaaatatcataaagttgaaagttcctttagttgtagatatagggcaagggaaaaactggtatgatgcaaaataa

SEQ ID NO: 924 - DNA, 2678 bp, Artificial Sequence
  Description of Artificial Sequence: Synthetic Clostridium thermosulfurogenes DNA Polymerase R802P
atgaaatacctgctgccgaccgctgctgctggtctgctgctcctcgctgcccagccggcgatggccatggcgaaatttttgatcatagatggtaatagcttgatgtacagggcgtattttgccctgcctgatttgatgaacagcgaaggaatgcatacaaatgccatatacggtttttcaatgatgcttcttaaattgctggaggaggagaaaccagactacatagcaatagctttcgataaaaaggcttctacatttaggcacaaggagtacagtgcttataaaggaacccgccagtcgatgccagaagagctgatagaacaggtggatattttaaaagatgtgataaatgcatttaacataaagaccatcgagatagagggatttgaagcagatgatatcattggtacagtatcaaaaattgcttccgaaagtgggatggatgtgcttatcgtcacaggcgacagagatgcgcttcagcttgtgtcggcaaatgtaaaagtaaaaatatgtaaaaaaggcataacgcagatggatgagtacgatgaaaaggcggtctttgaaaagtatgaagtgacgccgcttcaattcatagacttgaaagggcttatgggagacaaatcagacaacattccaggagtgcccaatataggggagaagacggccataaagcttgttaaagaatttggatcaattgaaaatttactgatgaatacagataagttaaaagggaaaataaaagaaaatgtagaaaacaatgcagaattagctgttttaagcaaacggcttgctacgattgagagaaatgttcctattgatattgatttgaatgaatacgcggttaaaaattacgatgtcaataagcttacagagctatttgaaaaattggaattttcaagcctcatctcagatttaaaagatgatagtcgtgatacaaaggatattaaagaatggcctgtaagagattttacatacgttaaaaatgttttaggaaagtttgatgttttgtcattgtatccattcatatatgatggaaagataaaagcagtatcatttgcttgcggtgacggatcgttttttgtagagattgatgattatgacaattttaaattgcttaataatgataagcttacgttgataggacacgatctgaaagattttttagtaaacatttcatactgcggtattgaacttaattgtaagattttagatacggccataatgacttatcttttaaatccgtctgagtcgaattacgacataagtcgcgtattgaaaaaatacttgaaagaggatttgcaaaacatagatgatatagtaggcaagggcaggaataaaaagagctacgatgacattgacaaaaagcttttagtcgattatatgtgttcagccgcatcaaacttatctaagttaaaagataagctcatgtcatttataaaagagatggagatggaagatcttttaaaaaatgtggaaattccgcttattgaagtgctaaaatctatggaggtgtacggctttacattagataaagatgtacttagaagtatttctaaagaaatagatgaaaagacagataagattgtaaaagatatttacgatgctgctggatacgaatttaatattaactctacaaagcagttatcagaatttttgtttgataaactgaatttgccagcaataaaaaagactaaaacagggtattcgactgacatggaagtccttgcagaacttataccgtacaatgacatagtaggagaaataatagaatatagacagcttatgaagcttaaatctacgtacatagatggcttcattcccatcatggatgaaaataatagggtccactctacgtttaaacaaacagttgctgctacagggagaattagctcaacagagcctaatctgcagaacatacctgtaagagaagaatttggcaggaggataagaaaggcatttgtatcaagttatgaagatgggcttataatatctgctgattattctcagattgagctaagggttcttgcacatctttcagaggatgaaaaacttattgagtcatttttgaacaacgaagatatacatttaaggacggcatcggaggtttttaaggtttcgaaagaagaagtgacaagtgaaatgagaaggcgggcgaaagctgtcaactttggtattgtatatggtataagcgattacggcttatctaaagacttaaagatttcgcgaaaagaagcgaaagaatacatagacaattattttgacaggtacaagggcgtcaaaaattacatcgactcaattgtcaaatttgcaaaggaaaatgggtatgttacgactatcttaaataggagaagatacataccggaaatcaattcaaaaaattttaaccaaagatcttttggcgagcctatggcaatgaatacacctattcaaggtagcgctgcggatataataaagatgtcgatggttaaagtatacaatgaattaaaggaaagaggattgaaatcaagacttattcttcaggtgcacgatgagcttataattgacacacatcctgatgaagttgaaatagtcaaggagcttctaaaatcaataatggaaaatatcataaagttgaaagttcctttagttgtagatatagggcaagggaaaaactggtatgatgcaaaataaaaggatcc

SEQ ID NO: 925 - DNA, 2678 bp, Artificial Sequence
  Description of Artificial Sequence: Synthetic Clostridium thermosulfurogenes DNA Polymerase R802S
atgaaatacctgctgccgaccgctgctgctggtctgctgctcctcgctgcccagccggcgatggccatggcgaaatttttgatcatagatggtaatagcttgatgtacagggcgtattttgccctgcctgatttgatgaacagcgaaggaatgcatacaaatgccatatacggtttttcaatgatgcttcttaaattgctggaggaggagaaaccagactacatagcaatagctttcgataaaaaggcttctacatttaggcacaaggagtacagtgcttataaaggaacccgccagtcgatgccagaagagctgatagaacaggtggatattttaaaagatgtgataaatgcatttaacataaagaccatcgagatagagggatttgaagcagatgatatcattggtacagtatcaaaaattgcttccgaaagtgggatggatgtgcttatcgtcacaggcgacagagatgcgcttcagcttgtgtcggcaaatgtaaaagtaaaaatatgtaaaaaaggcataacgcagatggatgagtacgatgaaaaggcggtctttgaaaagtatgaagtgacgccgcttcaattcatagacttgaaagggcttatgggagacaaatcagacaacattccaggagtgcccaatataggggagaagacggccataaagcttgttaaagaatttggatcaattgaaaatttactgatgaatacagataagttaaaagggaaaataaaagaaaatgtagaaaacaatgcagaattagctgttttaagcaaacggcttgctacgattgagagaaatgttcctattgatattgatttgaatgaatacgcggttaaaaattacgatgtcaataagcttacagagctatttgaaaaattggaattttcaagcctcatctcagatttaaaagatgatagtcgtgatacaaaggatattaaagaatggcctgtaagagattttacatacgttaaaaatgttttaggaaagtttgatgttttgtcattgtatccattcatatatgatggaaagataaaagcagtatcatttgcttgcggtgacggatcgttttttgtagagattgatgattatgacaattttaaattgcttaataatgataagcttacgttgataggacacgatctgaaagattttttagtaaacatttcatactgcggtattgaacttaattgtaagattttagatacggccataatgacttatcttttaaatccgtctgagtcgaattacgacataagtcgcgtattgaaaaaatacttgaaagaggatttgcaaaacatagatgatatagtaggcaagggcaggaataaaaagagctacgatgacattgacaaaaagcttttagtcgattatatgtgttcagccgcatcaaacttatctaagttaaaagataagctcatgtcatttataaaagagatggagatggaagatcttttaaaaaatgtggaaattccgcttattgaagtgctaaaatctatggaggtgtacggctttacattagataaagatgtacttagaagtatttctaaagaaatagatgaaaagacagataagattgtaaaagatatttacgatgctgctggatacgaatttaatattaactctacaaagcagttatcagaatttttgtttgataaactgaatttgccagcaataaaaaagactaaaacagggtattcgactgacatggaagtccttgcagaacttataccgtacaatgacatagtaggagaaataatagaatatagacagcttatgaagcttaaatctacgtacatagatggcttcattcccatcatggatgaaaataatagggtccactctacgtttaaacaaacagttgctgctacagggagaattagctcaacagagcctaatctgcagaacatacctgtaagagaagaatttggcaggaggataagaaaggcatttgtatcaagttatgaagatgggcttataatatctgctgattattctcagattgagctaagggttcttgcacatctttcagaggatgaaaaacttattgagtcatttttgaacaacgaagatatacatttaaggacggcatcggaggtttttaaggtttcgaaagaagaagtgacaagtgaaatgagaaggcgggcgaaagctgtcaactttggtattgtatatggtataagcgattacggcttatctaaagacttaaagatttcgcgaaaagaagcgaaagaatacatagacaattattttgacaggtacaagggcgtcaaaaattacatcgactcaattgtcaaatttgcaaaggaaaatgggtatgttacgactatcttaaataggagaagatacataccggaaatcaattcaaaaaattttaaccaaagatcttttggcgagtctatggcaatgaatacacctattcaaggtagcgctgcggatataataaagatgtcgatggttaaagtatacaatgaattaaaggaaagaggattgaaatcaagacttattcttcaggtgcacgatgagcttataattgacacacatcctgatgaagttgaaatagtcaaggagcttctaaaatcaataatggaaaatatcataaagttgaaagttcctttagttgtagatatagggcaagggaaaaactggtatgatgcaaaataaaaggatcc

SEQ ID NO: 926 - DNA, 2678 bp, Artificial Sequence
  Description of Artificial Sequence: Synthetic Clostridium thermosulfurogenes DNA Polymerase R802T
atgaaatacctgctgccgaccgctgctgctggtctgctgctcctcgctgcccagccggcgatggccatggcgaaatttttgatcatagatggtaatagcttgatgtacagggcgtattttgccctgcctgatttgatgaacagcgaaggaatgcatacaaatgccatatacggtttttcaatgatgcttcttaaattgctggaggaggagaaaccagactacatagcaatagctttcgataaaaaggcttctacatttaggcacaaggagtacagtgcttataaaggaacccgccagtcgatgccagaagagctgatagaacaggtggatattttaaaagatgtgataaatgcatttaacataaagaccatcgagatagagggatttgaagcagatgatatcattggtacagtatcaaaaattgcttccgaaagtgggatggatgtgcttatcgtcacaggcgacagagatgcgcttcagcttgtgtcggcaaatgtaaaagtaaaaatatgtaaaaaaggcataacgcagatggatgagtacgatgaaaaggcggtctttgaaaagtatgaagtgacgccgcttcaattcatagacttgaaagggcttatgggagacaaatcagacaacattccaggagtgcccaatataggggagaagacggccataaagcttgttaaagaatttggatcaattgaaaatttactgatgaatacagataagttaaaagggaaaataaaagaaaatgtagaaaacaatgcagaattagctgttttaagcaaacggcttgctacgattgagagaaatgttcctattgatattgatttgaatgaatacgcggttaaaaattacgatgtcaataagcttacagagctatttgaaaaattggaattttcaagcctcatctcagatttaaaagatgatagtcgtgatacaaaggatattaaagaatggcctgtaagagattttacatacgttaaaaatgttttaggaaagtttgatgttttgtcattgtatccattcatatatgatggaaagataaaagcagtatcatttgcttgcggtgacggatcgttttttgtagagattgatgattatgacaattttaaattgcttaataatgataagcttacgttgataggacacgatctgaaagattttttagtaaacatttcatactgcggtattgaacttaattgtaagattttagatacggccataatgacttatcttttaaatccgtctgagtcgaattacgacataagtcgcgtattgaaaaaatacttgaaagaggatttgcaaaacatagatgatatagtaggcaagggcaggaataaaaagagctacgatgacattgacaaaaagcttttagtcgattatatgtgttcagccgcatcaaacttatctaagttaaaagataagctcatgtcatttataaaagagatggagatggaagatcttttaaaaaatgtggaaattccgcttattgaagtgctaaaatctatggaggtgtacggctttacattagataaagatgtacttagaagtatttctaaagaaatagatgaaaagacagataagattgtaaaagatatttacgatgctgctggatacgaatttaatattaactctacaaagcagttatcagaatttttgtttgataaactgaatttgccagcaataaaaaagactaaaacagggtattcgactgacatggaagtccttgcagaacttataccgtacaatgacatagtaggagaaataatagaatatagacagcttatgaagcttaaatctacgtacatagatggcttcattcccatcatggatgaaaataatagggtccactctacgtttaaacaaacagttgctgctacagggagaattagctcaacagagcctaatctgcagaacatacctgtaagagaagaatttggcaggaggataagaaaggcatttgtatcaagttatgaagatgggcttataatatctgctgattattctcagattgagctaagggttcttgcacatctttcagaggatgaaaaacttattgagtcatttttgaacaacgaagatatacatttaaggacggcatcggaggtttttaaggtttcgaaagaagaagtgacaagtgaaatgagaaggcgggcgaaagctgtcaactttggtattgtatatggtataagcgattacggcttatctaaagacttaaagatttcgcgaaaagaagcgaaagaatacatagacaattattttgacaggtacaagggcgtcaaaaattacatcgactcaattgtcaaatttgcaaaggaaaatgggtatgttacgactatcttaaataggagaagatacataccggaaatcaattcaaaaaattttaaccaaagatcttttggcgagactatggcaatgaatacacctattcaaggtagcgctgcggatataataaagatgtcgatggttaaagtatacaatgaattaaaggaaagaggattgaaatcaagacttattcttcaggtgcacgatgagcttataattgacacacatcctgatgaagttgaaatagtcaaggagcttctaaaatcaataatggaaaatatcataaagttgaaagttcctttagttgtagatatagggcaagggaaaaactggtatgatgcaaaataaaaggatcc

SEQ ID NO: 927 - DNA, 2678 bp, Artificial Sequence
  Description of Artificial Sequence: Synthetic Clostridium thermosulfurogenes DNA Polymerase R802W
atgaaatacctgctgccgaccgctgctgctggtctgctgctcctcgctgcccagccggcgatggccatggcgaaatttttgatcatagatggtaatagcttgatgtacagggcgtattttgccctgcctgatttgatgaacagcgaaggaatgcatacaaatgccatatacggtttttcaatgatgcttcttaaattgctggaggaggagaaaccagactacatagcaatagctttcgataaaaaggcttctacatttaggcacaaggagtacagtgcttataaaggaacccgccagtcgatgccagaagagctgatagaacaggtggatattttaaaagatgtgataaatgcatttaacataaagaccatcgagatagagggatttgaagcagatgatatcattggtacagtatcaaaaattgcttccgaaagtgggatggatgtgcttatcgtcacaggcgacagagatgcgcttcagcttgtgtcggcaaatgtaaaagtaaaaatatgtaaaaaaggcataacgcagatggatgagtacgatgaaaaggcggtctttgaaaagtatgaagtgacgccgcttcaattcatagacttgaaagggcttatgggagacaaatcagacaacattccaggagtgcccaatataggggagaagacggccataaagcttgttaaagaatttggatcaattgaaaatttactgatgaatacagataagttaaaagggaaaataaaagaaaatgtagaaaacaatgcagaattagctgttttaagcaaacggcttgctacgattgagagaaatgttcctattgatattgatttgaatgaatacgcggttaaaaattacgatgtcaataagcttacagagctatttgaaaaattggaattttcaagcctcatctcagatttaaaagatgatagtcgtgatacaaaggatattaaagaatggcctgtaagagattttacatacgttaaaaatgttttaggaaagtttgatgttttgtcattgtatccattcatatatgatggaaagataaaagcagtatcatttgcttgcggtgacggatcgttttttgtagagattgatgattatgacaattttaaattgcttaataatgataagcttacgttgataggacacgatctgaaagattttttagtaaacatttcatactgcggtattgaacttaattgtaagattttagatacggccataatgacttatcttttaaatccgtctgagtcgaattacgacataagtcgcgtattgaaaaaatacttgaaagaggatttgcaaaacatagatgatatagtaggcaagggcaggaataaaaagagctacgatgacattgacaaaaagcttttagtcgattatatgtgttcagccgcatcaaacttatctaagttaaaagataagctcatgtcatttataaaagagatggagatggaagatcttttaaaaaatgtggaaattccgcttattgaagtgctaaaatctatggaggtgtacggctttacattagataaagatgtacttagaagtatttctaaagaaatagatgaaaagacagataagattgtaaaagatatttacgatgctgctggatacgaatttaatattaactctacaaagcagttatcagaatttttgtttgataaactgaatttgccagcaataaaaaagactaaaacagggtattcgactgacatggaagtccttgcagaacttataccgtacaatgacatagtaggagaaataatagaatatagacagcttatgaagcttaaatctacgtacatagatggcttcattcccatcatggatgaaaataatagggtccactctacgtttaaacaaacagttgctgctacagggagaattagctcaacagagcctaatctgcagaacatacctgtaagagaagaatttggcaggaggataagaaaggcatttgtatcaagttatgaagatgggcttataatatctgctgattattctcagattgagctaagggttcttgcacatctttcagaggatgaaaaacttattgagtcatttttgaacaacgaagatatacatttaaggacggcatcggaggtttttaaggtttcgaaagaagaagtgacaagtgaaatgagaaggcgggcgaaagctgtcaactttggtattgtatatggtataagcgattacggcttatctaaagacttaaagatttcgcgaaaagaagcgaaagaatacatagacaattattttgacaggtacaagggcgtcaaaaattacatcgactcaattgtcaaatttgcaaaggaaaatgggtatgttacgactatcttaaataggagaagatacataccggaaatcaattcaaaaaattttaaccaaagatcttttggcgagtggatggcaatgaatacacctattcaaggtagcgctgcggatataataaagatgtcgatggttaaagtatacaatgaattaaaggaaagaggattgaaatcaagacttattcttcaggtgcacgatgagcttataattgacacacatcctgatgaagttgaaatagtcaaggagcttctaaaatcaataatggaaaatatcataaagttgaaagttcctttagttgtagatatagggcaagggaaaaactggtatgatgcaaaataaaaggatcc

SEQ ID NO: 928 - DNA, 2678 bp, Artificial Sequence
  Description of Artificial Sequence: Synthetic Clostridium thermosulfurogenes DNA Polymerase R802Y
atgaaatacctgctgccgaccgctgctgctggtctgctgctcctcgctgcccagccggcgatggccatggcgaaatttttgatcatagatggtaatagcttgatgtacagggcgtattttgccctgcctgatttgatgaacagcgaaggaatgcatacaaatgccatatacggtttttcaatgatgcttcttaaattgctggaggaggagaaaccagactacatagcaatagctttcgataaaaaggcttctacatttaggcacaaggagtacagtgcttataaaggaacccgccagtcgatgccagaagagctgatagaacaggtggatattttaaaagatgtgataaatgcatttaacataaagaccatcgagatagagggatttgaagcagatgatatcattggtacagtatcaaaaattgcttccgaaagtgggatggatgtgcttatcgtcacaggcgacagagatgcgcttcagcttgtgtcggcaaatgtaaaagtaaaaatatgtaaaaaaggcataacgcagatggatgagtacgatgaaaaggcggtctttgaaaagtatgaagtgacgccgcttcaattcatagacttgaaagggcttatgggagacaaatcagacaacattccaggagtgcccaatataggggagaagacggccataaagcttgttaaagaatttggatcaattgaaaatttactgatgaatacagataagttaaaagggaaaataaaagaaaatgtagaaaacaatgcagaattagctgttttaagcaaacggcttgctacgattgagagaaatgttcctattgatattgatttgaatgaatacgcggttaaaaattacgatgtcaataagcttacagagctatttgaaaaattggaattttcaagcctcatctcagatttaaaagatgatagtcgtgatacaaaggatattaaagaatggcctgtaagagattttacatacgttaaaaatgttttaggaaagtttgatgttttgtcattgtatccattcatatatgatggaaagataaaagcagtatcatttgcttgcggtgacggatcgttttttgtagagattgatgattatgacaattttaaattgcttaataatgataagcttacgttgataggacacgatctgaaagattttttagtaaacatttcatactgcggtattgaacttaattgtaagattttagatacggccataatgacttatcttttaaatccgtctgagtcgaattacgacataagtcgcgtattgaaaaaatacttgaaagaggatttgcaaaacatagatgatatagtaggcaagggcaggaataaaaagagctacgatgacattgacaaaaagcttttagtcgattatatgtgttcagccgcatcaaacttatctaagttaaaagataagctcatgtcatttataaaagagatggagatggaagatcttttaaaaaatgtggaaattccgcttattgaagtgctaaaatctatggaggtgtacggctttacattagataaagatgtacttagaagtatttctaaagaaatagatgaaaagacagataagattgtaaaagatatttacgatgctgctggatacgaatttaatattaactctacaaagcagttatcagaatttttgtttgataaactgaatttgccagcaataaaaaagactaaaacagggtattcgactgacatggaagtccttgcagaacttataccgtacaatgacatagtaggagaaataatagaatatagacagcttatgaagcttaaatctacgtacatagatggcttcattcccatcatggatgaaaataatagggtccactctacgtttaaacaaacagttgctgctacagggagaattagctcaacagagcctaatctgcagaacatacctgtaagagaagaatttggcaggaggataagaaaggcatttgtatcaagttatgaagatgggcttataatatctgctgattattctcagattgagctaagggttcttgcacatctttcagaggatgaaaaacttattgagtcatttttgaacaacgaagatatacatttaaggacggcatcggaggtttttaaggtttcgaaagaagaagtgacaagtgaaatgagaaggcgggcgaaagctgtcaactttggtattgtatatggtataagcgattacggcttatctaaagacttaaagatttcgcgaaaagaagcgaaagaatacatagacaattattttgacaggtacaagggcgtcaaaaattacatcgactcaattgtcaaatttgcaaaggaaaatgggtatgttacgactatcttaaataggagaagatacataccggaaatcaattcaaaaaattttaaccaaagatcttttggcgagtatatggcaatgaatacacctattcaaggtagcgctgcggatataataaagatgtcgatggttaaagtatacaatgaattaaaggaaagaggattgaaatcaagacttattcttcaggtgcacgatgagcttataattgacacacatcctgatgaagttgaaatagtcaaggagcttctaaaatcaataatggaaaatatcataaagttgaaagttcctttagttgtagatatagggcaagggaaaaactggtatgatgcaaaataaaaggatcc

SEQ ID NO: 929 - DNA, 2678 bp, Artificial Sequence
  Description of Artificial Sequence: Synthetic Clostridium thermosulfurogenes DNA Polymerase R802V
atgaaatacctgctgccgaccgctgctgctggtctgctgctcctcgctgcccagccggcgatggccatggcgaaatttttgatcatagatggtaatagcttgatgtacagggcgtattttgccctgcctgatttgatgaacagcgaaggaatgcatacaaatgccatatacggtttttcaatgatgcttcttaaattgctggaggaggagaaaccagactacatagcaatagctttcgataaaaaggcttctacatttaggcacaaggagtacagtgcttataaaggaacccgccagtcgatgccagaagagctgatagaacaggtggatattttaaaagatgtgataaatgcatttaacataaagaccatcgagatagagggatttgaagcagatgatatcattggtacagtatcaaaaattgcttccgaaagtgggatggatgtgcttatcgtcacaggcgacagagatgcgcttcagcttgtgtcggcaaatgtaaaagtaaaaatatgtaaaaaaggcataacgcagatggatgagtacgatgaaaaggcggtctttgaaaagtatgaagtgacgccgcttcaattcatagacttgaaagggcttatgggagacaaatcagacaacattccaggagtgcccaatataggggagaagacggccataaagcttgttaaagaatttggatcaattgaaaatttactgatgaatacagataagttaaaagggaaaataaaagaaaatgtagaaaacaatgcagaattagctgttttaagcaaacggcttgctacgattgagagaaatgttcctattgatattgatttgaatgaatacgcggttaaaaattacgatgtcaataagcttacagagctatttgaaaaattggaattttcaagcctcatctcagatttaaaagatgatagtcgtgatacaaaggatattaaagaatggcctgtaagagattttacatacgttaaaaatgttttaggaaagtttgatgttttgtcattgtatccattcatatatgatggaaagataaaagcagtatcatttgcttgcggtgacggatcgttttttgtagagattgatgattatgacaattttaaattgcttaataatgataagcttacgttgataggacacgatctgaaagattttttagtaaacatttcatactgcggtattgaacttaattgtaagattttagatacggccataatgacttatcttttaaatccgtctgagtcgaattacgacataagtcgcgtattgaaaaaatacttgaaagaggatttgcaaaacatagatgatatagtaggcaagggcaggaataaaaagagctacgatgacattgacaaaaagcttttagtcgattatatgtgttcagccgcatcaaacttatctaagttaaaagataagctcatgtcatttataaaagagatggagatggaagatcttttaaaaaatgtggaaattccgcttattgaagtgctaaaatctatggaggtgtacggctttacattagataaagatgtacttagaagtatttctaaagaaatagatgaaaagacagataagattgtaaaagatatttacgatgctgctggatacgaatttaatattaactctacaaagcagttatcagaatttttgtttgataaactgaatttgccagcaataaaaaagactaaaacagggtattcgactgacatggaagtccttgcagaacttataccgtacaatgacatagtaggagaaataatagaatatagacagcttatgaagcttaaatctacgtacatagatggcttcattcccatcatggatgaaaataatagggtccactctacgtttaaacaaacagttgctgctacagggagaattagctcaacagagcctaatctgcagaacatacctgtaagagaagaatttggcaggaggataagaaaggcatttgtatcaagttatgaagatgggcttataatatctgctgattattctcagattgagctaagggttcttgcacatctttcagaggatgaaaaacttattgagtcatttttgaacaacgaagatatacatttaaggacggcatcggaggtttttaaggtttcgaaagaagaagtgacaagtgaaatgagaaggcgggcgaaagctgtcaactttggtattgtatatggtataagcgattacggcttatctaaagacttaaagatttcgcgaaaagaagcgaaagaatacatagacaattattttgacaggtacaagggcgtcaaaaattacatcgactcaattgtcaaatttgcaaaggaaaatgggtatgttacgactatcttaaataggagaagatacataccggaaatcaattcaaaaaattttaaccaaagatcttttggcgaggttatggcaatgaatacacctattcaaggtagcgctgcggatataataaagatgtcgatggttaaagtatacaatgaattaaaggaaagaggattgaaatcaagacttattcttcaggtgcacgatgagcttataattgacacacatcctgatgaagttgaaatagtcaaggagcttctaaaatcaataatggaaaatatcataaagttgaaagttcctttagttgtagatatagggcaagggaaaaactggtatgatgcaaaataaaaggatcc

SEQ ID NO: 930 - DNA, 2678 bp, Artificial Sequence
  Description of Artificial Sequence: Synthetic Clostridium thermosulfurogenes DNA Polymerase Q593A
atgaaatacctgctgccgaccgctgctgctggtctgctgctcctcgctgcccagccggcgatggccatggcgaaatttttgatcatagatggtaatagcttgatgtacagggcgtattttgccctgcctgatttgatgaacagcgaaggaatgcatacaaatgccatatacggtttttcaatgatgcttcttaaattgctggaggaggagaaaccagactacatagcaatagctttcgataaaaaggcttctacatttaggcacaaggagtacagtgcttataaaggaacccgccagtcgatgccagaagagctgatagaacaggtggatattttaaaagatgtgataaatgcatttaacataaagaccatcgagatagagggatttgaagcagatgatatcattggtacagtatcaaaaattgcttccgaaagtgggatggatgtgcttatcgtcacaggcgacagagatgcgcttcagcttgtgtcggcaaatgtaaaagtaaaaatatgtaaaaaaggcataacgcagatggatgagtacgatgaaaaggcggtctttgaaaagtatgaagtgacgccgcttcaattcatagacttgaaagggcttatgggagacaaatcagacaacattccaggagtgcccaatataggggagaagacggccataaagcttgttaaagaatttggatcaattgaaaatttactgatgaatacagataagttaaaagggaaaataaaagaaaatgtagaaaacaatgcagaattagctgttttaagcaaacggcttgctacgattgagagaaatgttcctattgatattgatttgaatgaatacgcggttaaaaattacgatgtcaataagcttacagagctatttgaaaaattggaattttcaagcctcatctcagatttaaaagatgatagtcgtgatacaaaggatattaaagaatggcctgtaagagattttacatacgttaaaaatgttttaggaaagtttgatgttttgtcattgtatccattcatatatgatggaaagataaaagcagtatcatttgcttgcggtgacggatcgttttttgtagagattgatgattatgacaattttaaattgcttaataatgataagcttacgttgataggacacgatctgaaagattttttagtaaacatttcatactgcggtattgaacttaattgtaagattttagatacggccataatgacttatcttttaaatccgtctgagtcgaattacgacataagtcgcgtattgaaaaaatacttgaaagaggatttgcaaaacatagatgatatagtaggcaagggcaggaataaaaagagctacgatgacattgacaaaaagcttttagtcgattatatgtgttcagccgcatcaaacttatctaagttaaaagataagctcatgtcatttataaaagagatggagatggaagatcttttaaaaaatgtggaaattccgcttattgaagtgctaaaatctatggaggtgtacggctttacattagataaagatgtacttagaagtatttctaaagaaatagatgaaaagacagataagattgtaaaagatatttacgatgctgctggatacgaatttaatattaactctacaaagcagttatcagaatttttgtttgataaactgaatttgccagcaataaaaaagactaaaacagggtattcgactgacatggaagtccttgcagaacttataccgtacaatgacatagtaggagaaataatagaatatagagctcttatgaagcttaaatctacgtacatagatggcttcattcccatcatggatgaaaataatagggtccactctacgtttaaacaaacagttgctgctacagggagaattagctcaacagagcctaatctgcagaacatacctgtaagagaagaatttggcaggaggataagaaaggcatttgtatcaagttatgaagatgggcttataatatctgctgattattctcagattgagctaagggttcttgcacatctttcagaggatgaaaaacttattgagtcatttttgaacaacgaagatatacatttaaggacggcatcggaggtttttaaggtttcgaaagaagaagtgacaagtgaaatgagaaggcgggcgaaagctgtcaactttggtattgtatatggtataagcgattacggcttatctaaagacttaaagatttcgcgaaaagaagcgaaagaatacatagacaattattttgacaggtacaagggcgtcaaaaattacatcgactcaattgtcaaatttgcaaaggaaaatgggtatgttacgactatcttaaataggagaagatacataccggaaatcaattcaaaaaattttaaccaaagatcttttggcgagagaatggcaatgaatacacctattcaaggtagcgctgcggatataataaagatgtcgatggttaaagtatacaatgaattaaaggaaagaggattgaaatcaagacttattcttcaggtgcacgatgagcttataattgacacacatcctgatgaagttgaaatagtcaaggagcttctaaaatcaataatggaaaatatcataaagttgaaagttcctttagttgtagatatagggcaagggaaaaactggtatgatgcaaaataaaaggatcc

SEQ ID NO: 931 - DNA, 2678 bp, Artificial Sequence
  Description of Artificial Sequence: Synthetic Clostridium thermosulfurogenes DNA Polymerase Q593C
atgaaatacctgctgccgaccgctgctgctggtctgctgctcctcgctgcccagccggcgatggccatggcgaaatttttgatcatagatggtaatagcttgatgtacagggcgtattttgccctgcctgatttgatgaacagcgaaggaatgcatacaaatgccatatacggtttttcaatgatgcttcttaaattgctggaggaggagaaaccagactacatagcaatagctttcgataaaaaggcttctacatttaggcacaaggagtacagtgcttataaaggaacccgccagtcgatgccagaagagctgatagaacaggtggatattttaaaagatgtgataaatgcatttaacataaagaccatcgagatagagggatttgaagcagatgatatcattggtacagtatcaaaaattgcttccgaaagtgggatggatgtgcttatcgtcacaggcgacagagatgcgcttcagcttgtgtcggcaaatgtaaaagtaaaaatatgtaaaaaaggcataacgcagatggatgagtacgatgaaaaggcggtctttgaaaagtatgaagtgacgccgcttcaattcatagacttgaaagggcttatgggagacaaatcagacaacattccaggagtgcccaatataggggagaagacggccataaagcttgttaaagaatttggatcaattgaaaatttactgatgaatacagataagttaaaagggaaaataaaagaaaatgtagaaaacaatgcagaattagctgttttaagcaaacggcttgctacgattgagagaaatgttcctattgatattgatttgaatgaatacgcggttaaaaattacgatgtcaataagcttacagagctatttgaaaaattggaattttcaagcctcatctcagatttaaaagatgatagtcgtgatacaaaggatattaaagaatggcctgtaagagattttacatacgttaaaaatgttttaggaaagtttgatgttttgtcattgtatccattcatatatgatggaaagataaaagcagtatcatttgcttgcggtgacggatcgttttttgtagagattgatgattatgacaattttaaattgcttaataatgataagcttacgttgataggacacgatctgaaagattttttagtaaacatttcatactgcggtattgaacttaattgtaagattttagatacggccataatgacttatcttttaaatccgtctgagtcgaattacgacataagtcgcgtattgaaaaaatacttgaaagaggatttgcaaaacatagatgatatagtaggcaagggcaggaataaaaagagctacgatgacattgacaaaaagcttttagtcgattatatgtgttcagccgcatcaaacttatctaagttaaaagataagctcatgtcatttataaaagagatggagatggaagatcttttaaaaaatgtggaaattccgcttattgaagtgctaaaatctatggaggtgtacggctttacattagataaagatgtacttagaagtatttctaaagaaatagatgaaaagacagataagattgtaaaagatatttacgatgctgctggatacgaatttaatattaactctacaaagcagttatcagaatttttgtttgataaactgaatttgccagcaataaaaaagactaaaacagggtattcgactgacatggaagtccttgcagaacttataccgtacaatgacatagtaggagaaataatagaatatagatgtcttatgaagcttaaatctacgtacatagatggcttcattcccatcatggatgaaaataatagggtccactctacgtttaaacaaacagttgctgctacagggagaattagctcaacagagcctaatctgcagaacatacctgtaagagaagaatttggcaggaggataagaaaggcatttgtatcaagttatgaagatgggcttataatatctgctgattattctcagattgagctaagggttcttgcacatctttcagaggatgaaaaacttattgagtcatttttgaacaacgaagatatacatttaaggacggcatcggaggtttttaaggtttcgaaagaagaagtgacaagtgaaatgagaaggcgggcgaaagctgtcaactttggtattgtatatggtataagcgattacggcttatctaaagacttaaagatttcgcgaaaagaagcgaaagaatacatagacaattattttgacaggtacaagggcgtcaaaaattacatcgactcaattgtcaaatttgcaaaggaaaatgggtatgttacgactatcttaaataggagaagatacataccggaaatcaattcaaaaaattttaaccaaagatcttttggcgagagaatggcaatgaatacacctattcaaggtagcgctgcggatataataaagatgtcgatggttaaagtatacaatgaattaaaggaaagaggattgaaatcaagacttattcttcaggtgcacgatgagcttataattgacacacatcctgatgaagttgaaatagtcaaggagcttctaaaatcaataatggaaaatatcataaagttgaaagttcctttagttgtagatatagggcaagggaaaaactggtatgatgcaaaataaaaggatcc

SEQ ID NO: 932 - DNA, 2678 bp, Artificial Sequence
  Description of Artificial Sequence: Synthetic Clostridium thermosulfurogenes DNA Polymerase Q593D
atgaaatacctgctgccgaccgctgctgctggtctgctgctcctcgctgcccagccggcgatggccatggcgaaatttttgatcatagatggtaatagcttgatgtacagggcgtattttgccctgcctgatttgatgaacagcgaaggaatgcatacaaatgccatatacggtttttcaatgatgcttcttaaattgctggaggaggagaaaccagactacatagcaatagctttcgataaaaaggcttctacatttaggcacaaggagtacagtgcttataaaggaacccgccagtcgatgccagaagagctgatagaacaggtggatattttaaaagatgtgataaatgcatttaacataaagaccatcgagatagagggatttgaagcagatgatatcattggtacagtatcaaaaattgcttccgaaagtgggatggatgtgcttatcgtcacaggcgacagagatgcgcttcagcttgtgtcggcaaatgtaaaagtaaaaatatgtaaaaaaggcataacgcagatggatgagtacgatgaaaaggcggtctttgaaaagtatgaagtgacgccgcttcaattcatagacttgaaagggcttatgggagacaaatcagacaacattccaggagtgcccaatataggggagaagacggccataaagcttgttaaagaatttggatcaattgaaaatttactgatgaatacagataagttaaaagggaaaataaaagaaaatgtagaaaacaatgcagaattagctgttttaagcaaacggcttgctacgattgagagaaatgttcctattgatattgatttgaatgaatacgcggttaaaaattacgatgtcaataagcttacagagctatttgaaaaattggaattttcaagcctcatctcagatttaaaagatgatagtcgtgatacaaaggatattaaagaatggcctgtaagagattttacatacgttaaaaatgttttaggaaagtttgatgttttgtcattgtatccattcatatatgatggaaagataaaagcagtatcatttgcttgcggtgacggatcgttttttgtagagattgatgattatgacaattttaaattgcttaataatgataagcttacgttgataggacacgatctgaaagattttttagtaaacatttcatactgcggtattgaacttaattgtaagattttagatacggccataatgacttatcttttaaatccgtctgagtcgaattacgacataagtcgcgtattgaaaaaatacttgaaagaggatttgcaaaacatagatgatatagtaggcaagggcaggaataaaaagagctacgatgacattgacaaaaagcttttagtcgattatatgtgttcagccgcatcaaacttatctaagttaaaagataagctcatgtcatttataaaagagatggagatggaagatcttttaaaaaatgtggaaattccgcttattgaagtgctaaaatctatggaggtgtacggctttacattagataaagatgtacttagaagtatttctaaagaaatagatgaaaagacagataagattgtaaaagatatttacgatgctgctggatacgaatttaatattaactctacaaagcagttatcagaatttttgtttgataaactgaatttgccagcaataaaaaagactaaaacagggtattcgactgacatggaagtccttgcagaacttataccgtacaatgacatagtaggagaaataatagaatatagagatcttatgaagcttaaatctacgtacatagatggcttcattcccatcatggatgaaaataatagggtccactctacgtttaaacaaacagttgctgctacagggagaattagctcaacagagcctaatctgcagaacatacctgtaagagaagaatttggcaggaggataagaaaggcatttgtatcaagttatgaagatgggcttataatatctgctgattattctcagattgagctaagggttcttgcacatctttcagaggatgaaaaacttattgagtcatttttgaacaacgaagatatacatttaaggacggcatcggaggtttttaaggtttcgaaagaagaagtgacaagtgaaatgagaaggcgggcgaaagctgtcaactttggtattgtatatggtataagcgattacggcttatctaaagacttaaagatttcgcgaaaagaagcgaaagaatacatagacaattattttgacaggtacaagggcgtcaaaaattacatcgactcaattgtcaaatttgcaaaggaaaatgggtatgttacgactatcttaaataggagaagatacataccggaaatcaattcaaaaaattttaaccaaagatcttttggcgagagaatggcaatgaatacacctattcaaggtagcgctgcggatataataaagatgtcgatggttaaagtatacaatgaattaaaggaaagaggattgaaatcaagacttattcttcaggtgcacgatgagcttataattgacacacatcctgatgaagttgaaatagtcaaggagcttctaaaatcaataatggaaaatatcataaagttgaaagttcctttagttgtagatatagggcaagggaaaaactggtatgatgcaaaataaaaggatcc

SEQ ID NO: 933 - DNA, 2678 bp, Artificial Sequence
  Description of Artificial Sequence: Synthetic Clostridium thermosulfurogenes DNA Polymerase Q593F
atgaaatacctgctgccgaccgctgctgctggtctgctgctcctcgctgcccagccggcgatggccatggcgaaatttttgatcatagatggtaatagcttgatgtacagggcgtattttgccctgcctgatttgatgaacagcgaaggaatgcatacaaatgccatatacggtttttcaatgatgcttcttaaattgctggaggaggagaaaccagactacatagcaatagctttcgataaaaaggcttctacatttaggcacaaggagtacagtgcttataaaggaacccgccagtcgatgccagaagagctgatagaacaggtggatattttaaaagatgtgataaatgcatttaacataaagaccatcgagatagagggatttgaagcagatgatatcattggtacagtatcaaaaattgcttccgaaagtgggatggatgtgcttatcgtcacaggcgacagagatgcgcttcagcttgtgtcggcaaatgtaaaagtaaaaatatgtaaaaaaggcataacgcagatggatgagtacgatgaaaaggcggtctttgaaaagtatgaagtgacgccgcttcaattcatagacttgaaagggcttatgggagacaaatcagacaacattccaggagtgcccaatataggggagaagacggccataaagcttgttaaagaatttggatcaattgaaaatttactgatgaatacagataagttaaaagggaaaataaaagaaaatgtagaaaacaatgcagaattagctgttttaagcaaacggcttgctacgattgagagaaatgttcctattgatattgatttgaatgaatacgcggttaaaaattacgatgtcaataagcttacagagctatttgaaaaattggaattttcaagcctcatctcagatttaaaagatgatagtcgtgatacaaaggatattaaagaatggcctgtaagagattttacatacgttaaaaatgttttaggaaagtttgatgttttgtcattgtatccattcatatatgatggaaagataaaagcagtatcatttgcttgcggtgacggatcgttttttgtagagattgatgattatgacaattttaaattgcttaataatgataagcttacgttgataggacacgatctgaaagattttttagtaaacatttcatactgcggtattgaacttaattgtaagattttagatacggccataatgacttatcttttaaatccgtctgagtcgaattacgacataagtcgcgtattgaaaaaatacttgaaagaggatttgcaaaacatagatgatatagtaggcaagggcaggaataaaaagagctacgatgacattgacaaaaagcttttagtcgattatatgtgttcagccgcatcaaacttatctaagttaaaagataagctcatgtcatttataaaagagatggagatggaagatcttttaaaaaatgtggaaattccgcttattgaagtgctaaaatctatggaggtgtacggctttacattagataaagatgtacttagaagtatttctaaagaaatagatgaaaagacagataagattgtaaaagatatttacgatgctgctggatacgaatttaatattaactctacaaagcagttatcagaatttttgtttgataaactgaatttgccagcaataaaaaagactaaaacagggtattcgactgacatggaagtccttgcagaacttataccgtacaatgacatagtaggagaaataatagaatatagatttcttatgaagcttaaatctacgtacatagatggcttcattcccatcatggatgaaaataatagggtccactctacgtttaaacaaacagttgctgctacagggagaattagctcaacagagcctaatctgcagaacatacctgtaagagaagaatttggcaggaggataagaaaggcatttgtatcaagttatgaagatgggcttataatatctgctgattattctcagattgagctaagggttcttgcacatctttcagaggatgaaaaacttattgagtcatttttgaacaacgaagatatacatttaaggacggcatcggaggtttttaaggtttcgaaagaagaagtgacaagtgaaatgagaaggcgggcgaaagctgtcaactttggtattgtatatggtataagcgattacggcttatctaaagacttaaagatttcgcgaaaagaagcgaaagaatacatagacaattattttgacaggtacaagggcgtcaaaaattacatcgactcaattgtcaaatttgcaaaggaaaatgggtatgttacgactatcttaaataggagaagatacataccggaaatcaattcaaaaaattttaaccaaagatcttttggcgagagaatggcaatgaatacacctattcaaggtagcgctgcggatataataaagatgtcgatggttaaagtatacaatgaattaaaggaaagaggattgaaatcaagacttattcttcaggtgcacgatgagcttataattgacacacatcctgatgaagttgaaatagtcaaggagcttctaaaatcaataatggaaaatatcataaagttgaaagttcctttagttgtagatatagggcaagggaaaaactggtatgatgcaaaataaaaggatcc

SEQ ID NO: 934 - DNA, 2678 bp, Artificial Sequence
  Description of Artificial Sequence: Synthetic Clostridium thermosulfurogenes DNA Polymerase Q593G
atgaaatacctgctgccgaccgctgctgctggtctgctgctcctcgctgcccagccggcgatggccatggcgaaatttttgatcatagatggtaatagcttgatgtacagggcgtattttgccctgcctgatttgatgaacagcgaaggaatgcatacaaatgccatatacggtttttcaatgatgcttcttaaattgctggaggaggagaaaccagactacatagcaatagctttcgataaaaaggcttctacatttaggcacaaggagtacagtgcttataaaggaacccgccagtcgatgccagaagagctgatagaacaggtggatattttaaaagatgtgataaatgcatttaacataaagaccatcgagatagagggatttgaagcagatgatatcattggtacagtatcaaaaattgcttccgaaagtgggatggatgtgcttatcgtcacaggcgacagagatgcgcttcagcttgtgtcggcaaatgtaaaagtaaaaatatgtaaaaaaggcataacgcagatggatgagtacgatgaaaaggcggtctttgaaaagtatgaagtgacgccgcttcaattcatagacttgaaagggcttatgggagacaaatcagacaacattccaggagtgcccaatataggggagaagacggccataaagcttgttaaagaatttggatcaattgaaaatttactgatgaatacagataagttaaaagggaaaataaaagaaaatgtagaaaacaatgcagaattagctgttttaagcaaacggcttgctacgattgagagaaatgttcctattgatattgatttgaatgaatacgcggttaaaaattacgatgtcaataagcttacagagctatttgaaaaattggaattttcaagcctcatctcagatttaaaagatgatagtcgtgatacaaaggatattaaagaatggcctgtaagagattttacatacgttaaaaatgttttaggaaagtttgatgttttgtcattgtatccattcatatatgatggaaagataaaagcagtatcatttgcttgcggtgacggatcgttttttgtagagattgatgattatgacaattttaaattgcttaataatgataagcttacgttgataggacacgatctgaaagattttttagtaaacatttcatactgcggtattgaacttaattgtaagattttagatacggccataatgacttatcttttaaatccgtctgagtcgaattacgacataagtcgcgtattgaaaaaatacttgaaagaggatttgcaaaacatagatgatatagtaggcaagggcaggaataaaaagagctacgatgacattgacaaaaagcttttagtcgattatatgtgttcagccgcatcaaacttatctaagttaaaagataagctcatgtcatttataaaagagatggagatggaagatcttttaaaaaatgtggaaattccgcttattgaagtgctaaaatctatggaggtgtacggctttacattagataaagatgtacttagaagtatttctaaagaaatagatgaaaagacagataagattgtaaaagatatttacgatgctgctggatacgaatttaatattaactctacaaagcagttatcagaatttttgtttgataaactgaatttgccagcaataaaaaagactaaaacagggtattcgactgacatggaagtccttgcagaacttataccgtacaatgacatagtaggagaaataatagaatatagaggtcttatgaagcttaaatctacgtacatagatggcttcattcccatcatggatgaaaataatagggtccactctacgtttaaacaaacagttgctgctacagggagaattagctcaacagagcctaatctgcagaacatacctgtaagagaagaatttggcaggaggataagaaaggcatttgtatcaagttatgaagatgggcttataatatctgctgattattctcagattgagctaagggttcttgcacatctttcagaggatgaaaaacttattgagtcatttttgaacaacgaagatatacatttaaggacggcatcggaggtttttaaggtttcgaaagaagaagtgacaagtgaaatgagaaggcgggcgaaagctgtcaactttggtattgtatatggtataagcgattacggcttatctaaagacttaaagatttcgcgaaaagaagcgaaagaatacatagacaattattttgacaggtacaagggcgtcaaaaattacatcgactcaattgtcaaatttgcaaaggaaaatgggtatgttacgactatcttaaataggagaagatacataccggaaatcaattcaaaaaattttaaccaaagatcttttggcgagagaatggcaatgaatacacctattcaaggtagcgctgcggatataataaagatgtcgatggttaaagtatacaatgaattaaaggaaagaggattgaaatcaagacttattcttcaggtgcacgatgagcttataattgacacacatcctgatgaagttgaaatagtcaaggagcttctaaaatcaataatggaaaatatcataaagttgaaagttcctttagttgtagatatagggcaagggaaaaactggtatgatgcaaaataaaaggatcc

SEQ ID NO: 935 - DNA, 2678 bp, Artificial Sequence
  Description of Artificial Sequence: Synthetic Clostridium thermosulfurogenes DNA Polymerase Q593H
atgaaatacctgctgccgaccgctgctgctggtctgctgctcctcgctgcccagccggcgatggccatggcgaaatttttgatcatagatggtaatagcttgatgtacagggcgtattttgccctgcctgatttgatgaacagcgaaggaatgcatacaaatgccatatacggtttttcaatgatgcttcttaaattgctggaggaggagaaaccagactacatagcaatagctttcgataaaaaggcttctacatttaggcacaaggagtacagtgcttataaaggaacccgccagtcgatgccagaagagctgatagaacaggtggatattttaaaagatgtgataaatgcatttaacataaagaccatcgagatagagggatttgaagcagatgatatcattggtacagtatcaaaaattgcttccgaaagtgggatggatgtgcttatcgtcacaggcgacagagatgcgcttcagcttgtgtcggcaaatgtaaaagtaaaaatatgtaaaaaaggcataacgcagatggatgagtacgatgaaaaggcggtctttgaaaagtatgaagtgacgccgcttcaattcatagacttgaaagggcttatgggagacaaatcagacaacattccaggagtgcccaatataggggagaagacggccataaagcttgttaaagaatttggatcaattgaaaatttactgatgaatacagataagttaaaagggaaaataaaagaaaatgtagaaaacaatgcagaattagctgttttaagcaaacggcttgctacgattgagagaaatgttcctattgatattgatttgaatgaatacgcggttaaaaattacgatgtcaataagcttacagagctatttgaaaaattggaattttcaagcctcatctcagatttaaaagatgatagtcgtgatacaaaggatattaaagaatggcctgtaagagattttacatacgttaaaaatgttttaggaaagtttgatgttttgtcattgtatccattcatatatgatggaaagataaaagcagtatcatttgcttgcggtgacggatcgttttttgtagagattgatgattatgacaattttaaattgcttaataatgataagcttacgttgataggacacgatctgaaagattttttagtaaacatttcatactgcggtattgaacttaattgtaagattttagatacggccataatgacttatcttttaaatccgtctgagtcgaattacgacataagtcgcgtattgaaaaaatacttgaaagaggatttgcaaaacatagatgatatagtaggcaagggcaggaataaaaagagctacgatgacattgacaaaaagcttttagtcgattatatgtgttcagccgcatcaaacttatctaagttaaaagataagctcatgtcatttataaaagagatggagatggaagatcttttaaaaaatgtggaaattccgcttattgaagtgctaaaatctatggaggtgtacggctttacattagataaagatgtacttagaagtatttctaaagaaatagatgaaaagacagataagattgtaaaagatatttacgatgctgctggatacgaatttaatattaactctacaaagcagttatcagaatttttgtttgataaactgaatttgccagcaataaaaaagactaaaacagggtattcgactgacatggaagtccttgcagaacttataccgtacaatgacatagtaggagaaataatagaatatagacatcttatgaagcttaaatctacgtacatagatggcttcattcccatcatggatgaaaataatagggtccactctacgtttaaacaaacagttgctgctacagggagaattagctcaacagagcctaatctgcagaacatacctgtaagagaagaatttggcaggaggataagaaaggcatttgtatcaagttatgaagatgggcttataatatctgctgattattctcagattgagctaagggttcttgcacatctttcagaggatgaaaaacttattgagtcatttttgaacaacgaagatatacatttaaggacggcatcggaggtttttaaggtttcgaaagaagaagtgacaagtgaaatgagaaggcgggcgaaagctgtcaactttggtattgtatatggtataagcgattacggcttatctaaagacttaaagatttcgcgaaaagaagcgaaagaatacatagacaattattttgacaggtacaagggcgtcaaaaattacatcgactcaattgtcaaatttgcaaaggaaaatgggtatgttacgactatcttaaataggagaagatacataccggaaatcaattcaaaaaattttaaccaaagatcttttggcgagagaatggcaatgaatacacctattcaaggtagcgctgcggatataataaagatgtcgatggttaaagtatacaatgaattaaaggaaagaggattgaaatcaagacttattcttcaggtgcacgatgagcttataattgacacacatcctgatgaagttgaaatagtcaaggagcttctaaaatcaataatggaaaatatcataaagttgaaagttcctttagttgtagatatagggcaagggaaaaactggtatgatgcaaaataaaaggatcc

SEQ ID NO: 936 - DNA, 2678 bp, Artificial Sequence
  Description of Artificial Sequence: Synthetic Clostridium thermosulfurogenes DNA Polymerase Q593I
atgaaatacctgctgccgaccgctgctgctggtctgctgctcctcgctgcccagccggcgatggccatggcgaaatttttgatcatagatggtaatagcttgatgtacagggcgtattttgccctgcctgatttgatgaacagcgaaggaatgcatacaaatgccatatacggtttttcaatgatgcttcttaaattgctggaggaggagaaaccagactacatagcaatagctttcgataaaaaggcttctacatttaggcacaaggagtacagtgcttataaaggaacccgccagtcgatgccagaagagctgatagaacaggtggatattttaaaagatgtgataaatgcatttaacataaagaccatcgagatagagggatttgaagcagatgatatcattggtacagtatcaaaaattgcttccgaaagtgggatggatgtgcttatcgtcacaggcgacagagatgcgcttcagcttgtgtcggcaaatgtaaaagtaaaaatatgtaaaaaaggcataacgcagatggatgagtacgatgaaaaggcggtctttgaaaagtatgaagtgacgccgcttcaattcatagacttgaaagggcttatgggagacaaatcagacaacattccaggagtgcccaatataggggagaagacggccataaagcttgttaaagaatttggatcaattgaaaatttactgatgaatacagataagttaaaagggaaaataaaagaaaatgtagaaaacaatgcagaattagctgttttaagcaaacggcttgctacgattgagagaaatgttcctattgatattgatttgaatgaatacgcggttaaaaattacgatgtcaataagcttacagagctatttgaaaaattggaattttcaagcctcatctcagatttaaaagatgatagtcgtgatacaaaggatattaaagaatggcctgtaagagattttacatacgttaaaaatgttttaggaaagtttgatgttttgtcattgtatccattcatatatgatggaaagataaaagcagtatcatttgcttgcggtgacggatcgttttttgtagagattgatgattatgacaattttaaattgcttaataatgataagcttacgttgataggacacgatctgaaagattttttagtaaacatttcatactgcggtattgaacttaattgtaagattttagatacggccataatgacttatcttttaaatccgtctgagtcgaattacgacataagtcgcgtattgaaaaaatacttgaaagaggatttgcaaaacatagatgatatagtaggcaagggcaggaataaaaagagctacgatgacattgacaaaaagcttttagtcgattatatgtgttcagccgcatcaaacttatctaagttaaaagataagctcatgtcatttataaaagagatggagatggaagatcttttaaaaaatgtggaaattccgcttattgaagtgctaaaatctatggaggtgtacggctttacattagataaagatgtacttagaagtatttctaaagaaatagatgaaaagacagataagattgtaaaagatatttacgatgctgctggatacgaatttaatattaactctacaaagcagttatcagaatttttgtttgataaactgaatttgccagcaataaaaaagactaaaacagggtattcgactgacatggaagtccttgcagaacttataccgtacaatgacatagtaggagaaataatagaatatagaattcttatgaagcttaaatctacgtacatagatggcttcattcccatcatggatgaaaataatagggtccactctacgtttaaacaaacagttgctgctacagggagaattagctcaacagagcctaatctgcagaacatacctgtaagagaagaatttggcaggaggataagaaaggcatttgtatcaagttatgaagatgggcttataatatctgctgattattctcagattgagctaagggttcttgcacatctttcagaggatgaaaaacttattgagtcatttttgaacaacgaagatatacatttaaggacggcatcggaggtttttaaggtttcgaaagaagaagtgacaagtgaaatgagaaggcgggcgaaagctgtcaactttggtattgtatatggtataagcgattacggcttatctaaagacttaaagatttcgcgaaaagaagcgaaagaatacatagacaattattttgacaggtacaagggcgtcaaaaattacatcgactcaattgtcaaatttgcaaaggaaaatgggtatgttacgactatcttaaataggagaagatacataccggaaatcaattcaaaaaattttaaccaaagatcttttggcgagagaatggcaatgaatacacctattcaaggtagcgctgcggatataataaagatgtcgatggttaaagtatacaatgaattaaaggaaagaggattgaaatcaagacttattcttcaggtgcacgatgagcttataattgacacacatcctgatgaagttgaaatagtcaaggagcttctaaaatcaataatggaaaatatcataaagttgaaagttcctttagttgtagatatagggcaagggaaaaactggtatgatgcaaaataaaaggatcc

SEQ ID NO: 937 - DNA, 2678 bp, Artificial Sequence
  Description of Artificial Sequence: Synthetic Clostridium thermosulfurogenes DNA Polymerase Q593L
atgaaatacctgctgccgaccgctgctgctggtctgctgctcctcgctgcccagccggcgatggccatggcgaaatttttgatcatagatggtaatagcttgatgtacagggcgtattttgccctgcctgatttgatgaacagcgaaggaatgcatacaaatgccatatacggtttttcaatgatgcttcttaaattgctggaggaggagaaaccagactacatagcaatagctttcgataaaaaggcttctacatttaggcacaaggagtacagtgcttataaaggaacccgccagtcgatgccagaagagctgatagaacaggtggatattttaaaagatgtgataaatgcatttaacataaagaccatcgagatagagggatttgaagcagatgatatcattggtacagtatcaaaaattgcttccgaaagtgggatggatgtgcttatcgtcacaggcgacagagatgcgcttcagcttgtgtcggcaaatgtaaaagtaaaaatatgtaaaaaaggcataacgcagatggatgagtacgatgaaaaggcggtctttgaaaagtatgaagtgacgccgcttcaattcatagacttgaaagggcttatgggagacaaatcagacaacattccaggagtgcccaatataggggagaagacggccataaagcttgttaaagaatttggatcaattgaaaatttactgatgaatacagataagttaaaagggaaaataaaagaaaatgtagaaaacaatgcagaattagctgttttaagcaaacggcttgctacgattgagagaaatgttcctattgatattgatttgaatgaatacgcggttaaaaattacgatgtcaataagcttacagagctatttgaaaaattggaattttcaagcctcatctcagatttaaaagatgatagtcgtgatacaaaggatattaaagaatggcctgtaagagattttacatacgttaaaaatgttttaggaaagtttgatgttttgtcattgtatccattcatatatgatggaaagataaaagcagtatcatttgcttgcggtgacggatcgttttttgtagagattgatgattatgacaattttaaattgcttaataatgataagcttacgttgataggacacgatctgaaagattttttagtaaacatttcatactgcggtattgaacttaattgtaagattttagatacggccataatgacttatcttttaaatccgtctgagtcgaattacgacataagtcgcgtattgaaaaaatacttgaaagaggatttgcaaaacatagatgatatagtaggcaagggcaggaataaaaagagctacgatgacattgacaaaaagcttttagtcgattatatgtgttcagccgcatcaaacttatctaagttaaaagataagctcatgtcatttataaaagagatggagatggaagatcttttaaaaaatgtggaaattccgcttattgaagtgctaaaatctatggaggtgtacggctttacattagataaagatgtacttagaagtatttctaaagaaatagatgaaaagacagataagattgtaaaagatatttacgatgctgctggatacgaatttaatattaactctacaaagcagttatcagaatttttgtttgataaactgaatttgccagcaataaaaaagactaaaacagggtattcgactgacatggaagtccttgcagaacttataccgtacaatgacatagtaggagaaataatagaatatagacttcttatgaagcttaaatctacgtacatagatggcttcattcccatcatggatgaaaataatagggtccactctacgtttaaacaaacagttgctgctacagggagaattagctcaacagagcctaatctgcagaacatacctgtaagagaagaatttggcaggaggataagaaaggcatttgtatcaagttatgaagatgggcttataatatctgctgattattctcagattgagctaagggttcttgcacatctttcagaggatgaaaaacttattgagtcatttttgaacaacgaagatatacatttaaggacggcatcggaggtttttaaggtttcgaaagaagaagtgacaagtgaaatgagaaggcgggcgaaagctgtcaactttggtattgtatatggtataagcgattacggcttatctaaagacttaaagatttcgcgaaaagaagcgaaagaatacatagacaattattttgacaggtacaagggcgtcaaaaattacatcgactcaattgtcaaatttgcaaaggaaaatgggtatgttacgactatcttaaataggagaagatacataccggaaatcaattcaaaaaattttaaccaaagatcttttggcgagagaatggcaatgaatacacctattcaaggtagcgctgcggatataataaagatgtcgatggttaaagtatacaatgaattaaaggaaagaggattgaaatcaagacttattcttcaggtgcacgatgagcttataattgacacacatcctgatgaagttgaaatagtcaaggagcttctaaaatcaataatggaaaatatcataaagttgaaagttcctttagttgtagatatagggcaagggaaaaactggtatgatgcaaaataaaaggatcc

SEQ ID NO: 938 - DNA, 2678 bp, Artificial Sequence
  Description of Artificial Sequence: Synthetic Clostridium thermosulfurogenes DNA Polymerase Q593M
atgaaatacctgctgccgaccgctgctgctggtctgctgctcctcgctgcccagccggcgatggccatggcgaaatttttgatcatagatggtaatagcttgatgtacagggcgtattttgccctgcctgatttgatgaacagcgaaggaatgcatacaaatgccatatacggtttttcaatgatgcttcttaaattgctggaggaggagaaaccagactacatagcaatagctttcgataaaaaggcttctacatttaggcacaaggagtacagtgcttataaaggaacccgccagtcgatgccagaagagctgatagaacaggtggatattttaaaagatgtgataaatgcatttaacataaagaccatcgagatagagggatttgaagcagatgatatcattggtacagtatcaaaaattgcttccgaaagtgggatggatgtgcttatcgtcacaggcgacagagatgcgcttcagcttgtgtcggcaaatgtaaaagtaaaaatatgtaaaaaaggcataacgcagatggatgagtacgatgaaaaggcggtctttgaaaagtatgaagtgacgccgcttcaattcatagacttgaaagggcttatgggagacaaatcagacaacattccaggagtgcccaatataggggagaagacggccataaagcttgttaaagaatttggatcaattgaaaatttactgatgaatacagataagttaaaagggaaaataaaagaaaatgtagaaaacaatgcagaattagctgttttaagcaaacggcttgctacgattgagagaaatgttcctattgatattgatttgaatgaatacgcggttaaaaattacgatgtcaataagcttacagagctatttgaaaaattggaattttcaagcctcatctcagatttaaaagatgatagtcgtgatacaaaggatattaaagaatggcctgtaagagattttacatacgttaaaaatgttttaggaaagtttgatgttttgtcattgtatccattcatatatgatggaaagataaaagcagtatcatttgcttgcggtgacggatcgttttttgtagagattgatgattatgacaattttaaattgcttaataatgataagcttacgttgataggacacgatctgaaagattttttagtaaacatttcatactgcggtattgaacttaattgtaagattttagatacggccataatgacttatcttttaaatccgtctgagtcgaattacgacataagtcgcgtattgaaaaaatacttgaaagaggatttgcaaaacatagatgatatagtaggcaagggcaggaataaaaagagctacgatgacattgacaaaaagcttttagtcgattatatgtgttcagccgcatcaaacttatctaagttaaaagataagctcatgtcatttataaaagagatggagatggaagatcttttaaaaaatgtggaaattccgcttattgaagtgctaaaatctatggaggtgtacggctttacattagataaagatgtacttagaagtatttctaaagaaatagatgaaaagacagataagattgtaaaagatatttacgatgctgctggatacgaatttaatattaactctacaaagcagttatcagaatttttgtttgataaactgaatttgccagcaataaaaaagactaaaacagggtattcgactgacatggaagtccttgcagaacttataccgtacaatgacatagtaggagaaataatagaatatagaatgcttatgaagcttaaatctacgtacatagatggcttcattcccatcatggatgaaaataatagggtccactctacgtttaaacaaacagttgctgctacagggagaattagctcaacagagcctaatctgcagaacatacctgtaagagaagaatttggcaggaggataagaaaggcatttgtatcaagttatgaagatgggcttataatatctgctgattattctcagattgagctaagggttcttgcacatctttcagaggatgaaaaacttattgagtcatttttgaacaacgaagatatacatttaaggacggcatcggaggtttttaaggtttcgaaagaagaagtgacaagtgaaatgagaaggcgggcgaaagctgtcaactttggtattgtatatggtataagcgattacggcttatctaaagacttaaagatttcgcgaaaagaagcgaaagaatacatagacaattattttgacaggtacaagggcgtcaaaaattacatcgactcaattgtcaaatttgcaaaggaaaatgggtatgttacgactatcttaaataggagaagatacataccggaaatcaattcaaaaaattttaaccaaagatcttttggcgagagaatggcaatgaatacacctattcaaggtagcgctgcggatataataaagatgtcgatggttaaagtatacaatgaattaaaggaaagaggattgaaatcaagacttattcttcaggtgcacgatgagcttataattgacacacatcctgatgaagttgaaatagtcaaggagcttctaaaatcaataatggaaaatatcataaagttgaaagttcctttagttgtagatatagggcaagggaaaaactggtatgatgcaaaataaaaggatcc

SEQ ID NO: 939 - DNA, 2678 bp, Artificial Sequence
  Description of Artificial Sequence: Synthetic Clostridium thermosulfurogenes DNA Polymerase Q593N
atgaaatacctgctgccgaccgctgctgctggtctgctgctcctcgctgcccagccggcgatggccatggcgaaatttttgatcatagatggtaatagcttgatgtacagggcgtattttgccctgcctgatttgatgaacagcgaaggaatgcatacaaatgccatatacggtttttcaatgatgcttcttaaattgctggaggaggagaaaccagactacatagcaatagctttcgataaaaaggcttctacatttaggcacaaggagtacagtgcttataaaggaacccgccagtcgatgccagaagagctgatagaacaggtggatattttaaaagatgtgataaatgcatttaacataaagaccatcgagatagagggatttgaagcagatgatatcattggtacagtatcaaaaattgcttccgaaagtgggatggatgtgcttatcgtcacaggcgacagagatgcgcttcagcttgtgtcggcaaatgtaaaagtaaaaatatgtaaaaaaggcataacgcagatggatgagtacgatgaaaaggcggtctttgaaaagtatgaagtgacgccgcttcaattcatagacttgaaagggcttatgggagacaaatcagacaacattccaggagtgcccaatataggggagaagacggccataaagcttgttaaagaatttggatcaattgaaaatttactgatgaatacagataagttaaaagggaaaataaaagaaaatgtagaaaacaatgcagaattagctgttttaagcaaacggcttgctacgattgagagaaatgttcctattgatattgatttgaatgaatacgcggttaaaaattacgatgtcaataagcttacagagctatttgaaaaattggaattttcaagcctcatctcagatttaaaagatgatagtcgtgatacaaaggatattaaagaatggcctgtaagagattttacatacgttaaaaatgttttaggaaagtttgatgttttgtcattgtatccattcatatatgatggaaagataaaagcagtatcatttgcttgcggtgacggatcgttttttgtagagattgatgattatgacaattttaaattgcttaataatgataagcttacgttgataggacacgatctgaaagattttttagtaaacatttcatactgcggtattgaacttaattgtaagattttagatacggccataatgacttatcttttaaatccgtctgagtcgaattacgacataagtcgcgtattgaaaaaatacttgaaagaggatttgcaaaacatagatgatatagtaggcaagggcaggaataaaaagagctacgatgacattgacaaaaagcttttagtcgattatatgtgttcagccgcatcaaacttatctaagttaaaagataagctcatgtcatttataaaagagatggagatggaagatcttttaaaaaatgtggaaattccgcttattgaagtgctaaaatctatggaggtgtacggctttacattagataaagatgtacttagaagtatttctaaagaaatagatgaaaagacagataagattgtaaaagatatttacgatgctgctggatacgaatttaatattaactctacaaagcagttatcagaatttttgtttgataaactgaatttgccagcaataaaaaagactaaaacagggtattcgactgacatggaagtccttgcagaacttataccgtacaatgacatagtaggagaaataatagaatatagaaatcttatgaagcttaaatctacgtacatagatggcttcattcccatcatggatgaaaataatagggtccactctacgtttaaacaaacagttgctgctacagggagaattagctcaacagagcctaatctgcagaacatacctgtaagagaagaatttggcaggaggataagaaaggcatttgtatcaagttatgaagatgggcttataatatctgctgattattctcagattgagctaagggttcttgcacatctttcagaggatgaaaaacttattgagtcatttttgaacaacgaagatatacatttaaggacggcatcggaggtttttaaggtttcgaaagaagaagtgacaagtgaaatgagaaggcgggcgaaagctgtcaactttggtattgtatatggtataagcgattacggcttatctaaagacttaaagatttcgcgaaaagaagcgaaagaatacatagacaattattttgacaggtacaagggcgtcaaaaattacatcgactcaattgtcaaatttgcaaaggaaaatgggtatgttacgactatcttaaataggagaagatacataccggaaatcaattcaaaaaattttaaccaaagatcttttggcgagagaatggcaatgaatacacctattcaaggtagcgctgcggatataataaagatgtcgatggttaaagtatacaatgaattaaaggaaagaggattgaaatcaagacttattcttcaggtgcacgatgagcttataattgacacacatcctgatgaagttgaaatagtcaaggagcttctaaaatcaataatggaaaatatcataaagttgaaagttcctttagttgtagatatagggcaagggaaaaactggtatgatgcaaaataaaaggatcc

SEQ ID NO: 940 - DNA, 2678 bp, Artificial Sequence
  Description of Artificial Sequence: Synthetic Clostridium thermosulfurogenes DNA Polymerase Q593P
atgaaatacctgctgccgaccgctgctgctggtctgctgctcctcgctgcccagccggcgatggccatggcgaaatttttgatcatagatggtaatagcttgatgtacagggcgtattttgccctgcctgatttgatgaacagcgaaggaatgcatacaaatgccatatacggtttttcaatgatgcttcttaaattgctggaggaggagaaaccagactacatagcaatagctttcgataaaaaggcttctacatttaggcacaaggagtacagtgcttataaaggaacccgccagtcgatgccagaagagctgatagaacaggtggatattttaaaagatgtgataaatgcatttaacataaagaccatcgagatagagggatttgaagcagatgatatcattggtacagtatcaaaaattgcttccgaaagtgggatggatgtgcttatcgtcacaggcgacagagatgcgcttcagcttgtgtcggcaaatgtaaaagtaaaaatatgtaaaaaaggcataacgcagatggatgagtacgatgaaaaggcggtctttgaaaagtatgaagtgacgccgcttcaattcatagacttgaaagggcttatgggagacaaatcagacaacattccaggagtgcccaatataggggagaagacggccataaagcttgttaaagaatttggatcaattgaaaatttactgatgaatacagataagttaaaagggaaaataaaagaaaatgtagaaaacaatgcagaattagctgttttaagcaaacggcttgctacgattgagagaaatgttcctattgatattgatttgaatgaatacgcggttaaaaattacgatgtcaataagcttacagagctatttgaaaaattggaattttcaagcctcatctcagatttaaaagatgatagtcgtgatacaaaggatattaaagaatggcctgtaagagattttacatacgttaaaaatgttttaggaaagtttgatgttttgtcattgtatccattcatatatgatggaaagataaaagcagtatcatttgcttgcggtgacggatcgttttttgtagagattgatgattatgacaattttaaattgcttaataatgataagcttacgttgataggacacgatctgaaagattttttagtaaacatttcatactgcggtattgaacttaattgtaagattttagatacggccataatgacttatcttttaaatccgtctgagtcgaattacgacataagtcgcgtattgaaaaaatacttgaaagaggatttgcaaaacatagatgatatagtaggcaagggcaggaataaaaagagctacgatgacattgacaaaaagcttttagtcgattatatgtgttcagccgcatcaaacttatctaagttaaaagataagctcatgtcatttataaaagagatggagatggaagatcttttaaaaaatgtggaaattccgcttattgaagtgctaaaatctatggaggtgtacggctttacattagataaagatgtacttagaagtatttctaaagaaatagatgaaaagacagataagattgtaaaagatatttacgatgctgctggatacgaatttaatattaactctacaaagcagttatcagaatttttgtttgataaactgaatttgccagcaataaaaaagactaaaacagggtattcgactgacatggaagtccttgcagaacttataccgtacaatgacatagtaggagaaataatagaatatagacctcttatgaagcttaaatctacgtacatagatggcttcattcccatcatggatgaaaataatagggtccactctacgtttaaacaaacagttgctgctacagggagaattagctcaacagagcctaatctgcagaacatacctgtaagagaagaatttggcaggaggataagaaaggcatttgtatcaagttatgaagatgggcttataatatctgctgattattctcagattgagctaagggttcttgcacatctttcagaggatgaaaaacttattgagtcatttttgaacaacgaagatatacatttaaggacggcatcggaggtttttaaggtttcgaaagaagaagtgacaagtgaaatgagaaggcgggcgaaagctgtcaactttggtattgtatatggtataagcgattacggcttatctaaagacttaaagatttcgcgaaaagaagcgaaagaatacatagacaattattttgacaggtacaagggcgtcaaaaattacatcgactcaattgtcaaatttgcaaaggaaaatgggtatgttacgactatcttaaataggagaagatacataccggaaatcaattcaaaaaattttaaccaaagatcttttggcgagagaatggcaatgaatacacctattcaaggtagcgctgcggatataataaagatgtcgatggttaaagtatacaatgaattaaaggaaagaggattgaaatcaagacttattcttcaggtgcacgatgagcttataattgacacacatcctgatgaagttgaaatagtcaaggagcttctaaaatcaataatggaaaatatcataaagttgaaagttcctttagttgtagatatagggcaagggaaaaactggtatgatgcaaaataaaaggatcc

SEQ ID NO: 941 - DNA, 2678 bp, Artificial Sequence
  Description of Artificial Sequence: Synthetic Clostridium thermosulfurogenes DNA Polymerase Q593R
atgaaatacctgctgccgaccgctgctgctggtctgctgctcctcgctgcccagccggcgatggccatggcgaaatttttgatcatagatggtaatagcttgatgtacagggcgtattttgccctgcctgatttgatgaacagcgaaggaatgcatacaaatgccatatacggtttttcaatgatgcttcttaaattgctggaggaggagaaaccagactacatagcaatagctttcgataaaaaggcttctacatttaggcacaaggagtacagtgcttataaaggaacccgccagtcgatgccagaagagctgatagaacaggtggatattttaaaagatgtgataaatgcatttaacataaagaccatcgagatagagggatttgaagcagatgatatcattggtacagtatcaaaaattgcttccgaaagtgggatggatgtgcttatcgtcacaggcgacagagatgcgcttcagcttgtgtcggcaaatgtaaaagtaaaaatatgtaaaaaaggcataacgcagatggatgagtacgatgaaaaggcggtctttgaaaagtatgaagtgacgccgcttcaattcatagacttgaaagggcttatgggagacaaatcagacaacattccaggagtgcccaatataggggagaagacggccataaagcttgttaaagaatttggatcaattgaaaatttactgatgaatacagataagttaaaagggaaaataaaagaaaatgtagaaaacaatgcagaattagctgttttaagcaaacggcttgctacgattgagagaaatgttcctattgatattgatttgaatgaatacgcggttaaaaattacgatgtcaataagcttacagagctatttgaaaaattggaattttcaagcctcatctcagatttaaaagatgatagtcgtgatacaaaggatattaaagaatggcctgtaagagattttacatacgttaaaaatgttttaggaaagtttgatgttttgtcattgtatccattcatatatgatggaaagataaaagcagtatcatttgcttgcggtgacggatcgttttttgtagagattgatgattatgacaattttaaattgcttaataatgataagcttacgttgataggacacgatctgaaagattttttagtaaacatttcatactgcggtattgaacttaattgtaagattttagatacggccataatgacttatcttttaaatccgtctgagtcgaattacgacataagtcgcgtattgaaaaaatacttgaaagaggatttgcaaaacatagatgatatagtaggcaagggcaggaataaaaagagctacgatgacattgacaaaaagcttttagtcgattatatgtgttcagccgcatcaaacttatctaagttaaaagataagctcatgtcatttataaaagagatggagatggaagatcttttaaaaaatgtggaaattccgcttattgaagtgctaaaatctatggaggtgtacggctttacattagataaagatgtacttagaagtatttctaaagaaatagatgaaaagacagataagattgtaaaagatatttacgatgctgctggatacgaatttaatattaactctacaaagcagttatcagaatttttgtttgataaactgaatttgccagcaataaaaaagactaaaacagggtattcgactgacatggaagtccttgcagaacttataccgtacaatgacatagtaggagaaataatagaatatagacgtcttatgaagcttaaatctacgtacatagatggcttcattcccatcatggatgaaaataatagggtccactctacgtttaaacaaacagttgctgctacagggagaattagctcaacagagcctaatctgcagaacatacctgtaagagaagaatttggcaggaggataagaaaggcatttgtatcaagttatgaagatgggcttataatatctgctgattattctcagattgagctaagggttcttgcacatctttcagaggatgaaaaacttattgagtcatttttgaacaacgaagatatacatttaaggacggcatcggaggtttttaaggtttcgaaagaagaagtgacaagtgaaatgagaaggcgggcgaaagctgtcaactttggtattgtatatggtataagcgattacggcttatctaaagacttaaagatttcgcgaaaagaagcgaaagaatacatagacaattattttgacaggtacaagggcgtcaaaaattacatcgactcaattgtcaaatttgcaaaggaaaatgggtatgttacgactatcttaaataggagaagatacataccggaaatcaattcaaaaaattttaaccaaagatcttttggcgagagaatggcaatgaatacacctattcaaggtagcgctgcggatataataaagatgtcgatggttaaagtatacaatgaattaaaggaaagaggattgaaatcaagacttattcttcaggtgcacgatgagcttataattgacacacatcctgatgaagttgaaatagtcaaggagcttctaaaatcaataatggaaaatatcataaagttgaaagttcctttagttgtagatatagggcaagggaaaaactggtatgatgcaaaataaaaggatcc

SEQ ID NO: 942 - DNA, 2678 bp, Artificial Sequence
  Description of Artificial Sequence: Synthetic Clostridium thermosulfurogenes DNA Polymerase Q593S
atgaaatacctgctgccgaccgctgctgctggtctgctgctcctcgctgcccagccggcgatggccatggcgaaatttttgatcatagatggtaatagcttgatgtacagggcgtattttgccctgcctgatttgatgaacagcgaaggaatgcatacaaatgccatatacggtttttcaatgatgcttcttaaattgctggaggaggagaaaccagactacatagcaatagctttcgataaaaaggcttctacatttaggcacaaggagtacagtgcttataaaggaacccgccagtcgatgccagaagagctgatagaacaggtggatattttaaaagatgtgataaatgcatttaacataaagaccatcgagatagagggatttgaagcagatgatatcattggtacagtatcaaaaattgcttccgaaagtgggatggatgtgcttatcgtcacaggcgacagagatgcgcttcagcttgtgtcggcaaatgtaaaagtaaaaatatgtaaaaaaggcataacgcagatggatgagtacgatgaaaaggcggtctttgaaaagtatgaagtgacgccgcttcaattcatagacttgaaagggcttatgggagacaaatcagacaacattccaggagtgcccaatataggggagaagacggccataaagcttgttaaagaatttggatcaattgaaaatttactgatgaatacagataagttaaaagggaaaataaaagaaaatgtagaaaacaatgcagaattagctgttttaagcaaacggcttgctacgattgagagaaatgttcctattgatattgatttgaatgaatacgcggttaaaaattacgatgtcaataagcttacagagctatttgaaaaattggaattttcaagcctcatctcagatttaaaagatgatagtcgtgatacaaaggatattaaagaatggcctgtaagagattttacatacgttaaaaatgttttaggaaagtttgatgttttgtcattgtatccattcatatatgatggaaagataaaagcagtatcatttgcttgcggtgacggatcgttttttgtagagattgatgattatgacaattttaaattgcttaataatgataagcttacgttgataggacacgatctgaaagattttttagtaaacatttcatactgcggtattgaacttaattgtaagattttagatacggccataatgacttatcttttaaatccgtctgagtcgaattacgacataagtcgcgtattgaaaaaatacttgaaagaggatttgcaaaacatagatgatatagtaggcaagggcaggaataaaaagagctacgatgacattgacaaaaagcttttagtcgattatatgtgttcagccgcatcaaacttatctaagttaaaagataagctcatgtcatttataaaagagatggagatggaagatcttttaaaaaatgtggaaattccgcttattgaagtgctaaaatctatggaggtgtacggctttacattagataaagatgtacttagaagtatttctaaagaaatagatgaaaagacagataagattgtaaaagatatttacgatgctgctggatacgaatttaatattaactctacaaagcagttatcagaatttttgtttgataaactgaatttgccagcaataaaaaagactaaaacagggtattcgactgacatggaagtccttgcagaacttataccgtacaatgacatagtaggagaaataatagaatatagatctcttatgaagcttaaatctacgtacatagatggcttcattcccatcatggatgaaaataatagggtccactctacgtttaaacaaacagttgctgctacagggagaattagctcaacagagcctaatctgcagaacatacctgtaagagaagaatttggcaggaggataagaaaggcatttgtatcaagttatgaagatgggcttataatatctgctgattattctcagattgagctaagggttcttgcacatctttcagaggatgaaaaacttattgagtcatttttgaacaacgaagatatacatttaaggacggcatcggaggtttttaaggtttcgaaagaagaagtgacaagtgaaatgagaaggcgggcgaaagctgtcaactttggtattgtatatggtataagcgattacggcttatctaaagacttaaagatttcgcgaaaagaagcgaaagaatacatagacaattattttgacaggtacaagggcgtcaaaaattacatcgactcaattgtcaaatttgcaaaggaaaatgggtatgttacgactatcttaaataggagaagatacataccggaaatcaattcaaaaaattttaaccaaagatcttttggcgagagaatggcaatgaatacacctattcaaggtagcgctgcggatataataaagatgtcgatggttaaagtatacaatgaattaaaggaaagaggattgaaatcaagacttattcttcaggtgcacgatgagcttataattgacacacatcctgatgaagttgaaatagtcaaggagcttctaaaatcaataatggaaaatatcataaagttgaaagttcctttagttgtagatatagggcaagggaaaaactggtatgatgcaaaataaaaggatcc

SEQ ID NO: 943 - DNA, 2678 bp, Artificial Sequence
  Description of Artificial Sequence: Synthetic Clostridium thermosulfurogenes DNA Polymerase Q593T
atgaaatacctgctgccgaccgctgctgctggtctgctgctcctcgctgcccagccggcgatggccatggcgaaatttttgatcatagatggtaatagcttgatgtacagggcgtattttgccctgcctgatttgatgaacagcgaaggaatgcatacaaatgccatatacggtttttcaatgatgcttcttaaattgctggaggaggagaaaccagactacatagcaatagctttcgataaaaaggcttctacatttaggcacaaggagtacagtgcttataaaggaacccgccagtcgatgccagaagagctgatagaacaggtggatattttaaaagatgtgataaatgcatttaacataaagaccatcgagatagagggatttgaagcagatgatatcattggtacagtatcaaaaattgcttccgaaagtgggatggatgtgcttatcgtcacaggcgacagagatgcgcttcagcttgtgtcggcaaatgtaaaagtaaaaatatgtaaaaaaggcataacgcagatggatgagtacgatgaaaaggcggtctttgaaaagtatgaagtgacgccgcttcaattcatagacttgaaagggcttatgggagacaaatcagacaacattccaggagtgcccaatataggggagaagacggccataaagcttgttaaagaatttggatcaattgaaaatttactgatgaatacagataagttaaaagggaaaataaaagaaaatgtagaaaacaatgcagaattagctgttttaagcaaacggcttgctacgattgagagaaatgttcctattgatattgatttgaatgaatacgcggttaaaaattacgatgtcaataagcttacagagctatttgaaaaattggaattttcaagcctcatctcagatttaaaagatgatagtcgtgatacaaaggatattaaagaatggcctgtaagagattttacatacgttaaaaatgttttaggaaagtttgatgttttgtcattgtatccattcatatatgatggaaagataaaagcagtatcatttgcttgcggtgacggatcgttttttgtagagattgatgattatgacaattttaaattgcttaataatgataagcttacgttgataggacacgatctgaaagattttttagtaaacatttcatactgcggtattgaacttaattgtaagattttagatacggccataatgacttatcttttaaatccgtctgagtcgaattacgacataagtcgcgtattgaaaaaatacttgaaagaggatttgcaaaacatagatgatatagtaggcaagggcaggaataaaaagagctacgatgacattgacaaaaagcttttagtcgattatatgtgttcagccgcatcaaacttatctaagttaaaagataagctcatgtcatttataaaagagatggagatggaagatcttttaaaaaatgtggaaattccgcttattgaagtgctaaaatctatggaggtgtacggctttacattagataaagatgtacttagaagtatttctaaagaaatagatgaaaagacagataagattgtaaaagatatttacgatgctgctggatacgaatttaatattaactctacaaagcagttatcagaatttttgtttgataaactgaatttgccagcaataaaaaagactaaaacagggtattcgactgacatggaagtccttgcagaacttataccgtacaatgacatagtaggagaaataatagaatatagaactcttatgaagcttaaatctacgtacatagatggcttcattcccatcatggatgaaaataatagggtccactctacgtttaaacaaacagttgctgctacagggagaattagctcaacagagcctaatctgcagaacatacctgtaagagaagaatttggcaggaggataagaaaggcatttgtatcaagttatgaagatgggcttataatatctgctgattattctcagattgagctaagggttcttgcacatctttcagaggatgaaaaacttattgagtcatttttgaacaacgaagatatacatttaaggacggcatcggaggtttttaaggtttcgaaagaagaagtgacaagtgaaatgagaaggcgggcgaaagctgtcaactttggtattgtatatggtataagcgattacggcttatctaaagacttaaagatttcgcgaaaagaagcgaaagaatacatagacaattattttgacaggtacaagggcgtcaaaaattacatcgactcaattgtcaaatttgcaaaggaaaatgggtatgttacgactatcttaaataggagaagatacataccggaaatcaattcaaaaaattttaaccaaagatcttttggcgagagaatggcaatgaatacacctattcaaggtagcgctgcggatataataaagatgtcgatggttaaagtatacaatgaattaaaggaaagaggattgaaatcaagacttattcttcaggtgcacgatgagcttataattgacacacatcctgatgaagttgaaatagtcaaggagcttctaaaatcaataatggaaaatatcataaagttgaaagttcctttagttgtagatatagggcaagggaaaaactggtatgatgcaaaataaaaggatcc

SEQ ID NO: 944 - DNA, 2678 bp, Artificial Sequence
  Description of Artificial Sequence: Synthetic Clostridium thermosulfurogenes DNA Polymerase Q593V
atgaaatacctgctgccgaccgctgctgctggtctgctgctcctcgctgcccagccggcgatggccatggcgaaatttttgatcatagatggtaatagcttgatgtacagggcgtattttgccctgcctgatttgatgaacagcgaaggaatgcatacaaatgccatatacggtttttcaatgatgcttcttaaattgctggaggaggagaaaccagactacatagcaatagctttcgataaaaaggcttctacatttaggcacaaggagtacagtgcttataaaggaacccgccagtcgatgccagaagagctgatagaacaggtggatattttaaaagatgtgataaatgcatttaacataaagaccatcgagatagagggatttgaagcagatgatatcattggtacagtatcaaaaattgcttccgaaagtgggatggatgtgcttatcgtcacaggcgacagagatgcgcttcagcttgtgtcggcaaatgtaaaagtaaaaatatgtaaaaaaggcataacgcagatggatgagtacgatgaaaaggcggtctttgaaaagtatgaagtgacgccgcttcaattcatagacttgaaagggcttatgggagacaaatcagacaacattccaggagtgcccaatataggggagaagacggccataaagcttgttaaagaatttggatcaattgaaaatttactgatgaatacagataagttaaaagggaaaataaaagaaaatgtagaaaacaatgcagaattagctgttttaagcaaacggcttgctacgattgagagaaatgttcctattgatattgatttgaatgaatacgcggttaaaaattacgatgtcaataagcttacagagctatttgaaaaattggaattttcaagcctcatctcagatttaaaagatgatagtcgtgatacaaaggatattaaagaatggcctgtaagagattttacatacgttaaaaatgttttaggaaagtttgatgttttgtcattgtatccattcatatatgatggaaagataaaagcagtatcatttgcttgcggtgacggatcgttttttgtagagattgatgattatgacaattttaaattgcttaataatgataagcttacgttgataggacacgatctgaaagattttttagtaaacatttcatactgcggtattgaacttaattgtaagattttagatacggccataatgacttatcttttaaatccgtctgagtcgaattacgacataagtcgcgtattgaaaaaatacttgaaagaggatttgcaaaacatagatgatatagtaggcaagggcaggaataaaaagagctacgatgacattgacaaaaagcttttagtcgattatatgtgttcagccgcatcaaacttatctaagttaaaagataagctcatgtcatttataaaagagatggagatggaagatcttttaaaaaatgtggaaattccgcttattgaagtgctaaaatctatggaggtgtacggctttacattagataaagatgtacttagaagtatttctaaagaaatagatgaaaagacagataagattgtaaaagatatttacgatgctgctggatacgaatttaatattaactctacaaagcagttatcagaatttttgtttgataaactgaatttgccagcaataaaaaagactaaaacagggtattcgactgacatggaagtccttgcagaacttataccgtacaatgacatagtaggagaaataatagaatatagagttcttatgaagcttaaatctacgtacatagatggcttcattcccatcatggatgaaaataatagggtccactctacgtttaaacaaacagttgctgctacagggagaattagctcaacagagcctaatctgcagaacatacctgtaagagaagaatttggcaggaggataagaaaggcatttgtatcaagttatgaagatgggcttataatatctgctgattattctcagattgagctaagggttcttgcacatctttcagaggatgaaaaacttattgagtcatttttgaacaacgaagatatacatttaaggacggcatcggaggtttttaaggtttcgaaagaagaagtgacaagtgaaatgagaaggcgggcgaaagctgtcaactttggtattgtatatggtataagcgattacggcttatctaaagacttaaagatttcgcgaaaagaagcgaaagaatacatagacaattattttgacaggtacaagggcgtcaaaaattacatcgactcaattgtcaaatttgcaaaggaaaatgggtatgttacgactatcttaaataggagaagatacataccggaaatcaattcaaaaaattttaaccaaagatcttttggcgagagaatggcaatgaatacacctattcaaggtagcgctgcggatataataaagatgtcgatggttaaagtatacaatgaattaaaggaaagaggattgaaatcaagacttattcttcaggtgcacgatgagcttataattgacacacatcctgatgaagttgaaatagtcaaggagcttctaaaatcaataatggaaaatatcataaagttgaaagttcctttagttgtagatatagggcaagggaaaaactggtatgatgcaaaataaaaggatcc

SEQ ID NO: 945 - DNA, 2678 bp, Artificial Sequence
  Description of Artificial Sequence: Synthetic Clostridium thermosulfurogenes DNA Polymerase Q593W
atgaaatacctgctgccgaccgctgctgctggtctgctgctcctcgctgcccagccggcgatggccatggcgaaatttttgatcatagatggtaatagcttgatgtacagggcgtattttgccctgcctgatttgatgaacagcgaaggaatgcatacaaatgccatatacggtttttcaatgatgcttcttaaattgctggaggaggagaaaccagactacatagcaatagctttcgataaaaaggcttctacatttaggcacaaggagtacagtgcttataaaggaacccgccagtcgatgccagaagagctgatagaacaggtggatattttaaaagatgtgataaatgcatttaacataaagaccatcgagatagagggatttgaagcagatgatatcattggtacagtatcaaaaattgcttccgaaagtgggatggatgtgcttatcgtcacaggcgacagagatgcgcttcagcttgtgtcggcaaatgtaaaagtaaaaatatgtaaaaaaggcataacgcagatggatgagtacgatgaaaaggcggtctttgaaaagtatgaagtgacgccgcttcaattcatagacttgaaagggcttatgggagacaaatcagacaacattccaggagtgcccaatataggggagaagacggccataaagcttgttaaagaatttggatcaattgaaaatttactgatgaatacagataagttaaaagggaaaataaaagaaaatgtagaaaacaatgcagaattagctgttttaagcaaacggcttgctacgattgagagaaatgttcctattgatattgatttgaatgaatacgcggttaaaaattacgatgtcaataagcttacagagctatttgaaaaattggaattttcaagcctcatctcagatttaaaagatgatagtcgtgatacaaaggatattaaagaatggcctgtaagagattttacatacgttaaaaatgttttaggaaagtttgatgttttgtcattgtatccattcatatatgatggaaagataaaagcagtatcatttgcttgcggtgacggatcgttttttgtagagattgatgattatgacaattttaaattgcttaataatgataagcttacgttgataggacacgatctgaaagattttttagtaaacatttcatactgcggtattgaacttaattgtaagattttagatacggccataatgacttatcttttaaatccgtctgagtcgaattacgacataagtcgcgtattgaaaaaatacttgaaagaggatttgcaaaacatagatgatatagtaggcaagggcaggaataaaaagagctacgatgacattgacaaaaagcttttagtcgattatatgtgttcagccgcatcaaacttatctaagttaaaagataagctcatgtcatttataaaagagatggagatggaagatcttttaaaaaatgtggaaattccgcttattgaagtgctaaaatctatggaggtgtacggctttacattagataaagatgtacttagaagtatttctaaagaaatagatgaaaagacagataagattgtaaaagatatttacgatgctgctggatacgaatttaatattaactctacaaagcagttatcagaatttttgtttgataaactgaatttgccagcaataaaaaagactaaaacagggtattcgactgacatggaagtccttgcagaacttataccgtacaatgacatagtaggagaaataatagaatatagatggcttatgaagcttaaatctacgtacatagatggcttcattcccatcatggatgaaaataatagggtccactctacgtttaaacaaacagttgctgctacagggagaattagctcaacagagcctaatctgcagaacatacctgtaagagaagaatttggcaggaggataagaaaggcatttgtatcaagttatgaagatgggcttataatatctgctgattattctcagattgagctaagggttcttgcacatctttcagaggatgaaaaacttattgagtcatttttgaacaacgaagatatacatttaaggacggcatcggaggtttttaaggtttcgaaagaagaagtgacaagtgaaatgagaaggcgggcgaaagctgtcaactttggtattgtatatggtataagcgattacggcttatctaaagacttaaagatttcgcgaaaagaagcgaaagaatacatagacaattattttgacaggtacaagggcgtcaaaaattacatcgactcaattgtcaaatttgcaaaggaaaatgggtatgttacgactatcttaaataggagaagatacataccggaaatcaattcaaaaaattttaaccaaagatcttttggcgagagaatggcaatgaatacacctattcaaggtagcgctgcggatataataaagatgtcgatggttaaagtatacaatgaattaaaggaaagaggattgaaatcaagacttattcttcaggtgcacgatgagcttataattgacacacatcctgatgaagttgaaatagtcaaggagcttctaaaatcaataatggaaaatatcataaagttgaaagttcctttagttgtagatatagggcaagggaaaaactggtatgatgcaaaataaaaggatcc

SEQ ID NO: 946 - DNA, 2678 bp, Artificial Sequence
  Description of Artificial Sequence: Synthetic Clostridium thermosulfurogenes DNA Polymerase Q593Y
atgaaatacctgctgccgaccgctgctgctggtctgctgctcctcgctgcccagccggcgatggccatggcgaaatttttgatcatagatggtaatagcttgatgtacagggcgtattttgccctgcctgatttgatgaacagcgaaggaatgcatacaaatgccatatacggtttttcaatgatgcttcttaaattgctggaggaggagaaaccagactacatagcaatagctttcgataaaaaggcttctacatttaggcacaaggagtacagtgcttataaaggaacccgccagtcgatgccagaagagctgatagaacaggtggatattttaaaagatgtgataaatgcatttaacataaagaccatcgagatagagggatttgaagcagatgatatcattggtacagtatcaaaaattgcttccgaaagtgggatggatgtgcttatcgtcacaggcgacagagatgcgcttcagcttgtgtcggcaaatgtaaaagtaaaaatatgtaaaaaaggcataacgcagatggatgagtacgatgaaaaggcggtctttgaaaagtatgaagtgacgccgcttcaattcatagacttgaaagggcttatgggagacaaatcagacaacattccaggagtgcccaatataggggagaagacggccataaagcttgttaaagaatttggatcaattgaaaatttactgatgaatacagataagttaaaagggaaaataaaagaaaatgtagaaaacaatgcagaattagctgttttaagcaaacggcttgctacgattgagagaaatgttcctattgatattgatttgaatgaatacgcggttaaaaattacgatgtcaataagcttacagagctatttgaaaaattggaattttcaagcctcatctcagatttaaaagatgatagtcgtgatacaaaggatattaaagaatggcctgtaagagattttacatacgttaaaaatgttttaggaaagtttgatgttttgtcattgtatccattcatatatgatggaaagataaaagcagtatcatttgcttgcggtgacggatcgttttttgtagagattgatgattatgacaattttaaattgcttaataatgataagcttacgttgataggacacgatctgaaagattttttagtaaacatttcatactgcggtattgaacttaattgtaagattttagatacggccataatgacttatcttttaaatccgtctgagtcgaattacgacataagtcgcgtattgaaaaaatacttgaaagaggatttgcaaaacatagatgatatagtaggcaagggcaggaataaaaagagctacgatgacattgacaaaaagcttttagtcgattatatgtgttcagccgcatcaaacttatctaagttaaaagataagctcatgtcatttataaaagagatggagatggaagatcttttaaaaaatgtggaaattccgcttattgaagtgctaaaatctatggaggtgtacggctttacattagataaagatgtacttagaagtatttctaaagaaatagatgaaaagacagataagattgtaaaagatatttacgatgctgctggatacgaatttaatattaactctacaaagcagttatcagaatttttgtttgataaactgaatttgccagcaataaaaaagactaaaacagggtattcgactgacatggaagtccttgcagaacttataccgtacaatgacatagtaggagaaataatagaatatagatatcttatgaagcttaaatctacgtacatagatggcttcattcccatcatggatgaaaataatagggtccactctacgtttaaacaaacagttgctgctacagggagaattagctcaacagagcctaatctgcagaacatacctgtaagagaagaatttggcaggaggataagaaaggcatttgtatcaagttatgaagatgggcttataatatctgctgattattctcagattgagctaagggttcttgcacatctttcagaggatgaaaaacttattgagtcatttttgaacaacgaagatatacatttaaggacggcatcggaggtttttaaggtttcgaaagaagaagtgacaagtgaaatgagaaggcgggcgaaagctgtcaactttggtattgtatatggtataagcgattacggcttatctaaagacttaaagatttcgcgaaaagaagcgaaagaatacatagacaattattttgacaggtacaagggcgtcaaaaattacatcgactcaattgtcaaatttgcaaaggaaaatgggtatgttacgactatcttaaataggagaagatacataccggaaatcaattcaaaaaattttaaccaaagatcttttggcgagagaatggcaatgaatacacctattcaaggtagcgctgcggatataataaagatgtcgatggttaaagtatacaatgaattaaaggaaagaggattgaaatcaagacttattcttcaggtgcacgatgagcttataattgacacacatcctgatgaagttgaaatagtcaaggagcttctaaaatcaataatggaaaatatcataaagttgaaagttcctttagttgtagatatagggcaagggaaaaactggtatgatgcaaaataaaaggatcc

SEQ ID NO: 947 - DNA, 2678 bp, Artificial Sequence
  Description of Artificial Sequence: Synthetic Clostridium thermosulfurogenes DNA Polymerase V623A
atgaaatacctgctgccgaccgctgctgctggtctgctgctcctcgctgcccagccggcgatggccatggcgaaatttttgatcatagatggtaatagcttgatgtacagggcgtattttgccctgcctgatttgatgaacagcgaaggaatgcatacaaatgccatatacggtttttcaatgatgcttcttaaattgctggaggaggagaaaccagactacatagcaatagctttcgataaaaaggcttctacatttaggcacaaggagtacagtgcttataaaggaacccgccagtcgatgccagaagagctgatagaacaggtggatattttaaaagatgtgataaatgcatttaacataaagaccatcgagatagagggatttgaagcagatgatatcattggtacagtatcaaaaattgcttccgaaagtgggatggatgtgcttatcgtcacaggcgacagagatgcgcttcagcttgtgtcggcaaatgtaaaagtaaaaatatgtaaaaaaggcataacgcagatggatgagtacgatgaaaaggcggtctttgaaaagtatgaagtgacgccgcttcaattcatagacttgaaagggcttatgggagacaaatcagacaacattccaggagtgcccaatataggggagaagacggccataaagcttgttaaagaatttggatcaattgaaaatttactgatgaatacagataagttaaaagggaaaataaaagaaaatgtagaaaacaatgcagaattagctgttttaagcaaacggcttgctacgattgagagaaatgttcctattgatattgatttgaatgaatacgcggttaaaaattacgatgtcaataagcttacagagctatttgaaaaattggaattttcaagcctcatctcagatttaaaagatgatagtcgtgatacaaaggatattaaagaatggcctgtaagagattttacatacgttaaaaatgttttaggaaagtttgatgttttgtcattgtatccattcatatatgatggaaagataaaagcagtatcatttgcttgcggtgacggatcgttttttgtagagattgatgattatgacaattttaaattgcttaataatgataagcttacgttgataggacacgatctgaaagattttttagtaaacatttcatactgcggtattgaacttaattgtaagattttagatacggccataatgacttatcttttaaatccgtctgagtcgaattacgacataagtcgcgtattgaaaaaatacttgaaagaggatttgcaaaacatagatgatatagtaggcaagggcaggaataaaaagagctacgatgacattgacaaaaagcttttagtcgattatatgtgttcagccgcatcaaacttatctaagttaaaagataagctcatgtcatttataaaagagatggagatggaagatcttttaaaaaatgtggaaattccgcttattgaagtgctaaaatctatggaggtgtacggctttacattagataaagatgtacttagaagtatttctaaagaaatagatgaaaagacagataagattgtaaaagatatttacgatgctgctggatacgaatttaatattaactctacaaagcagttatcagaatttttgtttgataaactgaatttgccagcaataaaaaagactaaaacagggtattcgactgacatggaagtccttgcagaacttataccgtacaatgacatagtaggagaaataatagaatatagacagcttatgaagcttaaatctacgtacatagatggcttcattcccatcatggatgaaaataatagggtccactctacgtttaaacaaacagctgctgctacagggagaattagctcaacagagcctaatctgcagaacatacctgtaagagaagaatttggcaggaggataagaaaggcatttgtatcaagttatgaagatgggcttataatatctgctgattattctcagattgagctaagggttcttgcacatctttcagaggatgaaaaacttattgagtcatttttgaacaacgaagatatacatttaaggacggcatcggaggtttttaaggtttcgaaagaagaagtgacaagtgaaatgagaaggcgggcgaaagctgtcaactttggtattgtatatggtataagcgattacggcttatctaaagacttaaagatttcgcgaaaagaagcgaaagaatacatagacaattattttgacaggtacaagggcgtcaaaaattacatcgactcaattgtcaaatttgcaaaggaaaatgggtatgttacgactatcttaaataggagaagatacataccggaaatcaattcaaaaaattttaaccaaagatcttttggcgagagaatggcaatgaatacacctattcaaggtagcgctgcggatataataaagatgtcgatggttaaagtatacaatgaattaaaggaaagaggattgaaatcaagacttattcttcaggtgcacgatgagcttataattgacacacatcctgatgaagttgaaatagtcaaggagcttctaaaatcaataatggaaaatatcataaagttgaaagttcctttagttgtagatatagggcaagggaaaaactggtatgatgcaaaataaaaggatcc

SEQ ID NO: 948 - DNA, 2678 bp, Artificial Sequence
  Description of Artificial Sequence: Synthetic Clostridium thermosulfurogenes DNA Polymerase V623C
atgaaatacctgctgccgaccgctgctgctggtctgctgctcctcgctgcccagccggcgatggccatggcgaaatttttgatcatagatggtaatagcttgatgtacagggcgtattttgccctgcctgatttgatgaacagcgaaggaatgcatacaaatgccatatacggtttttcaatgatgcttcttaaattgctggaggaggagaaaccagactacatagcaatagctttcgataaaaaggcttctacatttaggcacaaggagtacagtgcttataaaggaacccgccagtcgatgccagaagagctgatagaacaggtggatattttaaaagatgtgataaatgcatttaacataaagaccatcgagatagagggatttgaagcagatgatatcattggtacagtatcaaaaattgcttccgaaagtgggatggatgtgcttatcgtcacaggcgacagagatgcgcttcagcttgtgtcggcaaatgtaaaagtaaaaatatgtaaaaaaggcataacgcagatggatgagtacgatgaaaaggcggtctttgaaaagtatgaagtgacgccgcttcaattcatagacttgaaagggcttatgggagacaaatcagacaacattccaggagtgcccaatataggggagaagacggccataaagcttgttaaagaatttggatcaattgaaaatttactgatgaatacagataagttaaaagggaaaataaaagaaaatgtagaaaacaatgcagaattagctgttttaagcaaacggcttgctacgattgagagaaatgttcctattgatattgatttgaatgaatacgcggttaaaaattacgatgtcaataagcttacagagctatttgaaaaattggaattttcaagcctcatctcagatttaaaagatgatagtcgtgatacaaaggatattaaagaatggcctgtaagagattttacatacgttaaaaatgttttaggaaagtttgatgttttgtcattgtatccattcatatatgatggaaagataaaagcagtatcatttgcttgcggtgacggatcgttttttgtagagattgatgattatgacaattttaaattgcttaataatgataagcttacgttgataggacacgatctgaaagattttttagtaaacatttcatactgcggtattgaacttaattgtaagattttagatacggccataatgacttatcttttaaatccgtctgagtcgaattacgacataagtcgcgtattgaaaaaatacttgaaagaggatttgcaaaacatagatgatatagtaggcaagggcaggaataaaaagagctacgatgacattgacaaaaagcttttagtcgattatatgtgttcagccgcatcaaacttatctaagttaaaagataagctcatgtcatttataaaagagatggagatggaagatcttttaaaaaatgtggaaattccgcttattgaagtgctaaaatctatggaggtgtacggctttacattagataaagatgtacttagaagtatttctaaagaaatagatgaaaagacagataagattgtaaaagatatttacgatgctgctggatacgaatttaatattaactctacaaagcagttatcagaatttttgtttgataaactgaatttgccagcaataaaaaagactaaaacagggtattcgactgacatggaagtccttgcagaacttataccgtacaatgacatagtaggagaaataatagaatatagacagcttatgaagcttaaatctacgtacatagatggcttcattcccatcatggatgaaaataatagggtccactctacgtttaaacaaacatgtgctgctacagggagaattagctcaacagagcctaatctgcagaacatacctgtaagagaagaatttggcaggaggataagaaaggcatttgtatcaagttatgaagatgggcttataatatctgctgattattctcagattgagctaagggttcttgcacatctttcagaggatgaaaaacttattgagtcatttttgaacaacgaagatatacatttaaggacggcatcggaggtttttaaggtttcgaaagaagaagtgacaagtgaaatgagaaggcgggcgaaagctgtcaactttggtattgtatatggtataagcgattacggcttatctaaagacttaaagatttcgcgaaaagaagcgaaagaatacatagacaattattttgacaggtacaagggcgtcaaaaattacatcgactcaattgtcaaatttgcaaaggaaaatgggtatgttacgactatcttaaataggagaagatacataccggaaatcaattcaaaaaattttaaccaaagatcttttggcgagagaatggcaatgaatacacctattcaaggtagcgctgcggatataataaagatgtcgatggttaaagtatacaatgaattaaaggaaagaggattgaaatcaagacttattcttcaggtgcacgatgagcttataattgacacacatcctgatgaagttgaaatagtcaaggagcttctaaaatcaataatggaaaatatcataaagttgaaagttcctttagttgtagatatagggcaagggaaaaactggtatgatgcaaaataaaaggatcc

SEQ ID NO: 949 - DNA, 2678 bp, Artificial Sequence
  Description of Artificial Sequence: Synthetic Clostridium thermosulfurogenes DNA Polymerase V623D
atgaaatacctgctgccgaccgctgctgctggtctgctgctcctcgctgcccagccggcgatggccatggcgaaatttttgatcatagatggtaatagcttgatgtacagggcgtattttgccctgcctgatttgatgaacagcgaaggaatgcatacaaatgccatatacggtttttcaatgatgcttcttaaattgctggaggaggagaaaccagactacatagcaatagctttcgataaaaaggcttctacatttaggcacaaggagtacagtgcttataaaggaacccgccagtcgatgccagaagagctgatagaacaggtggatattttaaaagatgtgataaatgcatttaacataaagaccatcgagatagagggatttgaagcagatgatatcattggtacagtatcaaaaattgcttccgaaagtgggatggatgtgcttatcgtcacaggcgacagagatgcgcttcagcttgtgtcggcaaatgtaaaagtaaaaatatgtaaaaaaggcataacgcagatggatgagtacgatgaaaaggcggtctttgaaaagtatgaagtgacgccgcttcaattcatagacttgaaagggcttatgggagacaaatcagacaacattccaggagtgcccaatataggggagaagacggccataaagcttgttaaagaatttggatcaattgaaaatttactgatgaatacagataagttaaaagggaaaataaaagaaaatgtagaaaacaatgcagaattagctgttttaagcaaacggcttgctacgattgagagaaatgttcctattgatattgatttgaatgaatacgcggttaaaaattacgatgtcaataagcttacagagctatttgaaaaattggaattttcaagcctcatctcagatttaaaagatgatagtcgtgatacaaaggatattaaagaatggcctgtaagagattttacatacgttaaaaatgttttaggaaagtttgatgttttgtcattgtatccattcatatatgatggaaagataaaagcagtatcatttgcttgcggtgacggatcgttttttgtagagattgatgattatgacaattttaaattgcttaataatgataagcttacgttgataggacacgatctgaaagattttttagtaaacatttcatactgcggtattgaacttaattgtaagattttagatacggccataatgacttatcttttaaatccgtctgagtcgaattacgacataagtcgcgtattgaaaaaatacttgaaagaggatttgcaaaacatagatgatatagtaggcaagggcaggaataaaaagagctacgatgacattgacaaaaagcttttagtcgattatatgtgttcagccgcatcaaacttatctaagttaaaagataagctcatgtcatttataaaagagatggagatggaagatcttttaaaaaatgtggaaattccgcttattgaagtgctaaaatctatggaggtgtacggctttacattagataaagatgtacttagaagtatttctaaagaaatagatgaaaagacagataagattgtaaaagatatttacgatgctgctggatacgaatttaatattaactctacaaagcagttatcagaatttttgtttgataaactgaatttgccagcaataaaaaagactaaaacagggtattcgactgacatggaagtccttgcagaacttataccgtacaatgacatagtaggagaaataatagaatatagacagcttatgaagcttaaatctacgtacatagatggcttcattcccatcatggatgaaaataatagggtccactctacgtttaaacaaacagatgctgctacagggagaattagctcaacagagcctaatctgcagaacatacctgtaagagaagaatttggcaggaggataagaaaggcatttgtatcaagttatgaagatgggcttataatatctgctgattattctcagattgagctaagggttcttgcacatctttcagaggatgaaaaacttattgagtcatttttgaacaacgaagatatacatttaaggacggcatcggaggtttttaaggtttcgaaagaagaagtgacaagtgaaatgagaaggcgggcgaaagctgtcaactttggtattgtatatggtataagcgattacggcttatctaaagacttaaagatttcgcgaaaagaagcgaaagaatacatagacaattattttgacaggtacaagggcgtcaaaaattacatcgactcaattgtcaaatttgcaaaggaaaatgggtatgttacgactatcttaaataggagaagatacataccggaaatcaattcaaaaaattttaaccaaagatcttttggcgagagaatggcaatgaatacacctattcaaggtagcgctgcggatataataaagatgtcgatggttaaagtatacaatgaattaaaggaaagaggattgaaatcaagacttattcttcaggtgcacgatgagcttataattgacacacatcctgatgaagttgaaatagtcaaggagcttctaaaatcaataatggaaaatatcataaagttgaaagttcctttagttgtagatatagggcaagggaaaaactggtatgatgcaaaataaaaggatcc

SEQ ID NO: 950 - DNA, 2678 bp, Artificial Sequence
  Description of Artificial Sequence: Synthetic Clostridium thermosulfurogenes DNA Polymerase V623F
atgaaatacctgctgccgaccgctgctgctggtctgctgctcctcgctgcccagccggcgatggccatggcgaaatttttgatcatagatggtaatagcttgatgtacagggcgtattttgccctgcctgatttgatgaacagcgaaggaatgcatacaaatgccatatacggtttttcaatgatgcttcttaaattgctggaggaggagaaaccagactacatagcaatagctttcgataaaaaggcttctacatttaggcacaaggagtacagtgcttataaaggaacccgccagtcgatgccagaagagctgatagaacaggtggatattttaaaagatgtgataaatgcatttaacataaagaccatcgagatagagggatttgaagcagatgatatcattggtacagtatcaaaaattgcttccgaaagtgggatggatgtgcttatcgtcacaggcgacagagatgcgcttcagcttgtgtcggcaaatgtaaaagtaaaaatatgtaaaaaaggcataacgcagatggatgagtacgatgaaaaggcggtctttgaaaagtatgaagtgacgccgcttcaattcatagacttgaaagggcttatgggagacaaatcagacaacattccaggagtgcccaatataggggagaagacggccataaagcttgttaaagaatttggatcaattgaaaatttactgatgaatacagataagttaaaagggaaaataaaagaaaatgtagaaaacaatgcagaattagctgttttaagcaaacggcttgctacgattgagagaaatgttcctattgatattgatttgaatgaatacgcggttaaaaattacgatgtcaataagcttacagagctatttgaaaaattggaattttcaagcctcatctcagatttaaaagatgatagtcgtgatacaaaggatattaaagaatggcctgtaagagattttacatacgttaaaaatgttttaggaaagtttgatgttttgtcattgtatccattcatatatgatggaaagataaaagcagtatcatttgcttgcggtgacggatcgttttttgtagagattgatgattatgacaattttaaattgcttaataatgataagcttacgttgataggacacgatctgaaagattttttagtaaacatttcatactgcggtattgaacttaattgtaagattttagatacggccataatgacttatcttttaaatccgtctgagtcgaattacgacataagtcgcgtattgaaaaaatacttgaaagaggatttgcaaaacatagatgatatagtaggcaagggcaggaataaaaagagctacgatgacattgacaaaaagcttttagtcgattatatgtgttcagccgcatcaaacttatctaagttaaaagataagctcatgtcatttataaaagagatggagatggaagatcttttaaaaaatgtggaaattccgcttattgaagtgctaaaatctatggaggtgtacggctttacattagataaagatgtacttagaagtatttctaaagaaatagatgaaaagacagataagattgtaaaagatatttacgatgctgctggatacgaatttaatattaactctacaaagcagttatcagaatttttgtttgataaactgaatttgccagcaataaaaaagactaaaacagggtattcgactgacatggaagtccttgcagaacttataccgtacaatgacatagtaggagaaataatagaatatagacagcttatgaagcttaaatctacgtacatagatggcttcattcccatcatggatgaaaataatagggtccactctacgtttaaacaaacatttgctgctacagggagaattagctcaacagagcctaatctgcagaacatacctgtaagagaagaatttggcaggaggataagaaaggcatttgtatcaagttatgaagatgggcttataatatctgctgattattctcagattgagctaagggttcttgcacatctttcagaggatgaaaaacttattgagtcatttttgaacaacgaagatatacatttaaggacggcatcggaggtttttaaggtttcgaaagaagaagtgacaagtgaaatgagaaggcgggcgaaagctgtcaactttggtattgtatatggtataagcgattacggcttatctaaagacttaaagatttcgcgaaaagaagcgaaagaatacatagacaattattttgacaggtacaagggcgtcaaaaattacatcgactcaattgtcaaatttgcaaaggaaaatgggtatgttacgactatcttaaataggagaagatacataccggaaatcaattcaaaaaattttaaccaaagatcttttggcgagagaatggcaatgaatacacctattcaaggtagcgctgcggatataataaagatgtcgatggttaaagtatacaatgaattaaaggaaagaggattgaaatcaagacttattcttcaggtgcacgatgagcttataattgacacacatcctgatgaagttgaaatagtcaaggagcttctaaaatcaataatggaaaatatcataaagttgaaagttcctttagttgtagatatagggcaagggaaaaactggtatgatgcaaaataaaaggatcc

SEQ ID NO: 951 - DNA, 2678 bp, Artificial Sequence
  Description of Artificial Sequence: Synthetic Clostridium thermosulfurogenes DNA Polymerase V623G
atgaaatacctgctgccgaccgctgctgctggtctgctgctcctcgctgcccagccggcgatggccatggcgaaatttttgatcatagatggtaatagcttgatgtacagggcgtattttgccctgcctgatttgatgaacagcgaaggaatgcatacaaatgccatatacggtttttcaatgatgcttcttaaattgctggaggaggagaaaccagactacatagcaatagctttcgataaaaaggcttctacatttaggcacaaggagtacagtgcttataaaggaacccgccagtcgatgccagaagagctgatagaacaggtggatattttaaaagatgtgataaatgcatttaacataaagaccatcgagatagagggatttgaagcagatgatatcattggtacagtatcaaaaattgcttccgaaagtgggatggatgtgcttatcgtcacaggcgacagagatgcgcttcagcttgtgtcggcaaatgtaaaagtaaaaatatgtaaaaaaggcataacgcagatggatgagtacgatgaaaaggcggtctttgaaaagtatgaagtgacgccgcttcaattcatagacttgaaagggcttatgggagacaaatcagacaacattccaggagtgcccaatataggggagaagacggccataaagcttgttaaagaatttggatcaattgaaaatttactgatgaatacagataagttaaaagggaaaataaaagaaaatgtagaaaacaatgcagaattagctgttttaagcaaacggcttgctacgattgagagaaatgttcctattgatattgatttgaatgaatacgcggttaaaaattacgatgtcaataagcttacagagctatttgaaaaattggaattttcaagcctcatctcagatttaaaagatgatagtcgtgatacaaaggatattaaagaatggcctgtaagagattttacatacgttaaaaatgttttaggaaagtttgatgttttgtcattgtatccattcatatatgatggaaagataaaagcagtatcatttgcttgcggtgacggatcgttttttgtagagattgatgattatgacaattttaaattgcttaataatgataagcttacgttgataggacacgatctgaaagattttttagtaaacatttcatactgcggtattgaacttaattgtaagattttagatacggccataatgacttatcttttaaatccgtctgagtcgaattacgacataagtcgcgtattgaaaaaatacttgaaagaggatttgcaaaacatagatgatatagtaggcaagggcaggaataaaaagagctacgatgacattgacaaaaagcttttagtcgattatatgtgttcagccgcatcaaacttatctaagttaaaagataagctcatgtcatttataaaagagatggagatggaagatcttttaaaaaatgtggaaattccgcttattgaagtgctaaaatctatggaggtgtacggctttacattagataaagatgtacttagaagtatttctaaagaaatagatgaaaagacagataagattgtaaaagatatttacgatgctgctggatacgaatttaatattaactctacaaagcagttatcagaatttttgtttgataaactgaatttgccagcaataaaaaagactaaaacagggtattcgactgacatggaagtccttgcagaacttataccgtacaatgacatagtaggagaaataatagaatatagacagcttatgaagcttaaatctacgtacatagatggcttcattcccatcatggatgaaaataatagggtccactctacgtttaaacaaacaggtgctgctacagggagaattagctcaacagagcctaatctgcagaacatacctgtaagagaagaatttggcaggaggataagaaaggcatttgtatcaagttatgaagatgggcttataatatctgctgattattctcagattgagctaagggttcttgcacatctttcagaggatgaaaaacttattgagtcatttttgaacaacgaagatatacatttaaggacggcatcggaggtttttaaggtttcgaaagaagaagtgacaagtgaaatgagaaggcgggcgaaagctgtcaactttggtattgtatatggtataagcgattacggcttatctaaagacttaaagatttcgcgaaaagaagcgaaagaatacatagacaattattttgacaggtacaagggcgtcaaaaattacatcgactcaattgtcaaatttgcaaaggaaaatgggtatgttacgactatcttaaataggagaagatacataccggaaatcaattcaaaaaattttaaccaaagatcttttggcgagagaatggcaatgaatacacctattcaaggtagcgctgcggatataataaagatgtcgatggttaaagtatacaatgaattaaaggaaagaggattgaaatcaagacttattcttcaggtgcacgatgagcttataattgacacacatcctgatgaagttgaaatagtcaaggagcttctaaaatcaataatggaaaatatcataaagttgaaagttcctttagttgtagatatagggcaagggaaaaactggtatgatgcaaaataaaaggatcc

SEQ ID NO: 952 - DNA, 2678 bp, Artificial Sequence
  Description of Artificial Sequence: Synthetic Clostridium thermosulfurogenes DNA Polymerase V623H
atgaaatacctgctgccgaccgctgctgctggtctgctgctcctcgctgcccagccggcgatggccatggcgaaatttttgatcatagatggtaatagcttgatgtacagggcgtattttgccctgcctgatttgatgaacagcgaaggaatgcatacaaatgccatatacggtttttcaatgatgcttcttaaattgctggaggaggagaaaccagactacatagcaatagctttcgataaaaaggcttctacatttaggcacaaggagtacagtgcttataaaggaacccgccagtcgatgccagaagagctgatagaacaggtggatattttaaaagatgtgataaatgcatttaacataaagaccatcgagatagagggatttgaagcagatgatatcattggtacagtatcaaaaattgcttccgaaagtgggatggatgtgcttatcgtcacaggcgacagagatgcgcttcagcttgtgtcggcaaatgtaaaagtaaaaatatgtaaaaaaggcataacgcagatggatgagtacgatgaaaaggcggtctttgaaaagtatgaagtgacgccgcttcaattcatagacttgaaagggcttatgggagacaaatcagacaacattccaggagtgcccaatataggggagaagacggccataaagcttgttaaagaatttggatcaattgaaaatttactgatgaatacagataagttaaaagggaaaataaaagaaaatgtagaaaacaatgcagaattagctgttttaagcaaacggcttgctacgattgagagaaatgttcctattgatattgatttgaatgaatacgcggttaaaaattacgatgtcaataagcttacagagctatttgaaaaattggaattttcaagcctcatctcagatttaaaagatgatagtcgtgatacaaaggatattaaagaatggcctgtaagagattttacatacgttaaaaatgttttaggaaagtttgatgttttgtcattgtatccattcatatatgatggaaagataaaagcagtatcatttgcttgcggtgacggatcgttttttgtagagattgatgattatgacaattttaaattgcttaataatgataagcttacgttgataggacacgatctgaaagattttttagtaaacatttcatactgcggtattgaacttaattgtaagattttagatacggccataatgacttatcttttaaatccgtctgagtcgaattacgacataagtcgcgtattgaaaaaatacttgaaagaggatttgcaaaacatagatgatatagtaggcaagggcaggaataaaaagagctacgatgacattgacaaaaagcttttagtcgattatatgtgttcagccgcatcaaacttatctaagttaaaagataagctcatgtcatttataaaagagatggagatggaagatcttttaaaaaatgtggaaattccgcttattgaagtgctaaaatctatggaggtgtacggctttacattagataaagatgtacttagaagtatttctaaagaaatagatgaaaagacagataagattgtaaaagatatttacgatgctgctggatacgaatttaatattaactctacaaagcagttatcagaatttttgtttgataaactgaatttgccagcaataaaaaagactaaaacagggtattcgactgacatggaagtccttgcagaacttataccgtacaatgacatagtaggagaaataatagaatatagacagcttatgaagcttaaatctacgtacatagatggcttcattcccatcatggatgaaaataatagggtccactctacgtttaaacaaacacatgctgctacagggagaattagctcaacagagcctaatctgcagaacatacctgtaagagaagaatttggcaggaggataagaaaggcatttgtatcaagttatgaagatgggcttataatatctgctgattattctcagattgagctaagggttcttgcacatctttcagaggatgaaaaacttattgagtcatttttgaacaacgaagatatacatttaaggacggcatcggaggtttttaaggtttcgaaagaagaagtgacaagtgaaatgagaaggcgggcgaaagctgtcaactttggtattgtatatggtataagcgattacggcttatctaaagacttaaagatttcgcgaaaagaagcgaaagaatacatagacaattattttgacaggtacaagggcgtcaaaaattacatcgactcaattgtcaaatttgcaaaggaaaatgggtatgttacgactatcttaaataggagaagatacataccggaaatcaattcaaaaaattttaaccaaagatcttttggcgagagaatggcaatgaatacacctattcaaggtagcgctgcggatataataaagatgtcgatggttaaagtatacaatgaattaaaggaaagaggattgaaatcaagacttattcttcaggtgcacgatgagcttataattgacacacatcctgatgaagttgaaatagtcaaggagcttctaaaatcaataatggaaaatatcataaagttgaaagttcctttagttgtagatatagggcaagggaaaaactggtatgatgcaaaataaaaggatcc

SEQ ID NO: 953 - DNA, 2678 bp, Artificial Sequence
  Description of Artificial Sequence: Synthetic Clostridium thermosulfurogenes DNA Polymerase V623I
atgaaatacctgctgccgaccgctgctgctggtctgctgctcctcgctgcccagccggcgatggccatggcgaaatttttgatcatagatggtaatagcttgatgtacagggcgtattttgccctgcctgatttgatgaacagcgaaggaatgcatacaaatgccatatacggtttttcaatgatgcttcttaaattgctggaggaggagaaaccagactacatagcaatagctttcgataaaaaggcttctacatttaggcacaaggagtacagtgcttataaaggaacccgccagtcgatgccagaagagctgatagaacaggtggatattttaaaagatgtgataaatgcatttaacataaagaccatcgagatagagggatttgaagcagatgatatcattggtacagtatcaaaaattgcttccgaaagtgggatggatgtgcttatcgtcacaggcgacagagatgcgcttcagcttgtgtcggcaaatgtaaaagtaaaaatatgtaaaaaaggcataacgcagatggatgagtacgatgaaaaggcggtctttgaaaagtatgaagtgacgccgcttcaattcatagacttgaaagggcttatgggagacaaatcagacaacattccaggagtgcccaatataggggagaagacggccataaagcttgttaaagaatttggatcaattgaaaatttactgatgaatacagataagttaaaagggaaaataaaagaaaatgtagaaaacaatgcagaattagctgttttaagcaaacggcttgctacgattgagagaaatgttcctattgatattgatttgaatgaatacgcggttaaaaattacgatgtcaataagcttacagagctatttgaaaaattggaattttcaagcctcatctcagatttaaaagatgatagtcgtgatacaaaggatattaaagaatggcctgtaagagattttacatacgttaaaaatgttttaggaaagtttgatgttttgtcattgtatccattcatatatgatggaaagataaaagcagtatcatttgcttgcggtgacggatcgttttttgtagagattgatgattatgacaattttaaattgcttaataatgataagcttacgttgataggacacgatctgaaagattttttagtaaacatttcatactgcggtattgaacttaattgtaagattttagatacggccataatgacttatcttttaaatccgtctgagtcgaattacgacataagtcgcgtattgaaaaaatacttgaaagaggatttgcaaaacatagatgatatagtaggcaagggcaggaataaaaagagctacgatgacattgacaaaaagcttttagtcgattatatgtgttcagccgcatcaaacttatctaagttaaaagataagctcatgtcatttataaaagagatggagatggaagatcttttaaaaaatgtggaaattccgcttattgaagtgctaaaatctatggaggtgtacggctttacattagataaagatgtacttagaagtatttctaaagaaatagatgaaaagacagataagattgtaaaagatatttacgatgctgctggatacgaatttaatattaactctacaaagcagttatcagaatttttgtttgataaactgaatttgccagcaataaaaaagactaaaacagggtattcgactgacatggaagtccttgcagaacttataccgtacaatgacatagtaggagaaataatagaatatagacagcttatgaagcttaaatctacgtacatagatggcttcattcccatcatggatgaaaataatagggtccactctacgtttaaacaaacaattgctgctacagggagaattagctcaacagagcctaatctgcagaacatacctgtaagagaagaatttggcaggaggataagaaaggcatttgtatcaagttatgaagatgggcttataatatctgctgattattctcagattgagctaagggttcttgcacatctttcagaggatgaaaaacttattgagtcatttttgaacaacgaagatatacatttaaggacggcatcggaggtttttaaggtttcgaaagaagaagtgacaagtgaaatgagaaggcgggcgaaagctgtcaactttggtattgtatatggtataagcgattacggcttatctaaagacttaaagatttcgcgaaaagaagcgaaagaatacatagacaattattttgacaggtacaagggcgtcaaaaattacatcgactcaattgtcaaatttgcaaaggaaaatgggtatgttacgactatcttaaataggagaagatacataccggaaatcaattcaaaaaattttaaccaaagatcttttggcgagagaatggcaatgaatacacctattcaaggtagcgctgcggatataataaagatgtcgatggttaaagtatacaatgaattaaaggaaagaggattgaaatcaagacttattcttcaggtgcacgatgagcttataattgacacacatcctgatgaagttgaaatagtcaaggagcttctaaaatcaataatggaaaatatcataaagttgaaagttcctttagttgtagatatagggcaagggaaaaactggtatgatgcaaaataaaaggatcc

SEQ ID NO: 954 - DNA, 2678 bp, Artificial Sequence
  Description of Artificial Sequence: Synthetic Clostridium thermosulfurogenes DNA Polymerase V623L
atgaaatacctgctgccgaccgctgctgctggtctgctgctcctcgctgcccagccggcgatggccatggcgaaatttttgatcatagatggtaatagcttgatgtacagggcgtattttgccctgcctgatttgatgaacagcgaaggaatgcatacaaatgccatatacggtttttcaatgatgcttcttaaattgctggaggaggagaaaccagactacatagcaatagctttcgataaaaaggcttctacatttaggcacaaggagtacagtgcttataaaggaacccgccagtcgatgccagaagagctgatagaacaggtggatattttaaaagatgtgataaatgcatttaacataaagaccatcgagatagagggatttgaagcagatgatatcattggtacagtatcaaaaattgcttccgaaagtgggatggatgtgcttatcgtcacaggcgacagagatgcgcttcagcttgtgtcggcaaatgtaaaagtaaaaatatgtaaaaaaggcataacgcagatggatgagtacgatgaaaaggcggtctttgaaaagtatgaagtgacgccgcttcaattcatagacttgaaagggcttatgggagacaaatcagacaacattccaggagtgcccaatataggggagaagacggccataaagcttgttaaagaatttggatcaattgaaaatttactgatgaatacagataagttaaaagggaaaataaaagaaaatgtagaaaacaatgcagaattagctgttttaagcaaacggcttgctacgattgagagaaatgttcctattgatattgatttgaatgaatacgcggttaaaaattacgatgtcaataagcttacagagctatttgaaaaattggaattttcaagcctcatctcagatttaaaagatgatagtcgtgatacaaaggatattaaagaatggcctgtaagagattttacatacgttaaaaatgttttaggaaagtttgatgttttgtcattgtatccattcatatatgatggaaagataaaagcagtatcatttgcttgcggtgacggatcgttttttgtagagattgatgattatgacaattttaaattgcttaataatgataagcttacgttgataggacacgatctgaaagattttttagtaaacatttcatactgcggtattgaacttaattgtaagattttagatacggccataatgacttatcttttaaatccgtctgagtcgaattacgacataagtcgcgtattgaaaaaatacttgaaagaggatttgcaaaacatagatgatatagtaggcaagggcaggaataaaaagagctacgatgacattgacaaaaagcttttagtcgattatatgtgttcagccgcatcaaacttatctaagttaaaagataagctcatgtcatttataaaagagatggagatggaagatcttttaaaaaatgtggaaattccgcttattgaagtgctaaaatctatggaggtgtacggctttacattagataaagatgtacttagaagtatttctaaagaaatagatgaaaagacagataagattgtaaaagatatttacgatgctgctggatacgaatttaatattaactctacaaagcagttatcagaatttttgtttgataaactgaatttgccagcaataaaaaagactaaaacagggtattcgactgacatggaagtccttgcagaacttataccgtacaatgacatagtaggagaaataatagaatatagacagcttatgaagcttaaatctacgtacatagatggcttcattcccatcatggatgaaaataatagggtccactctacgtttaaacaaacacttgctgctacagggagaattagctcaacagagcctaatctgcagaacatacctgtaagagaagaatttggcaggaggataagaaaggcatttgtatcaagttatgaagatgggcttataatatctgctgattattctcagattgagctaagggttcttgcacatctttcagaggatgaaaaacttattgagtcatttttgaacaacgaagatatacatttaaggacggcatcggaggtttttaaggtttcgaaagaagaagtgacaagtgaaatgagaaggcgggcgaaagctgtcaactttggtattgtatatggtataagcgattacggcttatctaaagacttaaagatttcgcgaaaagaagcgaaagaatacatagacaattattttgacaggtacaagggcgtcaaaaattacatcgactcaattgtcaaatttgcaaaggaaaatgggtatgttacgactatcttaaataggagaagatacataccggaaatcaattcaaaaaattttaaccaaagatcttttggcgagagaatggcaatgaatacacctattcaaggtagcgctgcggatataataaagatgtcgatggttaaagtatacaatgaattaaaggaaagaggattgaaatcaagacttattcttcaggtgcacgatgagcttataattgacacacatcctgatgaagttgaaatagtcaaggagcttctaaaatcaataatggaaaatatcataaagttgaaagttcctttagttgtagatatagggcaagggaaaaactggtatgatgcaaaataaaaggatcc

SEQ ID NO: 955 - DNA, 2678 bp, Artificial Sequence
  Description of Artificial Sequence: Synthetic Clostridium thermosulfurogenes DNA Polymerase V623M
atgaaatacctgctgccgaccgctgctgctggtctgctgctcctcgctgcccagccggcgatggccatggcgaaatttttgatcatagatggtaatagcttgatgtacagggcgtattttgccctgcctgatttgatgaacagcgaaggaatgcatacaaatgccatatacggtttttcaatgatgcttcttaaattgctggaggaggagaaaccagactacatagcaatagctttcgataaaaaggcttctacatttaggcacaaggagtacagtgcttataaaggaacccgccagtcgatgccagaagagctgatagaacaggtggatattttaaaagatgtgataaatgcatttaacataaagaccatcgagatagagggatttgaagcagatgatatcattggtacagtatcaaaaattgcttccgaaagtgggatggatgtgcttatcgtcacaggcgacagagatgcgcttcagcttgtgtcggcaaatgtaaaagtaaaaatatgtaaaaaaggcataacgcagatggatgagtacgatgaaaaggcggtctttgaaaagtatgaagtgacgccgcttcaattcatagacttgaaagggcttatgggagacaaatcagacaacattccaggagtgcccaatataggggagaagacggccataaagcttgttaaagaatttggatcaattgaaaatttactgatgaatacagataagttaaaagggaaaataaaagaaaatgtagaaaacaatgcagaattagctgttttaagcaaacggcttgctacgattgagagaaatgttcctattgatattgatttgaatgaatacgcggttaaaaattacgatgtcaataagcttacagagctatttgaaaaattggaattttcaagcctcatctcagatttaaaagatgatagtcgtgatacaaaggatattaaagaatggcctgtaagagattttacatacgttaaaaatgttttaggaaagtttgatgttttgtcattgtatccattcatatatgatggaaagataaaagcagtatcatttgcttgcggtgacggatcgttttttgtagagattgatgattatgacaattttaaattgcttaataatgataagcttacgttgataggacacgatctgaaagattttttagtaaacatttcatactgcggtattgaacttaattgtaagattttagatacggccataatgacttatcttttaaatccgtctgagtcgaattacgacataagtcgcgtattgaaaaaatacttgaaagaggatttgcaaaacatagatgatatagtaggcaagggcaggaataaaaagagctacgatgacattgacaaaaagcttttagtcgattatatgtgttcagccgcatcaaacttatctaagttaaaagataagctcatgtcatttataaaagagatggagatggaagatcttttaaaaaatgtggaaattccgcttattgaagtgctaaaatctatggaggtgtacggctttacattagataaagatgtacttagaagtatttctaaagaaatagatgaaaagacagataagattgtaaaagatatttacgatgctgctggatacgaatttaatattaactctacaaagcagttatcagaatttttgtttgataaactgaatttgccagcaataaaaaagactaaaacagggtattcgactgacatggaagtccttgcagaacttataccgtacaatgacatagtaggagaaataatagaatatagacagcttatgaagcttaaatctacgtacatagatggcttcattcccatcatggatgaaaataatagggtccactctacgtttaaacaaacaatggctgctacagggagaattagctcaacagagcctaatctgcagaacatacctgtaagagaagaatttggcaggaggataagaaaggcatttgtatcaagttatgaagatgggcttataatatctgctgattattctcagattgagctaagggttcttgcacatctttcagaggatgaaaaacttattgagtcatttttgaacaacgaagatatacatttaaggacggcatcggaggtttttaaggtttcgaaagaagaagtgacaagtgaaatgagaaggcgggcgaaagctgtcaactttggtattgtatatggtataagcgattacggcttatctaaagacttaaagatttcgcgaaaagaagcgaaagaatacatagacaattattttgacaggtacaagggcgtcaaaaattacatcgactcaattgtcaaatttgcaaaggaaaatgggtatgttacgactatcttaaataggagaagatacataccggaaatcaattcaaaaaattttaaccaaagatcttttggcgagagaatggcaatgaatacacctattcaaggtagcgctgcggatataataaagatgtcgatggttaaagtatacaatgaattaaaggaaagaggattgaaatcaagacttattcttcaggtgcacgatgagcttataattgacacacatcctgatgaagttgaaatagtcaaggagcttctaaaatcaataatggaaaatatcataaagttgaaagttcctttagttgtagatatagggcaagggaaaaactggtatgatgcaaaataaaaggatcc

SEQ ID NO: 956 - DNA, 2678 bp, Artificial Sequence
  Description of Artificial Sequence: Synthetic Clostridium thermosulfurogenes DNA Polymerase V623N
atgaaatacctgctgccgaccgctgctgctggtctgctgctcctcgctgcccagccggcgatggccatggcgaaatttttgatcatagatggtaatagcttgatgtacagggcgtattttgccctgcctgatttgatgaacagcgaaggaatgcatacaaatgccatatacggtttttcaatgatgcttcttaaattgctggaggaggagaaaccagactacatagcaatagctttcgataaaaaggcttctacatttaggcacaaggagtacagtgcttataaaggaacccgccagtcgatgccagaagagctgatagaacaggtggatattttaaaagatgtgataaatgcatttaacataaagaccatcgagatagagggatttgaagcagatgatatcattggtacagtatcaaaaattgcttccgaaagtgggatggatgtgcttatcgtcacaggcgacagagatgcgcttcagcttgtgtcggcaaatgtaaaagtaaaaatatgtaaaaaaggcataacgcagatggatgagtacgatgaaaaggcggtctttgaaaagtatgaagtgacgccgcttcaattcatagacttgaaagggcttatgggagacaaatcagacaacattccaggagtgcccaatataggggagaagacggccataaagcttgttaaagaatttggatcaattgaaaatttactgatgaatacagataagttaaaagggaaaataaaagaaaatgtagaaaacaatgcagaattagctgttttaagcaaacggcttgctacgattgagagaaatgttcctattgatattgatttgaatgaatacgcggttaaaaattacgatgtcaataagcttacagagctatttgaaaaattggaattttcaagcctcatctcagatttaaaagatgatagtcgtgatacaaaggatattaaagaatggcctgtaagagattttacatacgttaaaaatgttttaggaaagtttgatgttttgtcattgtatccattcatatatgatggaaagataaaagcagtatcatttgcttgcggtgacggatcgttttttgtagagattgatgattatgacaattttaaattgcttaataatgataagcttacgttgataggacacgatctgaaagattttttagtaaacatttcatactgcggtattgaacttaattgtaagattttagatacggccataatgacttatcttttaaatccgtctgagtcgaattacgacataagtcgcgtattgaaaaaatacttgaaagaggatttgcaaaacatagatgatatagtaggcaagggcaggaataaaaagagctacgatgacattgacaaaaagcttttagtcgattatatgtgttcagccgcatcaaacttatctaagttaaaagataagctcatgtcatttataaaagagatggagatggaagatcttttaaaaaatgtggaaattccgcttattgaagtgctaaaatctatggaggtgtacggctttacattagataaagatgtacttagaagtatttctaaagaaatagatgaaaagacagataagattgtaaaagatatttacgatgctgctggatacgaatttaatattaactctacaaagcagttatcagaatttttgtttgataaactgaatttgccagcaataaaaaagactaaaacagggtattcgactgacatggaagtccttgcagaacttataccgtacaatgacatagtaggagaaataatagaatatagacagcttatgaagcttaaatctacgtacatagatggcttcattcccatcatggatgaaaataatagggtccactctacgtttaaacaaacaaatgctgctacagggagaattagctcaacagagcctaatctgcagaacatacctgtaagagaagaatttggcaggaggataagaaaggcatttgtatcaagttatgaagatgggcttataatatctgctgattattctcagattgagctaagggttcttgcacatctttcagaggatgaaaaacttattgagtcatttttgaacaacgaagatatacatttaaggacggcatcggaggtttttaaggtttcgaaagaagaagtgacaagtgaaatgagaaggcgggcgaaagctgtcaactttggtattgtatatggtataagcgattacggcttatctaaagacttaaagatttcgcgaaaagaagcgaaagaatacatagacaattattttgacaggtacaagggcgtcaaaaattacatcgactcaattgtcaaatttgcaaaggaaaatgggtatgttacgactatcttaaataggagaagatacataccggaaatcaattcaaaaaattttaaccaaagatcttttggcgagagaatggcaatgaatacacctattcaaggtagcgctgcggatataataaagatgtcgatggttaaagtatacaatgaattaaaggaaagaggattgaaatcaagacttattcttcaggtgcacgatgagcttataattgacacacatcctgatgaagttgaaatagtcaaggagcttctaaaatcaataatggaaaatatcataaagttgaaagttcctttagttgtagatatagggcaagggaaaaactggtatgatgcaaaataaaaggatcc

SEQ ID NO: 957 - DNA, 2678 bp, Artificial Sequence
  Description of Artificial Sequence: Synthetic Clostridium thermosulfurogenes DNA Polymerase V623P
atgaaatacctgctgccgaccgctgctgctggtctgctgctcctcgctgcccagccggcgatggccatggcgaaatttttgatcatagatggtaatagcttgatgtacagggcgtattttgccctgcctgatttgatgaacagcgaaggaatgcatacaaatgccatatacggtttttcaatgatgcttcttaaattgctggaggaggagaaaccagactacatagcaatagctttcgataaaaaggcttctacatttaggcacaaggagtacagtgcttataaaggaacccgccagtcgatgccagaagagctgatagaacaggtggatattttaaaagatgtgataaatgcatttaacataaagaccatcgagatagagggatttgaagcagatgatatcattggtacagtatcaaaaattgcttccgaaagtgggatggatgtgcttatcgtcacaggcgacagagatgcgcttcagcttgtgtcggcaaatgtaaaagtaaaaatatgtaaaaaaggcataacgcagatggatgagtacgatgaaaaggcggtctttgaaaagtatgaagtgacgccgcttcaattcatagacttgaaagggcttatgggagacaaatcagacaacattccaggagtgcccaatataggggagaagacggccataaagcttgttaaagaatttggatcaattgaaaatttactgatgaatacagataagttaaaagggaaaataaaagaaaatgtagaaaacaatgcagaattagctgttttaagcaaacggcttgctacgattgagagaaatgttcctattgatattgatttgaatgaatacgcggttaaaaattacgatgtcaataagcttacagagctatttgaaaaattggaattttcaagcctcatctcagatttaaaagatgatagtcgtgatacaaaggatattaaagaatggcctgtaagagattttacatacgttaaaaatgttttaggaaagtttgatgttttgtcattgtatccattcatatatgatggaaagataaaagcagtatcatttgcttgcggtgacggatcgttttttgtagagattgatgattatgacaattttaaattgcttaataatgataagcttacgttgataggacacgatctgaaagattttttagtaaacatttcatactgcggtattgaacttaattgtaagattttagatacggccataatgacttatcttttaaatccgtctgagtcgaattacgacataagtcgcgtattgaaaaaatacttgaaagaggatttgcaaaacatagatgatatagtaggcaagggcaggaataaaaagagctacgatgacattgacaaaaagcttttagtcgattatatgtgttcagccgcatcaaacttatctaagttaaaagataagctcatgtcatttataaaagagatggagatggaagatcttttaaaaaatgtggaaattccgcttattgaagtgctaaaatctatggaggtgtacggctttacattagataaagatgtacttagaagtatttctaaagaaatagatgaaaagacagataagattgtaaaagatatttacgatgctgctggatacgaatttaatattaactctacaaagcagttatcagaatttttgtttgataaactgaatttgccagcaataaaaaagactaaaacagggtattcgactgacatggaagtccttgcagaacttataccgtacaatgacatagtaggagaaataatagaatatagacagcttatgaagcttaaatctacgtacatagatggcttcattcccatcatggatgaaaataatagggtccactctacgtttaaacaaacacctgctgctacagggagaattagctcaacagagcctaatctgcagaacatacctgtaagagaagaatttggcaggaggataagaaaggcatttgtatcaagttatgaagatgggcttataatatctgctgattattctcagattgagctaagggttcttgcacatctttcagaggatgaaaaacttattgagtcatttttgaacaacgaagatatacatttaaggacggcatcggaggtttttaaggtttcgaaagaagaagtgacaagtgaaatgagaaggcgggcgaaagctgtcaactttggtattgtatatggtataagcgattacggcttatctaaagacttaaagatttcgcgaaaagaagcgaaagaatacatagacaattattttgacaggtacaagggcgtcaaaaattacatcgactcaattgtcaaatttgcaaaggaaaatgggtatgttacgactatcttaaataggagaagatacataccggaaatcaattcaaaaaattttaaccaaagatcttttggcgagagaatggcaatgaatacacctattcaaggtagcgctgcggatataataaagatgtcgatggttaaagtatacaatgaattaaaggaaagaggattgaaatcaagacttattcttcaggtgcacgatgagcttataattgacacacatcctgatgaagttgaaatagtcaaggagcttctaaaatcaataatggaaaatatcataaagttgaaagttcctttagttgtagatatagggcaagggaaaaactggtatgatgcaaaataaaaggatcc

SEQ ID NO: 958 - DNA, 2678 bp, Artificial Sequence
  Description of Artificial Sequence: Synthetic Clostridium thermosulfurogenes DNA Polymerase V623Q
atgaaatacctgctgccgaccgctgctgctggtctgctgctcctcgctgcccagccggcgatggccatggcgaaatttttgatcatagatggtaatagcttgatgtacagggcgtattttgccctgcctgatttgatgaacagcgaaggaatgcatacaaatgccatatacggtttttcaatgatgcttcttaaattgctggaggaggagaaaccagactacatagcaatagctttcgataaaaaggcttctacatttaggcacaaggagtacagtgcttataaaggaacccgccagtcgatgccagaagagctgatagaacaggtggatattttaaaagatgtgataaatgcatttaacataaagaccatcgagatagagggatttgaagcagatgatatcattggtacagtatcaaaaattgcttccgaaagtgggatggatgtgcttatcgtcacaggcgacagagatgcgcttcagcttgtgtcggcaaatgtaaaagtaaaaatatgtaaaaaaggcataacgcagatggatgagtacgatgaaaaggcggtctttgaaaagtatgaagtgacgccgcttcaattcatagacttgaaagggcttatgggagacaaatcagacaacattccaggagtgcccaatataggggagaagacggccataaagcttgttaaagaatttggatcaattgaaaatttactgatgaatacagataagttaaaagggaaaataaaagaaaatgtagaaaacaatgcagaattagctgttttaagcaaacggcttgctacgattgagagaaatgttcctattgatattgatttgaatgaatacgcggttaaaaattacgatgtcaataagcttacagagctatttgaaaaattggaattttcaagcctcatctcagatttaaaagatgatagtcgtgatacaaaggatattaaagaatggcctgtaagagattttacatacgttaaaaatgttttaggaaagtttgatgttttgtcattgtatccattcatatatgatggaaagataaaagcagtatcatttgcttgcggtgacggatcgttttttgtagagattgatgattatgacaattttaaattgcttaataatgataagcttacgttgataggacacgatctgaaagattttttagtaaacatttcatactgcggtattgaacttaattgtaagattttagatacggccataatgacttatcttttaaatccgtctgagtcgaattacgacataagtcgcgtattgaaaaaatacttgaaagaggatttgcaaaacatagatgatatagtaggcaagggcaggaataaaaagagctacgatgacattgacaaaaagcttttagtcgattatatgtgttcagccgcatcaaacttatctaagttaaaagataagctcatgtcatttataaaagagatggagatggaagatcttttaaaaaatgtggaaattccgcttattgaagtgctaaaatctatggaggtgtacggctttacattagataaagatgtacttagaagtatttctaaagaaatagatgaaaagacagataagattgtaaaagatatttacgatgctgctggatacgaatttaatattaactctacaaagcagttatcagaatttttgtttgataaactgaatttgccagcaataaaaaagactaaaacagggtattcgactgacatggaagtccttgcagaacttataccgtacaatgacatagtaggagaaataatagaatatagacagcttatgaagcttaaatctacgtacatagatggcttcattcccatcatggatgaaaataatagggtccactctacgtttaaacaaacacaagctgctacagggagaattagctcaacagagcctaatctgcagaacatacctgtaagagaagaatttggcaggaggataagaaaggcatttgtatcaagttatgaagatgggcttataatatctgctgattattctcagattgagctaagggttcttgcacatctttcagaggatgaaaaacttattgagtcatttttgaacaacgaagatatacatttaaggacggcatcggaggtttttaaggtttcgaaagaagaagtgacaagtgaaatgagaaggcgggcgaaagctgtcaactttggtattgtatatggtataagcgattacggcttatctaaagacttaaagatttcgcgaaaagaagcgaaagaatacatagacaattattttgacaggtacaagggcgtcaaaaattacatcgactcaattgtcaaatttgcaaaggaaaatgggtatgttacgactatcttaaataggagaagatacataccggaaatcaattcaaaaaattttaaccaaagatcttttggcgagagaatggcaatgaatacacctattcaaggtagcgctgcggatataataaagatgtcgatggttaaagtatacaatgaattaaaggaaagaggattgaaatcaagacttattcttcaggtgcacgatgagcttataattgacacacatcctgatgaagttgaaatagtcaaggagcttctaaaatcaataatggaaaatatcataaagttgaaagttcctttagttgtagatatagggcaagggaaaaactggtatgatgcaaaataaaaggatcc

SEQ ID NO: 959 - DNA, 2678 bp, Artificial Sequence
  Description of Artificial Sequence: Synthetic Clostridium thermosulfurogenes DNA Polymerase V623R
atgaaatacctgctgccgaccgctgctgctggtctgctgctcctcgctgcccagccggcgatggccatggcgaaatttttgatcatagatggtaatagcttgatgtacagggcgtattttgccctgcctgatttgatgaacagcgaaggaatgcatacaaatgccatatacggtttttcaatgatgcttcttaaattgctggaggaggagaaaccagactacatagcaatagctttcgataaaaaggcttctacatttaggcacaaggagtacagtgcttataaaggaacccgccagtcgatgccagaagagctgatagaacaggtggatattttaaaagatgtgataaatgcatttaacataaagaccatcgagatagagggatttgaagcagatgatatcattggtacagtatcaaaaattgcttccgaaagtgggatggatgtgcttatcgtcacaggcgacagagatgcgcttcagcttgtgtcggcaaatgtaaaagtaaaaatatgtaaaaaaggcataacgcagatggatgagtacgatgaaaaggcggtctttgaaaagtatgaagtgacgccgcttcaattcatagacttgaaagggcttatgggagacaaatcagacaacattccaggagtgcccaatataggggagaagacggccataaagcttgttaaagaatttggatcaattgaaaatttactgatgaatacagataagttaaaagggaaaataaaagaaaatgtagaaaacaatgcagaattagctgttttaagcaaacggcttgctacgattgagagaaatgttcctattgatattgatttgaatgaatacgcggttaaaaattacgatgtcaataagcttacagagctatttgaaaaattggaattttcaagcctcatctcagatttaaaagatgatagtcgtgatacaaaggatattaaagaatggcctgtaagagattttacatacgttaaaaatgttttaggaaagtttgatgttttgtcattgtatccattcatatatgatggaaagataaaagcagtatcatttgcttgcggtgacggatcgttttttgtagagattgatgattatgacaattttaaattgcttaataatgataagcttacgttgataggacacgatctgaaagattttttagtaaacatttcatactgcggtattgaacttaattgtaagattttagatacggccataatgacttatcttttaaatccgtctgagtcgaattacgacataagtcgcgtattgaaaaaatacttgaaagaggatttgcaaaacatagatgatatagtaggcaagggcaggaataaaaagagctacgatgacattgacaaaaagcttttagtcgattatatgtgttcagccgcatcaaacttatctaagttaaaagataagctcatgtcatttataaaagagatggagatggaagatcttttaaaaaatgtggaaattccgcttattgaagtgctaaaatctatggaggtgtacggctttacattagataaagatgtacttagaagtatttctaaagaaatagatgaaaagacagataagattgtaaaagatatttacgatgctgctggatacgaatttaatattaactctacaaagcagttatcagaatttttgtttgataaactgaatttgccagcaataaaaaagactaaaacagggtattcgactgacatggaagtccttgcagaacttataccgtacaatgacatagtaggagaaataatagaatatagacagcttatgaagcttaaatctacgtacatagatggcttcattcccatcatggatgaaaataatagggtccactctacgtttaaacaaacacgtgctgctacagggagaattagctcaacagagcctaatctgcagaacatacctgtaagagaagaatttggcaggaggataagaaaggcatttgtatcaagttatgaagatgggcttataatatctgctgattattctcagattgagctaagggttcttgcacatctttcagaggatgaaaaacttattgagtcatttttgaacaacgaagatatacatttaaggacggcatcggaggtttttaaggtttcgaaagaagaagtgacaagtgaaatgagaaggcgggcgaaagctgtcaactttggtattgtatatggtataagcgattacggcttatctaaagacttaaagatttcgcgaaaagaagcgaaagaatacatagacaattattttgacaggtacaagggcgtcaaaaattacatcgactcaattgtcaaatttgcaaaggaaaatgggtatgttacgactatcttaaataggagaagatacataccggaaatcaattcaaaaaattttaaccaaagatcttttggcgagagaatggcaatgaatacacctattcaaggtagcgctgcggatataataaagatgtcgatggttaaagtatacaatgaattaaaggaaagaggattgaaatcaagacttattcttcaggtgcacgatgagcttataattgacacacatcctgatgaagttgaaatagtcaaggagcttctaaaatcaataatggaaaatatcataaagttgaaagttcctttagttgtagatatagggcaagggaaaaactggtatgatgcaaaataaaaggatcc

SEQ ID NO: 960 - DNA, 2678 bp, Artificial Sequence
  Description of Artificial Sequence: Synthetic Clostridium thermosulfurogenes DNA Polymerase V623S
atgaaatacctgctgccgaccgctgctgctggtctgctgctcctcgctgcccagccggcgatggccatggcgaaatttttgatcatagatggtaatagcttgatgtacagggcgtattttgccctgcctgatttgatgaacagcgaaggaatgcatacaaatgccatatacggtttttcaatgatgcttcttaaattgctggaggaggagaaaccagactacatagcaatagctttcgataaaaaggcttctacatttaggcacaaggagtacagtgcttataaaggaacccgccagtcgatgccagaagagctgatagaacaggtggatattttaaaagatgtgataaatgcatttaacataaagaccatcgagatagagggatttgaagcagatgatatcattggtacagtatcaaaaattgcttccgaaagtgggatggatgtgcttatcgtcacaggcgacagagatgcgcttcagcttgtgtcggcaaatgtaaaagtaaaaatatgtaaaaaaggcataacgcagatggatgagtacgatgaaaaggcggtctttgaaaagtatgaagtgacgccgcttcaattcatagacttgaaagggcttatgggagacaaatcagacaacattccaggagtgcccaatataggggagaagacggccataaagcttgttaaagaatttggatcaattgaaaatttactgatgaatacagataagttaaaagggaaaataaaagaaaatgtagaaaacaatgcagaattagctgttttaagcaaacggcttgctacgattgagagaaatgttcctattgatattgatttgaatgaatacgcggttaaaaattacgatgtcaataagcttacagagctatttgaaaaattggaattttcaagcctcatctcagatttaaaagatgatagtcgtgatacaaaggatattaaagaatggcctgtaagagattttacatacgttaaaaatgttttaggaaagtttgatgttttgtcattgtatccattcatatatgatggaaagataaaagcagtatcatttgcttgcggtgacggatcgttttttgtagagattgatgattatgacaattttaaattgcttaataatgataagcttacgttgataggacacgatctgaaagattttttagtaaacatttcatactgcggtattgaacttaattgtaagattttagatacggccataatgacttatcttttaaatccgtctgagtcgaattacgacataagtcgcgtattgaaaaaatacttgaaagaggatttgcaaaacatagatgatatagtaggcaagggcaggaataaaaagagctacgatgacattgacaaaaagcttttagtcgattatatgtgttcagccgcatcaaacttatctaagttaaaagataagctcatgtcatttataaaagagatggagatggaagatcttttaaaaaatgtggaaattccgcttattgaagtgctaaaatctatggaggtgtacggctttacattagataaagatgtacttagaagtatttctaaagaaatagatgaaaagacagataagattgtaaaagatatttacgatgctgctggatacgaatttaatattaactctacaaagcagttatcagaatttttgtttgataaactgaatttgccagcaataaaaaagactaaaacagggtattcgactgacatggaagtccttgcagaacttataccgtacaatgacatagtaggagaaataatagaatatagacagcttatgaagcttaaatctacgtacatagatggcttcattcccatcatggatgaaaataatagggtccactctacgtttaaacaaacatctgctgctacagggagaattagctcaacagagcctaatctgcagaacatacctgtaagagaagaatttggcaggaggataagaaaggcatttgtatcaagttatgaagatgggcttataatatctgctgattattctcagattgagctaagggttcttgcacatctttcagaggatgaaaaacttattgagtcatttttgaacaacgaagatatacatttaaggacggcatcggaggtttttaaggtttcgaaagaagaagtgacaagtgaaatgagaaggcgggcgaaagctgtcaactttggtattgtatatggtataagcgattacggcttatctaaagacttaaagatttcgcgaaaagaagcgaaagaatacatagacaattattttgacaggtacaagggcgtcaaaaattacatcgactcaattgtcaaatttgcaaaggaaaatgggtatgttacgactatcttaaataggagaagatacataccggaaatcaattcaaaaaattttaaccaaagatcttttggcgagagaatggcaatgaatacacctattcaaggtagcgctgcggatataataaagatgtcgatggttaaagtatacaatgaattaaaggaaagaggattgaaatcaagacttattcttcaggtgcacgatgagcttataattgacacacatcctgatgaagttgaaatagtcaaggagcttctaaaatcaataatggaaaatatcataaagttgaaagttcctttagttgtagatatagggcaagggaaaaactggtatgatgcaaaataaaaggatcc

SEQ ID NO: 961 - DNA, 2678 bp, Artificial Sequence
  Description of Artificial Sequence: Synthetic Clostridium thermosulfurogenes DNA Polymerase V623T
atgaaatacctgctgccgaccgctgctgctggtctgctgctcctcgctgcccagccggcgatggccatggcgaaatttttgatcatagatggtaatagcttgatgtacagggcgtattttgccctgcctgatttgatgaacagcgaaggaatgcatacaaatgccatatacggtttttcaatgatgcttcttaaattgctggaggaggagaaaccagactacatagcaatagctttcgataaaaaggcttctacatttaggcacaaggagtacagtgcttataaaggaacccgccagtcgatgccagaagagctgatagaacaggtggatattttaaaagatgtgataaatgcatttaacataaagaccatcgagatagagggatttgaagcagatgatatcattggtacagtatcaaaaattgcttccgaaagtgggatggatgtgcttatcgtcacaggcgacagagatgcgcttcagcttgtgtcggcaaatgtaaaagtaaaaatatgtaaaaaaggcataacgcagatggatgagtacgatgaaaaggcggtctttgaaaagtatgaagtgacgccgcttcaattcatagacttgaaagggcttatgggagacaaatcagacaacattccaggagtgcccaatataggggagaagacggccataaagcttgttaaagaatttggatcaattgaaaatttactgatgaatacagataagttaaaagggaaaataaaagaaaatgtagaaaacaatgcagaattagctgttttaagcaaacggcttgctacgattgagagaaatgttcctattgatattgatttgaatgaatacgcggttaaaaattacgatgtcaataagcttacagagctatttgaaaaattggaattttcaagcctcatctcagatttaaaagatgatagtcgtgatacaaaggatattaaagaatggcctgtaagagattttacatacgttaaaaatgttttaggaaagtttgatgttttgtcattgtatccattcatatatgatggaaagataaaagcagtatcatttgcttgcggtgacggatcgttttttgtagagattgatgattatgacaattttaaattgcttaataatgataagcttacgttgataggacacgatctgaaagattttttagtaaacatttcatactgcggtattgaacttaattgtaagattttagatacggccataatgacttatcttttaaatccgtctgagtcgaattacgacataagtcgcgtattgaaaaaatacttgaaagaggatttgcaaaacatagatgatatagtaggcaagggcaggaataaaaagagctacgatgacattgacaaaaagcttttagtcgattatatgtgttcagccgcatcaaacttatctaagttaaaagataagctcatgtcatttataaaagagatggagatggaagatcttttaaaaaatgtggaaattccgcttattgaagtgctaaaatctatggaggtgtacggctttacattagataaagatgtacttagaagtatttctaaagaaatagatgaaaagacagataagattgtaaaagatatttacgatgctgctggatacgaatttaatattaactctacaaagcagttatcagaatttttgtttgataaactgaatttgccagcaataaaaaagactaaaacagggtattcgactgacatggaagtccttgcagaacttataccgtacaatgacatagtaggagaaataatagaatatagacagcttatgaagcttaaatctacgtacatagatggcttcattcccatcatggatgaaaataatagggtccactctacgtttaaacaaacaactgctgctacagggagaattagctcaacagagcctaatctgcagaacatacctgtaagagaagaatttggcaggaggataagaaaggcatttgtatcaagttatgaagatgggcttataatatctgctgattattctcagattgagctaagggttcttgcacatctttcagaggatgaaaaacttattgagtcatttttgaacaacgaagatatacatttaaggacggcatcggaggtttttaaggtttcgaaagaagaagtgacaagtgaaatgagaaggcgggcgaaagctgtcaactttggtattgtatatggtataagcgattacggcttatctaaagacttaaagatttcgcgaaaagaagcgaaagaatacatagacaattattttgacaggtacaagggcgtcaaaaattacatcgactcaattgtcaaatttgcaaaggaaaatgggtatgttacgactatcttaaataggagaagatacataccggaaatcaattcaaaaaattttaaccaaagatcttttggcgagagaatggcaatgaatacacctattcaaggtagcgctgcggatataataaagatgtcgatggttaaagtatacaatgaattaaaggaaagaggattgaaatcaagacttattcttcaggtgcacgatgagcttataattgacacacatcctgatgaagttgaaatagtcaaggagcttctaaaatcaataatggaaaatatcataaagttgaaagttcctttagttgtagatatagggcaagggaaaaactggtatgatgcaaaataaaaggatcc

SEQ ID NO: 962 - DNA, 2678 bp, Artificial Sequence
  Description of Artificial Sequence: Synthetic Clostridium thermosulfurogenes DNA Polymerase V623W
atgaaatacctgctgccgaccgctgctgctggtctgctgctcctcgctgcccagccggcgatggccatggcgaaatttttgatcatagatggtaatagcttgatgtacagggcgtattttgccctgcctgatttgatgaacagcgaaggaatgcatacaaatgccatatacggtttttcaatgatgcttcttaaattgctggaggaggagaaaccagactacatagcaatagctttcgataaaaaggcttctacatttaggcacaaggagtacagtgcttataaaggaacccgccagtcgatgccagaagagctgatagaacaggtggatattttaaaagatgtgataaatgcatttaacataaagaccatcgagatagagggatttgaagcagatgatatcattggtacagtatcaaaaattgcttccgaaagtgggatggatgtgcttatcgtcacaggcgacagagatgcgcttcagcttgtgtcggcaaatgtaaaagtaaaaatatgtaaaaaaggcataacgcagatggatgagtacgatgaaaaggcggtctttgaaaagtatgaagtgacgccgcttcaattcatagacttgaaagggcttatgggagacaaatcagacaacattccaggagtgcccaatataggggagaagacggccataaagcttgttaaagaatttggatcaattgaaaatttactgatgaatacagataagttaaaagggaaaataaaagaaaatgtagaaaacaatgcagaattagctgttttaagcaaacggcttgctacgattgagagaaatgttcctattgatattgatttgaatgaatacgcggttaaaaattacgatgtcaataagcttacagagctatttgaaaaattggaattttcaagcctcatctcagatttaaaagatgatagtcgtgatacaaaggatattaaagaatggcctgtaagagattttacatacgttaaaaatgttttaggaaagtttgatgttttgtcattgtatccattcatatatgatggaaagataaaagcagtatcatttgcttgcggtgacggatcgttttttgtagagattgatgattatgacaattttaaattgcttaataatgataagcttacgttgataggacacgatctgaaagattttttagtaaacatttcatactgcggtattgaacttaattgtaagattttagatacggccataatgacttatcttttaaatccgtctgagtcgaattacgacataagtcgcgtattgaaaaaatacttgaaagaggatttgcaaaacatagatgatatagtaggcaagggcaggaataaaaagagctacgatgacattgacaaaaagcttttagtcgattatatgtgttcagccgcatcaaacttatctaagttaaaagataagctcatgtcatttataaaagagatggagatggaagatcttttaaaaaatgtggaaattccgcttattgaagtgctaaaatctatggaggtgtacggctttacattagataaagatgtacttagaagtatttctaaagaaatagatgaaaagacagataagattgtaaaagatatttacgatgctgctggatacgaatttaatattaactctacaaagcagttatcagaatttttgtttgataaactgaatttgccagcaataaaaaagactaaaacagggtattcgactgacatggaagtccttgcagaacttataccgtacaatgacatagtaggagaaataatagaatatagacagcttatgaagcttaaatctacgtacatagatggcttcattcccatcatggatgaaaataatagggtccactctacgtttaaacaaacatgggctgctacagggagaattagctcaacagagcctaatctgcagaacatacctgtaagagaagaatttggcaggaggataagaaaggcatttgtatcaagttatgaagatgggcttataatatctgctgattattctcagattgagctaagggttcttgcacatctttcagaggatgaaaaacttattgagtcatttttgaacaacgaagatatacatttaaggacggcatcggaggtttttaaggtttcgaaagaagaagtgacaagtgaaatgagaaggcgggcgaaagctgtcaactttggtattgtatatggtataagcgattacggcttatctaaagacttaaagatttcgcgaaaagaagcgaaagaatacatagacaattattttgacaggtacaagggcgtcaaaaattacatcgactcaattgtcaaatttgcaaaggaaaatgggtatgttacgactatcttaaataggagaagatacataccggaaatcaattcaaaaaattttaaccaaagatcttttggcgagagaatggcaatgaatacacctattcaaggtagcgctgcggatataataaagatgtcgatggttaaagtatacaatgaattaaaggaaagaggattgaaatcaagacttattcttcaggtgcacgatgagcttataattgacacacatcctgatgaagttgaaatagtcaaggagcttctaaaatcaataatggaaaatatcataaagttgaaagttcctttagttgtagatatagggcaagggaaaaactggtatgatgcaaaataaaaggatcc

SEQ ID NO: 963 - DNA, 2678 bp, Artificial Sequence
  Description of Artificial Sequence: Synthetic Clostridium thermosulfurogenes DNA Polymerase V623Y
atgaaatacctgctgccgaccgctgctgctggtctgctgctcctcgctgcccagccggcgatggccatggcgaaatttttgatcatagatggtaatagcttgatgtacagggcgtattttgccctgcctgatttgatgaacagcgaaggaatgcatacaaatgccatatacggtttttcaatgatgcttcttaaattgctggaggaggagaaaccagactacatagcaatagctttcgataaaaaggcttctacatttaggcacaaggagtacagtgcttataaaggaacccgccagtcgatgccagaagagctgatagaacaggtggatattttaaaagatgtgataaatgcatttaacataaagaccatcgagatagagggatttgaagcagatgatatcattggtacagtatcaaaaattgcttccgaaagtgggatggatgtgcttatcgtcacaggcgacagagatgcgcttcagcttgtgtcggcaaatgtaaaagtaaaaatatgtaaaaaaggcataacgcagatggatgagtacgatgaaaaggcggtctttgaaaagtatgaagtgacgccgcttcaattcatagacttgaaagggcttatgggagacaaatcagacaacattccaggagtgcccaatataggggagaagacggccataaagcttgttaaagaatttggatcaattgaaaatttactgatgaatacagataagttaaaagggaaaataaaagaaaatgtagaaaacaatgcagaattagctgttttaagcaaacggcttgctacgattgagagaaatgttcctattgatattgatttgaatgaatacgcggttaaaaattacgatgtcaataagcttacagagctatttgaaaaattggaattttcaagcctcatctcagatttaaaagatgatagtcgtgatacaaaggatattaaagaatggcctgtaagagattttacatacgttaaaaatgttttaggaaagtttgatgttttgtcattgtatccattcatatatgatggaaagataaaagcagtatcatttgcttgcggtgacggatcgttttttgtagagattgatgattatgacaattttaaattgcttaataatgataagcttacgttgataggacacgatctgaaagattttttagtaaacatttcatactgcggtattgaacttaattgtaagattttagatacggccataatgacttatcttttaaatccgtctgagtcgaattacgacataagtcgcgtattgaaaaaatacttgaaagaggatttgcaaaacatagatgatatagtaggcaagggcaggaataaaaagagctacgatgacattgacaaaaagcttttagtcgattatatgtgttcagccgcatcaaacttatctaagttaaaagataagctcatgtcatttataaaagagatggagatggaagatcttttaaaaaatgtggaaattccgcttattgaagtgctaaaatctatggaggtgtacggctttacattagataaagatgtacttagaagtatttctaaagaaatagatgaaaagacagataagattgtaaaagatatttacgatgctgctggatacgaatttaatattaactctacaaagcagttatcagaatttttgtttgataaactgaatttgccagcaataaaaaagactaaaacagggtattcgactgacatggaagtccttgcagaacttataccgtacaatgacatagtaggagaaataatagaatatagacagcttatgaagcttaaatctacgtacatagatggcttcattcccatcatggatgaaaataatagggtccactctacgtttaaacaaacatatgctgctacagggagaattagctcaacagagcctaatctgcagaacatacctgtaagagaagaatttggcaggaggataagaaaggcatttgtatcaagttatgaagatgggcttataatatctgctgattattctcagattgagctaagggttcttgcacatctttcagaggatgaaaaacttattgagtcatttttgaacaacgaagatatacatttaaggacggcatcggaggtttttaaggtttcgaaagaagaagtgacaagtgaaatgagaaggcgggcgaaagctgtcaactttggtattgtatatggtataagcgattacggcttatctaaagacttaaagatttcgcgaaaagaagcgaaagaatacatagacaattattttgacaggtacaagggcgtcaaaaattacatcgactcaattgtcaaatttgcaaaggaaaatgggtatgttacgactatcttaaataggagaagatacataccggaaatcaattcaaaaaattttaaccaaagatcttttggcgagagaatggcaatgaatacacctattcaaggtagcgctgcggatataataaagatgtcgatggttaaagtatacaatgaattaaaggaaagaggattgaaatcaagacttattcttcaggtgcacgatgagcttataattgacacacatcctgatgaagttgaaatagtcaaggagcttctaaaatcaataatggaaaatatcataaagttgaaagttcctttagttgtagatatagggcaagggaaaaactggtatgatgcaaaataaaaggatcc

SEQ ID NO: 964 - DNA, 2678 bp, Artificial Sequence
  Description of Artificial Sequence: Synthetic Clostridium thermosulfurogenes DNA Polymerase T632A
atgaaatacctgctgccgaccgctgctgctggtctgctgctcctcgctgcccagccggcgatggccatggcgaaatttttgatcatagatggtaatagcttgatgtacagggcgtattttgccctgcctgatttgatgaacagcgaaggaatgcatacaaatgccatatacggtttttcaatgatgcttcttaaattgctggaggaggagaaaccagactacatagcaatagctttcgataaaaaggcttctacatttaggcacaaggagtacagtgcttataaaggaacccgccagtcgatgccagaagagctgatagaacaggtggatattttaaaagatgtgataaatgcatttaacataaagaccatcgagatagagggatttgaagcagatgatatcattggtacagtatcaaaaattgcttccgaaagtgggatggatgtgcttatcgtcacaggcgacagagatgcgcttcagcttgtgtcggcaaatgtaaaagtaaaaatatgtaaaaaaggcataacgcagatggatgagtacgatgaaaaggcggtctttgaaaagtatgaagtgacgccgcttcaattcatagacttgaaagggcttatgggagacaaatcagacaacattccaggagtgcccaatataggggagaagacggccataaagcttgttaaagaatttggatcaattgaaaatttactgatgaatacagataagttaaaagggaaaataaaagaaaatgtagaaaacaatgcagaattagctgttttaagcaaacggcttgctacgattgagagaaatgttcctattgatattgatttgaatgaatacgcggttaaaaattacgatgtcaataagcttacagagctatttgaaaaattggaattttcaagcctcatctcagatttaaaagatgatagtcgtgatacaaaggatattaaagaatggcctgtaagagattttacatacgttaaaaatgttttaggaaagtttgatgttttgtcattgtatccattcatatatgatggaaagataaaagcagtatcatttgcttgcggtgacggatcgttttttgtagagattgatgattatgacaattttaaattgcttaataatgataagcttacgttgataggacacgatctgaaagattttttagtaaacatttcatactgcggtattgaacttaattgtaagattttagatacggccataatgacttatcttttaaatccgtctgagtcgaattacgacataagtcgcgtattgaaaaaatacttgaaagaggatttgcaaaacatagatgatatagtaggcaagggcaggaataaaaagagctacgatgacattgacaaaaagcttttagtcgattatatgtgttcagccgcatcaaacttatctaagttaaaagataagctcatgtcatttataaaagagatggagatggaagatcttttaaaaaatgtggaaattccgcttattgaagtgctaaaatctatggaggtgtacggctttacattagataaagatgtacttagaagtatttctaaagaaatagatgaaaagacagataagattgtaaaagatatttacgatgctgctggatacgaatttaatattaactctacaaagcagttatcagaatttttgtttgataaactgaatttgccagcaataaaaaagactaaaacagggtattcgactgacatggaagtccttgcagaacttataccgtacaatgacatagtaggagaaataatagaatatagacagcttatgaagcttaaatctacgtacatagatggcttcattcccatcatggatgaaaataatagggtccactctacgtttaaacaaacagttgctgctacagggagaattagctcagctgagcctaatctgcagaacatacctgtaagagaagaatttggcaggaggataagaaaggcatttgtatcaagttatgaagatgggcttataatatctgctgattattctcagattgagctaagggttcttgcacatctttcagaggatgaaaaacttattgagtcatttttgaacaacgaagatatacatttaaggacggcatcggaggtttttaaggtttcgaaagaagaagtgacaagtgaaatgagaaggcgggcgaaagctgtcaactttggtattgtatatggtataagcgattacggcttatctaaagacttaaagatttcgcgaaaagaagcgaaagaatacatagacaattattttgacaggtacaagggcgtcaaaaattacatcgactcaattgtcaaatttgcaaaggaaaatgggtatgttacgactatcttaaataggagaagatacataccggaaatcaattcaaaaaattttaaccaaagatcttttggcgagagaatggcaatgaatacacctattcaaggtagcgctgcggatataataaagatgtcgatggttaaagtatacaatgaattaaaggaaagaggattgaaatcaagacttattcttcaggtgcacgatgagcttataattgacacacatcctgatgaagttgaaatagtcaaggagcttctaaaatcaataatggaaaatatcataaagttgaaagttcctttagttgtagatatagggcaagggaaaaactggtatgatgcaaaataaaaggatcc

SEQ ID NO: 965 - DNA, 2678 bp, Artificial Sequence
  Description of Artificial Sequence: Synthetic Clostridium thermosulfurogenes DNA Polymerase T632C
atgaaatacctgctgccgaccgctgctgctggtctgctgctcctcgctgcccagccggcgatggccatggcgaaatttttgatcatagatggtaatagcttgatgtacagggcgtattttgccctgcctgatttgatgaacagcgaaggaatgcatacaaatgccatatacggtttttcaatgatgcttcttaaattgctggaggaggagaaaccagactacatagcaatagctttcgataaaaaggcttctacatttaggcacaaggagtacagtgcttataaaggaacccgccagtcgatgccagaagagctgatagaacaggtggatattttaaaagatgtgataaatgcatttaacataaagaccatcgagatagagggatttgaagcagatgatatcattggtacagtatcaaaaattgcttccgaaagtgggatggatgtgcttatcgtcacaggcgacagagatgcgcttcagcttgtgtcggcaaatgtaaaagtaaaaatatgtaaaaaaggcataacgcagatggatgagtacgatgaaaaggcggtctttgaaaagtatgaagtgacgccgcttcaattcatagacttgaaagggcttatgggagacaaatcagacaacattccaggagtgcccaatataggggagaagacggccataaagcttgttaaagaatttggatcaattgaaaatttactgatgaatacagataagttaaaagggaaaataaaagaaaatgtagaaaacaatgcagaattagctgttttaagcaaacggcttgctacgattgagagaaatgttcctattgatattgatttgaatgaatacgcggttaaaaattacgatgtcaataagcttacagagctatttgaaaaattggaattttcaagcctcatctcagatttaaaagatgatagtcgtgatacaaaggatattaaagaatggcctgtaagagattttacatacgttaaaaatgttttaggaaagtttgatgttttgtcattgtatccattcatatatgatggaaagataaaagcagtatcatttgcttgcggtgacggatcgttttttgtagagattgatgattatgacaattttaaattgcttaataatgataagcttacgttgataggacacgatctgaaagattttttagtaaacatttcatactgcggtattgaacttaattgtaagattttagatacggccataatgacttatcttttaaatccgtctgagtcgaattacgacataagtcgcgtattgaaaaaatacttgaaagaggatttgcaaaacatagatgatatagtaggcaagggcaggaataaaaagagctacgatgacattgacaaaaagcttttagtcgattatatgtgttcagccgcatcaaacttatctaagttaaaagataagctcatgtcatttataaaagagatggagatggaagatcttttaaaaaatgtggaaattccgcttattgaagtgctaaaatctatggaggtgtacggctttacattagataaagatgtacttagaagtatttctaaagaaatagatgaaaagacagataagattgtaaaagatatttacgatgctgctggatacgaatttaatattaactctacaaagcagttatcagaatttttgtttgataaactgaatttgccagcaataaaaaagactaaaacagggtattcgactgacatggaagtccttgcagaacttataccgtacaatgacatagtaggagaaataatagaatatagacagcttatgaagcttaaatctacgtacatagatggcttcattcccatcatggatgaaaataatagggtccactctacgtttaaacaaacagttgctgctacagggagaattagctcatgtgagcctaatctgcagaacatacctgtaagagaagaatttggcaggaggataagaaaggcatttgtatcaagttatgaagatgggcttataatatctgctgattattctcagattgagctaagggttcttgcacatctttcagaggatgaaaaacttattgagtcatttttgaacaacgaagatatacatttaaggacggcatcggaggtttttaaggtttcgaaagaagaagtgacaagtgaaatgagaaggcgggcgaaagctgtcaactttggtattgtatatggtataagcgattacggcttatctaaagacttaaagatttcgcgaaaagaagcgaaagaatacatagacaattattttgacaggtacaagggcgtcaaaaattacatcgactcaattgtcaaatttgcaaaggaaaatgggtatgttacgactatcttaaataggagaagatacataccggaaatcaattcaaaaaattttaaccaaagatcttttggcgagagaatggcaatgaatacacctattcaaggtagcgctgcggatataataaagatgtcgatggttaaagtatacaatgaattaaaggaaagaggattgaaatcaagacttattcttcaggtgcacgatgagcttataattgacacacatcctgatgaagttgaaatagtcaaggagcttctaaaatcaataatggaaaatatcataaagttgaaagttcctttagttgtagatatagggcaagggaaaaactggtatgatgcaaaataaaaggatcc

SEQ ID NO: 966 - DNA, 2678 bp, Artificial Sequence
  Description of Artificial Sequence: Synthetic Clostridium thermosulfurogenes DNA Polymerase T632D
atgaaatacctgctgccgaccgctgctgctggtctgctgctcctcgctgcccagccggcgatggccatggcgaaatttttgatcatagatggtaatagcttgatgtacagggcgtattttgccctgcctgatttgatgaacagcgaaggaatgcatacaaatgccatatacggtttttcaatgatgcttcttaaattgctggaggaggagaaaccagactacatagcaatagctttcgataaaaaggcttctacatttaggcacaaggagtacagtgcttataaaggaacccgccagtcgatgccagaagagctgatagaacaggtggatattttaaaagatgtgataaatgcatttaacataaagaccatcgagatagagggatttgaagcagatgatatcattggtacagtatcaaaaattgcttccgaaagtgggatggatgtgcttatcgtcacaggcgacagagatgcgcttcagcttgtgtcggcaaatgtaaaagtaaaaatatgtaaaaaaggcataacgcagatggatgagtacgatgaaaaggcggtctttgaaaagtatgaagtgacgccgcttcaattcatagacttgaaagggcttatgggagacaaatcagacaacattccaggagtgcccaatataggggagaagacggccataaagcttgttaaagaatttggatcaattgaaaatttactgatgaatacagataagttaaaagggaaaataaaagaaaatgtagaaaacaatgcagaattagctgttttaagcaaacggcttgctacgattgagagaaatgttcctattgatattgatttgaatgaatacgcggttaaaaattacgatgtcaataagcttacagagctatttgaaaaattggaattttcaagcctcatctcagatttaaaagatgatagtcgtgatacaaaggatattaaagaatggcctgtaagagattttacatacgttaaaaatgttttaggaaagtttgatgttttgtcattgtatccattcatatatgatggaaagataaaagcagtatcatttgcttgcggtgacggatcgttttttgtagagattgatgattatgacaattttaaattgcttaataatgataagcttacgttgataggacacgatctgaaagattttttagtaaacatttcatactgcggtattgaacttaattgtaagattttagatacggccataatgacttatcttttaaatccgtctgagtcgaattacgacataagtcgcgtattgaaaaaatacttgaaagaggatttgcaaaacatagatgatatagtaggcaagggcaggaataaaaagagctacgatgacattgacaaaaagcttttagtcgattatatgtgttcagccgcatcaaacttatctaagttaaaagataagctcatgtcatttataaaagagatggagatggaagatcttttaaaaaatgtggaaattccgcttattgaagtgctaaaatctatggaggtgtacggctttacattagataaagatgtacttagaagtatttctaaagaaatagatgaaaagacagataagattgtaaaagatatttacgatgctgctggatacgaatttaatattaactctacaaagcagttatcagaatttttgtttgataaactgaatttgccagcaataaaaaagactaaaacagggtattcgactgacatggaagtccttgcagaacttataccgtacaatgacatagtaggagaaataatagaatatagacagcttatgaagcttaaatctacgtacatagatggcttcattcccatcatggatgaaaataatagggtccactctacgtttaaacaaacagttgctgctacagggagaattagctcagatgagcctaatctgcagaacatacctgtaagagaagaatttggcaggaggataagaaaggcatttgtatcaagttatgaagatgggcttataatatctgctgattattctcagattgagctaagggttcttgcacatctttcagaggatgaaaaacttattgagtcatttttgaacaacgaagatatacatttaaggacggcatcggaggtttttaaggtttcgaaagaagaagtgacaagtgaaatgagaaggcgggcgaaagctgtcaactttggtattgtatatggtataagcgattacggcttatctaaagacttaaagatttcgcgaaaagaagcgaaagaatacatagacaattattttgacaggtacaagggcgtcaaaaattacatcgactcaattgtcaaatttgcaaaggaaaatgggtatgttacgactatcttaaataggagaagatacataccggaaatcaattcaaaaaattttaaccaaagatcttttggcgagagaatggcaatgaatacacctattcaaggtagcgctgcggatataataaagatgtcgatggttaaagtatacaatgaattaaaggaaagaggattgaaatcaagacttattcttcaggtgcacgatgagcttataattgacacacatcctgatgaagttgaaatagtcaaggagcttctaaaatcaataatggaaaatatcataaagttgaaagttcctttagttgtagatatagggcaagggaaaaactggtatgatgcaaaataaaaggatcc

SEQ ID NO: 967 - DNA, 2678 bp, Artificial Sequence
  Description of Artificial Sequence: Synthetic Clostridium thermosulfurogenes DNA Polymerase T632F
atgaaatacctgctgccgaccgctgctgctggtctgctgctcctcgctgcccagccggcgatggccatggcgaaatttttgatcatagatggtaatagcttgatgtacagggcgtattttgccctgcctgatttgatgaacagcgaaggaatgcatacaaatgccatatacggtttttcaatgatgcttcttaaattgctggaggaggagaaaccagactacatagcaatagctttcgataaaaaggcttctacatttaggcacaaggagtacagtgcttataaaggaacccgccagtcgatgccagaagagctgatagaacaggtggatattttaaaagatgtgataaatgcatttaacataaagaccatcgagatagagggatttgaagcagatgatatcattggtacagtatcaaaaattgcttccgaaagtgggatggatgtgcttatcgtcacaggcgacagagatgcgcttcagcttgtgtcggcaaatgtaaaagtaaaaatatgtaaaaaaggcataacgcagatggatgagtacgatgaaaaggcggtctttgaaaagtatgaagtgacgccgcttcaattcatagacttgaaagggcttatgggagacaaatcagacaacattccaggagtgcccaatataggggagaagacggccataaagcttgttaaagaatttggatcaattgaaaatttactgatgaatacagataagttaaaagggaaaataaaagaaaatgtagaaaacaatgcagaattagctgttttaagcaaacggcttgctacgattgagagaaatgttcctattgatattgatttgaatgaatacgcggttaaaaattacgatgtcaataagcttacagagctatttgaaaaattggaattttcaagcctcatctcagatttaaaagatgatagtcgtgatacaaaggatattaaagaatggcctgtaagagattttacatacgttaaaaatgttttaggaaagtttgatgttttgtcattgtatccattcatatatgatggaaagataaaagcagtatcatttgcttgcggtgacggatcgttttttgtagagattgatgattatgacaattttaaattgcttaataatgataagcttacgttgataggacacgatctgaaagattttttagtaaacatttcatactgcggtattgaacttaattgtaagattttagatacggccataatgacttatcttttaaatccgtctgagtcgaattacgacataagtcgcgtattgaaaaaatacttgaaagaggatttgcaaaacatagatgatatagtaggcaagggcaggaataaaaagagctacgatgacattgacaaaaagcttttagtcgattatatgtgttcagccgcatcaaacttatctaagttaaaagataagctcatgtcatttataaaagagatggagatggaagatcttttaaaaaatgtggaaattccgcttattgaagtgctaaaatctatggaggtgtacggctttacattagataaagatgtacttagaagtatttctaaagaaatagatgaaaagacagataagattgtaaaagatatttacgatgctgctggatacgaatttaatattaactctacaaagcagttatcagaatttttgtttgataaactgaatttgccagcaataaaaaagactaaaacagggtattcgactgacatggaagtccttgcagaacttataccgtacaatgacatagtaggagaaataatagaatatagacagcttatgaagcttaaatctacgtacatagatggcttcattcccatcatggatgaaaataatagggtccactctacgtttaaacaaacagttgctgctacagggagaattagctcatttgagcctaatctgcagaacatacctgtaagagaagaatttggcaggaggataagaaaggcatttgtatcaagttatgaagatgggcttataatatctgctgattattctcagattgagctaagggttcttgcacatctttcagaggatgaaaaacttattgagtcatttttgaacaacgaagatatacatttaaggacggcatcggaggtttttaaggtttcgaaagaagaagtgacaagtgaaatgagaaggcgggcgaaagctgtcaactttggtattgtatatggtataagcgattacggcttatctaaagacttaaagatttcgcgaaaagaagcgaaagaatacatagacaattattttgacaggtacaagggcgtcaaaaattacatcgactcaattgtcaaatttgcaaaggaaaatgggtatgttacgactatcttaaataggagaagatacataccggaaatcaattcaaaaaattttaaccaaagatcttttggcgagagaatggcaatgaatacacctattcaaggtagcgctgcggatataataaagatgtcgatggttaaagtatacaatgaattaaaggaaagaggattgaaatcaagacttattcttcaggtgcacgatgagcttataattgacacacatcctgatgaagttgaaatagtcaaggagcttctaaaatcaataatggaaaatatcataaagttgaaagttcctttagttgtagatatagggcaagggaaaaactggtatgatgcaaaataaaaggatcc

SEQ ID NO: 968 - DNA, 2678 bp, Artificial Sequence
  Description of Artificial Sequence: Synthetic Clostridium thermosulfurogenes DNA Polymerase T632G
atgaaatacctgctgccgaccgctgctgctggtctgctgctcctcgctgcccagccggcgatggccatggcgaaatttttgatcatagatggtaatagcttgatgtacagggcgtattttgccctgcctgatttgatgaacagcgaaggaatgcatacaaatgccatatacggtttttcaatgatgcttcttaaattgctggaggaggagaaaccagactacatagcaatagctttcgataaaaaggcttctacatttaggcacaaggagtacagtgcttataaaggaacccgccagtcgatgccagaagagctgatagaacaggtggatattttaaaagatgtgataaatgcatttaacataaagaccatcgagatagagggatttgaagcagatgatatcattggtacagtatcaaaaattgcttccgaaagtgggatggatgtgcttatcgtcacaggcgacagagatgcgcttcagcttgtgtcggcaaatgtaaaagtaaaaatatgtaaaaaaggcataacgcagatggatgagtacgatgaaaaggcggtctttgaaaagtatgaagtgacgccgcttcaattcatagacttgaaagggcttatgggagacaaatcagacaacattccaggagtgcccaatataggggagaagacggccataaagcttgttaaagaatttggatcaattgaaaatttactgatgaatacagataagttaaaagggaaaataaaagaaaatgtagaaaacaatgcagaattagctgttttaagcaaacggcttgctacgattgagagaaatgttcctattgatattgatttgaatgaatacgcggttaaaaattacgatgtcaataagcttacagagctatttgaaaaattggaattttcaagcctcatctcagatttaaaagatgatagtcgtgatacaaaggatattaaagaatggcctgtaagagattttacatacgttaaaaatgttttaggaaagtttgatgttttgtcattgtatccattcatatatgatggaaagataaaagcagtatcatttgcttgcggtgacggatcgttttttgtagagattgatgattatgacaattttaaattgcttaataatgataagcttacgttgataggacacgatctgaaagattttttagtaaacatttcatactgcggtattgaacttaattgtaagattttagatacggccataatgacttatcttttaaatccgtctgagtcgaattacgacataagtcgcgtattgaaaaaatacttgaaagaggatttgcaaaacatagatgatatagtaggcaagggcaggaataaaaagagctacgatgacattgacaaaaagcttttagtcgattatatgtgttcagccgcatcaaacttatctaagttaaaagataagctcatgtcatttataaaagagatggagatggaagatcttttaaaaaatgtggaaattccgcttattgaagtgctaaaatctatggaggtgtacggctttacattagataaagatgtacttagaagtatttctaaagaaatagatgaaaagacagataagattgtaaaagatatttacgatgctgctggatacgaatttaatattaactctacaaagcagttatcagaatttttgtttgataaactgaatttgccagcaataaaaaagactaaaacagggtattcgactgacatggaagtccttgcagaacttataccgtacaatgacatagtaggagaaataatagaatatagacagcttatgaagcttaaatctacgtacatagatggcttcattcccatcatggatgaaaataatagggtccactctacgtttaaacaaacagttgctgctacagggagaattagctcaggtgagcctaatctgcagaacatacctgtaagagaagaatttggcaggaggataagaaaggcatttgtatcaagttatgaagatgggcttataatatctgctgattattctcagattgagctaagggttcttgcacatctttcagaggatgaaaaacttattgagtcatttttgaacaacgaagatatacatttaaggacggcatcggaggtttttaaggtttcgaaagaagaagtgacaagtgaaatgagaaggcgggcgaaagctgtcaactttggtattgtatatggtataagcgattacggcttatctaaagacttaaagatttcgcgaaaagaagcgaaagaatacatagacaattattttgacaggtacaagggcgtcaaaaattacatcgactcaattgtcaaatttgcaaaggaaaatgggtatgttacgactatcttaaataggagaagatacataccggaaatcaattcaaaaaattttaaccaaagatcttttggcgagagaatggcaatgaatacacctattcaaggtagcgctgcggatataataaagatgtcgatggttaaagtatacaatgaattaaaggaaagaggattgaaatcaagacttattcttcaggtgcacgatgagcttataattgacacacatcctgatgaagttgaaatagtcaaggagcttctaaaatcaataatggaaaatatcataaagttgaaagttcctttagttgtagatatagggcaagggaaaaactggtatgatgcaaaataaaaggatcc

SEQ ID NO: 969 - DNA, 2678 bp, Artificial Sequence
  Description of Artificial Sequence: Synthetic Clostridium thermosulfurogenes DNA Polymerase T632H
atgaaatacctgctgccgaccgctgctgctggtctgctgctcctcgctgcccagccggcgatggccatggcgaaatttttgatcatagatggtaatagcttgatgtacagggcgtattttgccctgcctgatttgatgaacagcgaaggaatgcatacaaatgccatatacggtttttcaatgatgcttcttaaattgctggaggaggagaaaccagactacatagcaatagctttcgataaaaaggcttctacatttaggcacaaggagtacagtgcttataaaggaacccgccagtcgatgccagaagagctgatagaacaggtggatattttaaaagatgtgataaatgcatttaacataaagaccatcgagatagagggatttgaagcagatgatatcattggtacagtatcaaaaattgcttccgaaagtgggatggatgtgcttatcgtcacaggcgacagagatgcgcttcagcttgtgtcggcaaatgtaaaagtaaaaatatgtaaaaaaggcataacgcagatggatgagtacgatgaaaaggcggtctttgaaaagtatgaagtgacgccgcttcaattcatagacttgaaagggcttatgggagacaaatcagacaacattccaggagtgcccaatataggggagaagacggccataaagcttgttaaagaatttggatcaattgaaaatttactgatgaatacagataagttaaaagggaaaataaaagaaaatgtagaaaacaatgcagaattagctgttttaagcaaacggcttgctacgattgagagaaatgttcctattgatattgatttgaatgaatacgcggttaaaaattacgatgtcaataagcttacagagctatttgaaaaattggaattttcaagcctcatctcagatttaaaagatgatagtcgtgatacaaaggatattaaagaatggcctgtaagagattttacatacgttaaaaatgttttaggaaagtttgatgttttgtcattgtatccattcatatatgatggaaagataaaagcagtatcatttgcttgcggtgacggatcgttttttgtagagattgatgattatgacaattttaaattgcttaataatgataagcttacgttgataggacacgatctgaaagattttttagtaaacatttcatactgcggtattgaacttaattgtaagattttagatacggccataatgacttatcttttaaatccgtctgagtcgaattacgacataagtcgcgtattgaaaaaatacttgaaagaggatttgcaaaacatagatgatatagtaggcaagggcaggaataaaaagagctacgatgacattgacaaaaagcttttagtcgattatatgtgttcagccgcatcaaacttatctaagttaaaagataagctcatgtcatttataaaagagatggagatggaagatcttttaaaaaatgtggaaattccgcttattgaagtgctaaaatctatggaggtgtacggctttacattagataaagatgtacttagaagtatttctaaagaaatagatgaaaagacagataagattgtaaaagatatttacgatgctgctggatacgaatttaatattaactctacaaagcagttatcagaatttttgtttgataaactgaatttgccagcaataaaaaagactaaaacagggtattcgactgacatggaagtccttgcagaacttataccgtacaatgacatagtaggagaaataatagaatatagacagcttatgaagcttaaatctacgtacatagatggcttcattcccatcatggatgaaaataatagggtccactctacgtttaaacaaacagttgctgctacagggagaattagctcacatgagcctaatctgcagaacatacctgtaagagaagaatttggcaggaggataagaaaggcatttgtatcaagttatgaagatgggcttataatatctgctgattattctcagattgagctaagggttcttgcacatctttcagaggatgaaaaacttattgagtcatttttgaacaacgaagatatacatttaaggacggcatcggaggtttttaaggtttcgaaagaagaagtgacaagtgaaatgagaaggcgggcgaaagctgtcaactttggtattgtatatggtataagcgattacggcttatctaaagacttaaagatttcgcgaaaagaagcgaaagaatacatagacaattattttgacaggtacaagggcgtcaaaaattacatcgactcaattgtcaaatttgcaaaggaaaatgggtatgttacgactatcttaaataggagaagatacataccggaaatcaattcaaaaaattttaaccaaagatcttttggcgagagaatggcaatgaatacacctattcaaggtagcgctgcggatataataaagatgtcgatggttaaagtatacaatgaattaaaggaaagaggattgaaatcaagacttattcttcaggtgcacgatgagcttataattgacacacatcctgatgaagttgaaatagtcaaggagcttctaaaatcaataatggaaaatatcataaagttgaaagttcctttagttgtagatatagggcaagggaaaaactggtatgatgcaaaataaaaggatcc

SEQ ID NO: 970 - DNA, 2678 bp, Artificial Sequence
  Description of Artificial Sequence: Synthetic Clostridium thermosulfurogenes DNA Polymerase T632I
atgaaatacctgctgccgaccgctgctgctggtctgctgctcctcgctgcccagccggcgatggccatggcgaaatttttgatcatagatggtaatagcttgatgtacagggcgtattttgccctgcctgatttgatgaacagcgaaggaatgcatacaaatgccatatacggtttttcaatgatgcttcttaaattgctggaggaggagaaaccagactacatagcaatagctttcgataaaaaggcttctacatttaggcacaaggagtacagtgcttataaaggaacccgccagtcgatgccagaagagctgatagaacaggtggatattttaaaagatgtgataaatgcatttaacataaagaccatcgagatagagggatttgaagcagatgatatcattggtacagtatcaaaaattgcttccgaaagtgggatggatgtgcttatcgtcacaggcgacagagatgcgcttcagcttgtgtcggcaaatgtaaaagtaaaaatatgtaaaaaaggcataacgcagatggatgagtacgatgaaaaggcggtctttgaaaagtatgaagtgacgccgcttcaattcatagacttgaaagggcttatgggagacaaatcagacaacattccaggagtgcccaatataggggagaagacggccataaagcttgttaaagaatttggatcaattgaaaatttactgatgaatacagataagttaaaagggaaaataaaagaaaatgtagaaaacaatgcagaattagctgttttaagcaaacggcttgctacgattgagagaaatgttcctattgatattgatttgaatgaatacgcggttaaaaattacgatgtcaataagcttacagagctatttgaaaaattggaattttcaagcctcatctcagatttaaaagatgatagtcgtgatacaaaggatattaaagaatggcctgtaagagattttacatacgttaaaaatgttttaggaaagtttgatgttttgtcattgtatccattcatatatgatggaaagataaaagcagtatcatttgcttgcggtgacggatcgttttttgtagagattgatgattatgacaattttaaattgcttaataatgataagcttacgttgataggacacgatctgaaagattttttagtaaacatttcatactgcggtattgaacttaattgtaagattttagatacggccataatgacttatcttttaaatccgtctgagtcgaattacgacataagtcgcgtattgaaaaaatacttgaaagaggatttgcaaaacatagatgatatagtaggcaagggcaggaataaaaagagctacgatgacattgacaaaaagcttttagtcgattatatgtgttcagccgcatcaaacttatctaagttaaaagataagctcatgtcatttataaaagagatggagatggaagatcttttaaaaaatgtggaaattccgcttattgaagtgctaaaatctatggaggtgtacggctttacattagataaagatgtacttagaagtatttctaaagaaatagatgaaaagacagataagattgtaaaagatatttacgatgctgctggatacgaatttaatattaactctacaaagcagttatcagaatttttgtttgataaactgaatttgccagcaataaaaaagactaaaacagggtattcgactgacatggaagtccttgcagaacttataccgtacaatgacatagtaggagaaataatagaatatagacagcttatgaagcttaaatctacgtacatagatggcttcattcccatcatggatgaaaataatagggtccactctacgtttaaacaaacagttgctgctacagggagaattagctcaattgagcctaatctgcagaacatacctgtaagagaagaatttggcaggaggataagaaaggcatttgtatcaagttatgaagatgggcttataatatctgctgattattctcagattgagctaagggttcttgcacatctttcagaggatgaaaaacttattgagtcatttttgaacaacgaagatatacatttaaggacggcatcggaggtttttaaggtttcgaaagaagaagtgacaagtgaaatgagaaggcgggcgaaagctgtcaactttggtattgtatatggtataagcgattacggcttatctaaagacttaaagatttcgcgaaaagaagcgaaagaatacatagacaattattttgacaggtacaagggcgtcaaaaattacatcgactcaattgtcaaatttgcaaaggaaaatgggtatgttacgactatcttaaataggagaagatacataccggaaatcaattcaaaaaattttaaccaaagatcttttggcgagagaatggcaatgaatacacctattcaaggtagcgctgcggatataataaagatgtcgatggttaaagtatacaatgaattaaaggaaagaggattgaaatcaagacttattcttcaggtgcacgatgagcttataattgacacacatcctgatgaagttgaaatagtcaaggagcttctaaaatcaataatggaaaatatcataaagttgaaagttcctttagttgtagatatagggcaagggaaaaactggtatgatgcaaaataaaaggatcc

SEQ ID NO: 971 - DNA, 2678 bp, Artificial Sequence
  Description of Artificial Sequence: Synthetic Clostridium thermosulfurogenes DNA Polymerase T632L
atgaaatacctgctgccgaccgctgctgctggtctgctgctcctcgctgcccagccggcgatggccatggcgaaatttttgatcatagatggtaatagcttgatgtacagggcgtattttgccctgcctgatttgatgaacagcgaaggaatgcatacaaatgccatatacggtttttcaatgatgcttcttaaattgctggaggaggagaaaccagactacatagcaatagctttcgataaaaaggcttctacatttaggcacaaggagtacagtgcttataaaggaacccgccagtcgatgccagaagagctgatagaacaggtggatattttaaaagatgtgataaatgcatttaacataaagaccatcgagatagagggatttgaagcagatgatatcattggtacagtatcaaaaattgcttccgaaagtgggatggatgtgcttatcgtcacaggcgacagagatgcgcttcagcttgtgtcggcaaatgtaaaagtaaaaatatgtaaaaaaggcataacgcagatggatgagtacgatgaaaaggcggtctttgaaaagtatgaagtgacgccgcttcaattcatagacttgaaagggcttatgggagacaaatcagacaacattccaggagtgcccaatataggggagaagacggccataaagcttgttaaagaatttggatcaattgaaaatttactgatgaatacagataagttaaaagggaaaataaaagaaaatgtagaaaacaatgcagaattagctgttttaagcaaacggcttgctacgattgagagaaatgttcctattgatattgatttgaatgaatacgcggttaaaaattacgatgtcaataagcttacagagctatttgaaaaattggaattttcaagcctcatctcagatttaaaagatgatagtcgtgatacaaaggatattaaagaatggcctgtaagagattttacatacgttaaaaatgttttaggaaagtttgatgttttgtcattgtatccattcatatatgatggaaagataaaagcagtatcatttgcttgcggtgacggatcgttttttgtagagattgatgattatgacaattttaaattgcttaataatgataagcttacgttgataggacacgatctgaaagattttttagtaaacatttcatactgcggtattgaacttaattgtaagattttagatacggccataatgacttatcttttaaatccgtctgagtcgaattacgacataagtcgcgtattgaaaaaatacttgaaagaggatttgcaaaacatagatgatatagtaggcaagggcaggaataaaaagagctacgatgacattgacaaaaagcttttagtcgattatatgtgttcagccgcatcaaacttatctaagttaaaagataagctcatgtcatttataaaagagatggagatggaagatcttttaaaaaatgtggaaattccgcttattgaagtgctaaaatctatggaggtgtacggctttacattagataaagatgtacttagaagtatttctaaagaaatagatgaaaagacagataagattgtaaaagatatttacgatgctgctggatacgaatttaatattaactctacaaagcagttatcagaatttttgtttgataaactgaatttgccagcaataaaaaagactaaaacagggtattcgactgacatggaagtccttgcagaacttataccgtacaatgacatagtaggagaaataatagaatatagacagcttatgaagcttaaatctacgtacatagatggcttcattcccatcatggatgaaaataatagggtccactctacgtttaaacaaacagttgctgctacagggagaattagctcacttgagcctaatctgcagaacatacctgtaagagaagaatttggcaggaggataagaaaggcatttgtatcaagttatgaagatgggcttataatatctgctgattattctcagattgagctaagggttcttgcacatctttcagaggatgaaaaacttattgagtcatttttgaacaacgaagatatacatttaaggacggcatcggaggtttttaaggtttcgaaagaagaagtgacaagtgaaatgagaaggcgggcgaaagctgtcaactttggtattgtatatggtataagcgattacggcttatctaaagacttaaagatttcgcgaaaagaagcgaaagaatacatagacaattattttgacaggtacaagggcgtcaaaaattacatcgactcaattgtcaaatttgcaaaggaaaatgggtatgttacgactatcttaaataggagaagatacataccggaaatcaattcaaaaaattttaaccaaagatcttttggcgagagaatggcaatgaatacacctattcaaggtagcgctgcggatataataaagatgtcgatggttaaagtatacaatgaattaaaggaaagaggattgaaatcaagacttattcttcaggtgcacgatgagcttataattgacacacatcctgatgaagttgaaatagtcaaggagcttctaaaatcaataatggaaaatatcataaagttgaaagttcctttagttgtagatatagggcaagggaaaaactggtatgatgcaaaataaaaggatcc

SEQ ID NO: 972 - DNA, 2678 bp, Artificial Sequence
  Description of Artificial Sequence: Synthetic Clostridium thermosulfurogenes DNA Polymerase T632M
atgaaatacctgctgccgaccgctgctgctggtctgctgctcctcgctgcccagccggcgatggccatggcgaaatttttgatcatagatggtaatagcttgatgtacagggcgtattttgccctgcctgatttgatgaacagcgaaggaatgcatacaaatgccatatacggtttttcaatgatgcttcttaaattgctggaggaggagaaaccagactacatagcaatagctttcgataaaaaggcttctacatttaggcacaaggagtacagtgcttataaaggaacccgccagtcgatgccagaagagctgatagaacaggtggatattttaaaagatgtgataaatgcatttaacataaagaccatcgagatagagggatttgaagcagatgatatcattggtacagtatcaaaaattgcttccgaaagtgggatggatgtgcttatcgtcacaggcgacagagatgcgcttcagcttgtgtcggcaaatgtaaaagtaaaaatatgtaaaaaaggcataacgcagatggatgagtacgatgaaaaggcggtctttgaaaagtatgaagtgacgccgcttcaattcatagacttgaaagggcttatgggagacaaatcagacaacattccaggagtgcccaatataggggagaagacggccataaagcttgttaaagaatttggatcaattgaaaatttactgatgaatacagataagttaaaagggaaaataaaagaaaatgtagaaaacaatgcagaattagctgttttaagcaaacggcttgctacgattgagagaaatgttcctattgatattgatttgaatgaatacgcggttaaaaattacgatgtcaataagcttacagagctatttgaaaaattggaattttcaagcctcatctcagatttaaaagatgatagtcgtgatacaaaggatattaaagaatggcctgtaagagattttacatacgttaaaaatgttttaggaaagtttgatgttttgtcattgtatccattcatatatgatggaaagataaaagcagtatcatttgcttgcggtgacggatcgttttttgtagagattgatgattatgacaattttaaattgcttaataatgataagcttacgttgataggacacgatctgaaagattttttagtaaacatttcatactgcggtattgaacttaattgtaagattttagatacggccataatgacttatcttttaaatccgtctgagtcgaattacgacataagtcgcgtattgaaaaaatacttgaaagaggatttgcaaaacatagatgatatagtaggcaagggcaggaataaaaagagctacgatgacattgacaaaaagcttttagtcgattatatgtgttcagccgcatcaaacttatctaagttaaaagataagctcatgtcatttataaaagagatggagatggaagatcttttaaaaaatgtggaaattccgcttattgaagtgctaaaatctatggaggtgtacggctttacattagataaagatgtacttagaagtatttctaaagaaatagatgaaaagacagataagattgtaaaagatatttacgatgctgctggatacgaatttaatattaactctacaaagcagttatcagaatttttgtttgataaactgaatttgccagcaataaaaaagactaaaacagggtattcgactgacatggaagtccttgcagaacttataccgtacaatgacatagtaggagaaataatagaatatagacagcttatgaagcttaaatctacgtacatagatggcttcattcccatcatggatgaaaataatagggtccactctacgtttaaacaaacagttgctgctacagggagaattagctcaatggagcctaatctgcagaacatacctgtaagagaagaatttggcaggaggataagaaaggcatttgtatcaagttatgaagatgggcttataatatctgctgattattctcagattgagctaagggttcttgcacatctttcagaggatgaaaaacttattgagtcatttttgaacaacgaagatatacatttaaggacggcatcggaggtttttaaggtttcgaaagaagaagtgacaagtgaaatgagaaggcgggcgaaagctgtcaactttggtattgtatatggtataagcgattacggcttatctaaagacttaaagatttcgcgaaaagaagcgaaagaatacatagacaattattttgacaggtacaagggcgtcaaaaattacatcgactcaattgtcaaatttgcaaaggaaaatgggtatgttacgactatcttaaataggagaagatacataccggaaatcaattcaaaaaattttaaccaaagatcttttggcgagagaatggcaatgaatacacctattcaaggtagcgctgcggatataataaagatgtcgatggttaaagtatacaatgaattaaaggaaagaggattgaaatcaagacttattcttcaggtgcacgatgagcttataattgacacacatcctgatgaagttgaaatagtcaaggagcttctaaaatcaataatggaaaatatcataaagttgaaagttcctttagttgtagatatagggcaagggaaaaactggtatgatgcaaaataaaaggatcc

SEQ ID NO: 973 - DNA, 2678 bp, Artificial Sequence
  Description of Artificial Sequence: Synthetic Clostridium thermosulfurogenes DNA Polymerase T632N
atgaaatacctgctgccgaccgctgctgctggtctgctgctcctcgctgcccagccggcgatggccatggcgaaatttttgatcatagatggtaatagcttgatgtacagggcgtattttgccctgcctgatttgatgaacagcgaaggaatgcatacaaatgccatatacggtttttcaatgatgcttcttaaattgctggaggaggagaaaccagactacatagcaatagctttcgataaaaaggcttctacatttaggcacaaggagtacagtgcttataaaggaacccgccagtcgatgccagaagagctgatagaacaggtggatattttaaaagatgtgataaatgcatttaacataaagaccatcgagatagagggatttgaagcagatgatatcattggtacagtatcaaaaattgcttccgaaagtgggatggatgtgcttatcgtcacaggcgacagagatgcgcttcagcttgtgtcggcaaatgtaaaagtaaaaatatgtaaaaaaggcataacgcagatggatgagtacgatgaaaaggcggtctttgaaaagtatgaagtgacgccgcttcaattcatagacttgaaagggcttatgggagacaaatcagacaacattccaggagtgcccaatataggggagaagacggccataaagcttgttaaagaatttggatcaattgaaaatttactgatgaatacagataagttaaaagggaaaataaaagaaaatgtagaaaacaatgcagaattagctgttttaagcaaacggcttgctacgattgagagaaatgttcctattgatattgatttgaatgaatacgcggttaaaaattacgatgtcaataagcttacagagctatttgaaaaattggaattttcaagcctcatctcagatttaaaagatgatagtcgtgatacaaaggatattaaagaatggcctgtaagagattttacatacgttaaaaatgttttaggaaagtttgatgttttgtcattgtatccattcatatatgatggaaagataaaagcagtatcatttgcttgcggtgacggatcgttttttgtagagattgatgattatgacaattttaaattgcttaataatgataagcttacgttgataggacacgatctgaaagattttttagtaaacatttcatactgcggtattgaacttaattgtaagattttagatacggccataatgacttatcttttaaatccgtctgagtcgaattacgacataagtcgcgtattgaaaaaatacttgaaagaggatttgcaaaacatagatgatatagtaggcaagggcaggaataaaaagagctacgatgacattgacaaaaagcttttagtcgattatatgtgttcagccgcatcaaacttatctaagttaaaagataagctcatgtcatttataaaagagatggagatggaagatcttttaaaaaatgtggaaattccgcttattgaagtgctaaaatctatggaggtgtacggctttacattagataaagatgtacttagaagtatttctaaagaaatagatgaaaagacagataagattgtaaaagatatttacgatgctgctggatacgaatttaatattaactctacaaagcagttatcagaatttttgtttgataaactgaatttgccagcaataaaaaagactaaaacagggtattcgactgacatggaagtccttgcagaacttataccgtacaatgacatagtaggagaaataatagaatatagacagcttatgaagcttaaatctacgtacatagatggcttcattcccatcatggatgaaaataatagggtccactctacgtttaaacaaacagttgctgctacagggagaattagctcaaatgagcctaatctgcagaacatacctgtaagagaagaatttggcaggaggataagaaaggcatttgtatcaagttatgaagatgggcttataatatctgctgattattctcagattgagctaagggttcttgcacatctttcagaggatgaaaaacttattgagtcatttttgaacaacgaagatatacatttaaggacggcatcggaggtttttaaggtttcgaaagaagaagtgacaagtgaaatgagaaggcgggcgaaagctgtcaactttggtattgtatatggtataagcgattacggcttatctaaagacttaaagatttcgcgaaaagaagcgaaagaatacatagacaattattttgacaggtacaagggcgtcaaaaattacatcgactcaattgtcaaatttgcaaaggaaaatgggtatgttacgactatcttaaataggagaagatacataccggaaatcaattcaaaaaattttaaccaaagatcttttggcgagagaatggcaatgaatacacctattcaaggtagcgctgcggatataataaagatgtcgatggttaaagtatacaatgaattaaaggaaagaggattgaaatcaagacttattcttcaggtgcacgatgagcttataattgacacacatcctgatgaagttgaaatagtcaaggagcttctaaaatcaataatggaaaatatcataaagttgaaagttcctttagttgtagatatagggcaagggaaaaactggtatgatgcaaaataaaaggatcc

SEQ ID NO: 974 - DNA, 2678 bp, Artificial Sequence
  Description of Artificial Sequence: Synthetic Clostridium thermosulfurogenes DNA Polymerase T632P
atgaaatacctgctgccgaccgctgctgctggtctgctgctcctcgctgcccagccggcgatggccatggcgaaatttttgatcatagatggtaatagcttgatgtacagggcgtattttgccctgcctgatttgatgaacagcgaaggaatgcatacaaatgccatatacggtttttcaatgatgcttcttaaattgctggaggaggagaaaccagactacatagcaatagctttcgataaaaaggcttctacatttaggcacaaggagtacagtgcttataaaggaacccgccagtcgatgccagaagagctgatagaacaggtggatattttaaaagatgtgataaatgcatttaacataaagaccatcgagatagagggatttgaagcagatgatatcattggtacagtatcaaaaattgcttccgaaagtgggatggatgtgcttatcgtcacaggcgacagagatgcgcttcagcttgtgtcggcaaatgtaaaagtaaaaatatgtaaaaaaggcataacgcagatggatgagtacgatgaaaaggcggtctttgaaaagtatgaagtgacgccgcttcaattcatagacttgaaagggcttatgggagacaaatcagacaacattccaggagtgcccaatataggggagaagacggccataaagcttgttaaagaatttggatcaattgaaaatttactgatgaatacagataagttaaaagggaaaataaaagaaaatgtagaaaacaatgcagaattagctgttttaagcaaacggcttgctacgattgagagaaatgttcctattgatattgatttgaatgaatacgcggttaaaaattacgatgtcaataagcttacagagctatttgaaaaattggaattttcaagcctcatctcagatttaaaagatgatagtcgtgatacaaaggatattaaagaatggcctgtaagagattttacatacgttaaaaatgttttaggaaagtttgatgttttgtcattgtatccattcatatatgatggaaagataaaagcagtatcatttgcttgcggtgacggatcgttttttgtagagattgatgattatgacaattttaaattgcttaataatgataagcttacgttgataggacacgatctgaaagattttttagtaaacatttcatactgcggtattgaacttaattgtaagattttagatacggccataatgacttatcttttaaatccgtctgagtcgaattacgacataagtcgcgtattgaaaaaatacttgaaagaggatttgcaaaacatagatgatatagtaggcaagggcaggaataaaaagagctacgatgacattgacaaaaagcttttagtcgattatatgtgttcagccgcatcaaacttatctaagttaaaagataagctcatgtcatttataaaagagatggagatggaagatcttttaaaaaatgtggaaattccgcttattgaagtgctaaaatctatggaggtgtacggctttacattagataaagatgtacttagaagtatttctaaagaaatagatgaaaagacagataagattgtaaaagatatttacgatgctgctggatacgaatttaatattaactctacaaagcagttatcagaatttttgtttgataaactgaatttgccagcaataaaaaagactaaaacagggtattcgactgacatggaagtccttgcagaacttataccgtacaatgacatagtaggagaaataatagaatatagacagcttatgaagcttaaatctacgtacatagatggcttcattcccatcatggatgaaaataatagggtccactctacgtttaaacaaacagttgctgctacagggagaattagctcacctgagcctaatctgcagaacatacctgtaagagaagaatttggcaggaggataagaaaggcatttgtatcaagttatgaagatgggcttataatatctgctgattattctcagattgagctaagggttcttgcacatctttcagaggatgaaaaacttattgagtcatttttgaacaacgaagatatacatttaaggacggcatcggaggtttttaaggtttcgaaagaagaagtgacaagtgaaatgagaaggcgggcgaaagctgtcaactttggtattgtatatggtataagcgattacggcttatctaaagacttaaagatttcgcgaaaagaagcgaaagaatacatagacaattattttgacaggtacaagggcgtcaaaaattacatcgactcaattgtcaaatttgcaaaggaaaatgggtatgttacgactatcttaaataggagaagatacataccggaaatcaattcaaaaaattttaaccaaagatcttttggcgagagaatggcaatgaatacacctattcaaggtagcgctgcggatataataaagatgtcgatggttaaagtatacaatgaattaaaggaaagaggattgaaatcaagacttattcttcaggtgcacgatgagcttataattgacacacatcctgatgaagttgaaatagtcaaggagcttctaaaatcaataatggaaaatatcataaagttgaaagttcctttagttgtagatatagggcaagggaaaaactggtatgatgcaaaataaaaggatcc

SEQ ID NO: 975 - DNA, 2678 bp, Artificial Sequence
  Description of Artificial Sequence: Synthetic Clostridium thermosulfurogenes DNA Polymerase T632Q
atgaaatacctgctgccgaccgctgctgctggtctgctgctcctcgctgcccagccggcgatggccatggcgaaatttttgatcatagatggtaatagcttgatgtacagggcgtattttgccctgcctgatttgatgaacagcgaaggaatgcatacaaatgccatatacggtttttcaatgatgcttcttaaattgctggaggaggagaaaccagactacatagcaatagctttcgataaaaaggcttctacatttaggcacaaggagtacagtgcttataaaggaacccgccagtcgatgccagaagagctgatagaacaggtggatattttaaaagatgtgataaatgcatttaacataaagaccatcgagatagagggatttgaagcagatgatatcattggtacagtatcaaaaattgcttccgaaagtgggatggatgtgcttatcgtcacaggcgacagagatgcgcttcagcttgtgtcggcaaatgtaaaagtaaaaatatgtaaaaaaggcataacgcagatggatgagtacgatgaaaaggcggtctttgaaaagtatgaagtgacgccgcttcaattcatagacttgaaagggcttatgggagacaaatcagacaacattccaggagtgcccaatataggggagaagacggccataaagcttgttaaagaatttggatcaattgaaaatttactgatgaatacagataagttaaaagggaaaataaaagaaaatgtagaaaacaatgcagaattagctgttttaagcaaacggcttgctacgattgagagaaatgttcctattgatattgatttgaatgaatacgcggttaaaaattacgatgtcaataagcttacagagctatttgaaaaattggaattttcaagcctcatctcagatttaaaagatgatagtcgtgatacaaaggatattaaagaatggcctgtaagagattttacatacgttaaaaatgttttaggaaagtttgatgttttgtcattgtatccattcatatatgatggaaagataaaagcagtatcatttgcttgcggtgacggatcgttttttgtagagattgatgattatgacaattttaaattgcttaataatgataagcttacgttgataggacacgatctgaaagattttttagtaaacatttcatactgcggtattgaacttaattgtaagattttagatacggccataatgacttatcttttaaatccgtctgagtcgaattacgacataagtcgcgtattgaaaaaatacttgaaagaggatttgcaaaacatagatgatatagtaggcaagggcaggaataaaaagagctacgatgacattgacaaaaagcttttagtcgattatatgtgttcagccgcatcaaacttatctaagttaaaagataagctcatgtcatttataaaagagatggagatggaagatcttttaaaaaatgtggaaattccgcttattgaagtgctaaaatctatggaggtgtacggctttacattagataaagatgtacttagaagtatttctaaagaaatagatgaaaagacagataagattgtaaaagatatttacgatgctgctggatacgaatttaatattaactctacaaagcagttatcagaatttttgtttgataaactgaatttgccagcaataaaaaagactaaaacagggtattcgactgacatggaagtccttgcagaacttataccgtacaatgacatagtaggagaaataatagaatatagacagcttatgaagcttaaatctacgtacatagatggcttcattcccatcatggatgaaaataatagggtccactctacgtttaaacaaacagttgctgctacagggagaattagctcacaagagcctaatctgcagaacatacctgtaagagaagaatttggcaggaggataagaaaggcatttgtatcaagttatgaagatgggcttataatatctgctgattattctcagattgagctaagggttcttgcacatctttcagaggatgaaaaacttattgagtcatttttgaacaacgaagatatacatttaaggacggcatcggaggtttttaaggtttcgaaagaagaagtgacaagtgaaatgagaaggcgggcgaaagctgtcaactttggtattgtatatggtataagcgattacggcttatctaaagacttaaagatttcgcgaaaagaagcgaaagaatacatagacaattattttgacaggtacaagggcgtcaaaaattacatcgactcaattgtcaaatttgcaaaggaaaatgggtatgttacgactatcttaaataggagaagatacataccggaaatcaattcaaaaaattttaaccaaagatcttttggcgagagaatggcaatgaatacacctattcaaggtagcgctgcggatataataaagatgtcgatggttaaagtatacaatgaattaaaggaaagaggattgaaatcaagacttattcttcaggtgcacgatgagcttataattgacacacatcctgatgaagttgaaatagtcaaggagcttctaaaatcaataatggaaaatatcataaagttgaaagttcctttagttgtagatatagggcaagggaaaaactggtatgatgcaaaataaaaggatcc

SEQ ID NO: 976 - DNA, 2678 bp, Artificial Sequence
  Description of Artificial Sequence: Synthetic Clostridium thermosulfurogenes DNA Polymerase T632R
atgaaatacctgctgccgaccgctgctgctggtctgctgctcctcgctgcccagccggcgatggccatggcgaaatttttgatcatagatggtaatagcttgatgtacagggcgtattttgccctgcctgatttgatgaacagcgaaggaatgcatacaaatgccatatacggtttttcaatgatgcttcttaaattgctggaggaggagaaaccagactacatagcaatagctttcgataaaaaggcttctacatttaggcacaaggagtacagtgcttataaaggaacccgccagtcgatgccagaagagctgatagaacaggtggatattttaaaagatgtgataaatgcatttaacataaagaccatcgagatagagggatttgaagcagatgatatcattggtacagtatcaaaaattgcttccgaaagtgggatggatgtgcttatcgtcacaggcgacagagatgcgcttcagcttgtgtcggcaaatgtaaaagtaaaaatatgtaaaaaaggcataacgcagatggatgagtacgatgaaaaggcggtctttgaaaagtatgaagtgacgccgcttcaattcatagacttgaaagggcttatgggagacaaatcagacaacattccaggagtgcccaatataggggagaagacggccataaagcttgttaaagaatttggatcaattgaaaatttactgatgaatacagataagttaaaagggaaaataaaagaaaatgtagaaaacaatgcagaattagctgttttaagcaaacggcttgctacgattgagagaaatgttcctattgatattgatttgaatgaatacgcggttaaaaattacgatgtcaataagcttacagagctatttgaaaaattggaattttcaagcctcatctcagatttaaaagatgatagtcgtgatacaaaggatattaaagaatggcctgtaagagattttacatacgttaaaaatgttttaggaaagtttgatgttttgtcattgtatccattcatatatgatggaaagataaaagcagtatcatttgcttgcggtgacggatcgttttttgtagagattgatgattatgacaattttaaattgcttaataatgataagcttacgttgataggacacgatctgaaagattttttagtaaacatttcatactgcggtattgaacttaattgtaagattttagatacggccataatgacttatcttttaaatccgtctgagtcgaattacgacataagtcgcgtattgaaaaaatacttgaaagaggatttgcaaaacatagatgatatagtaggcaagggcaggaataaaaagagctacgatgacattgacaaaaagcttttagtcgattatatgtgttcagccgcatcaaacttatctaagttaaaagataagctcatgtcatttataaaagagatggagatggaagatcttttaaaaaatgtggaaattccgcttattgaagtgctaaaatctatggaggtgtacggctttacattagataaagatgtacttagaagtatttctaaagaaatagatgaaaagacagataagattgtaaaagatatttacgatgctgctggatacgaatttaatattaactctacaaagcagttatcagaatttttgtttgataaactgaatttgccagcaataaaaaagactaaaacagggtattcgactgacatggaagtccttgcagaacttataccgtacaatgacatagtaggagaaataatagaatatagacagcttatgaagcttaaatctacgtacatagatggcttcattcccatcatggatgaaaataatagggtccactctacgtttaaacaaacagttgctgctacagggagaattagctcacgtgagcctaatctgcagaacatacctgtaagagaagaatttggcaggaggataagaaaggcatttgtatcaagttatgaagatgggcttataatatctgctgattattctcagattgagctaagggttcttgcacatctttcagaggatgaaaaacttattgagtcatttttgaacaacgaagatatacatttaaggacggcatcggaggtttttaaggtttcgaaagaagaagtgacaagtgaaatgagaaggcgggcgaaagctgtcaactttggtattgtatatggtataagcgattacggcttatctaaagacttaaagatttcgcgaaaagaagcgaaagaatacatagacaattattttgacaggtacaagggcgtcaaaaattacatcgactcaattgtcaaatttgcaaaggaaaatgggtatgttacgactatcttaaataggagaagatacataccggaaatcaattcaaaaaattttaaccaaagatcttttggcgagagaatggcaatgaatacacctattcaaggtagcgctgcggatataataaagatgtcgatggttaaagtatacaatgaattaaaggaaagaggattgaaatcaagacttattcttcaggtgcacgatgagcttataattgacacacatcctgatgaagttgaaatagtcaaggagcttctaaaatcaataatggaaaatatcataaagttgaaagttcctttagttgtagatatagggcaagggaaaaactggtatgatgcaaaataaaaggatcc

SEQ ID NO: 977 - DNA, 2678 bp, Artificial Sequence
  Description of Artificial Sequence: Synthetic Clostridium thermosulfurogenes DNA Polymerase T632S
atgaaatacctgctgccgaccgctgctgctggtctgctgctcctcgctgcccagccggcgatggccatggcgaaatttttgatcatagatggtaatagcttgatgtacagggcgtattttgccctgcctgatttgatgaacagcgaaggaatgcatacaaatgccatatacggtttttcaatgatgcttcttaaattgctggaggaggagaaaccagactacatagcaatagctttcgataaaaaggcttctacatttaggcacaaggagtacagtgcttataaaggaacccgccagtcgatgccagaagagctgatagaacaggtggatattttaaaagatgtgataaatgcatttaacataaagaccatcgagatagagggatttgaagcagatgatatcattggtacagtatcaaaaattgcttccgaaagtgggatggatgtgcttatcgtcacaggcgacagagatgcgcttcagcttgtgtcggcaaatgtaaaagtaaaaatatgtaaaaaaggcataacgcagatggatgagtacgatgaaaaggcggtctttgaaaagtatgaagtgacgccgcttcaattcatagacttgaaagggcttatgggagacaaatcagacaacattccaggagtgcccaatataggggagaagacggccataaagcttgttaaagaatttggatcaattgaaaatttactgatgaatacagataagttaaaagggaaaataaaagaaaatgtagaaaacaatgcagaattagctgttttaagcaaacggcttgctacgattgagagaaatgttcctattgatattgatttgaatgaatacgcggttaaaaattacgatgtcaataagcttacagagctatttgaaaaattggaattttcaagcctcatctcagatttaaaagatgatagtcgtgatacaaaggatattaaagaatggcctgtaagagattttacatacgttaaaaatgttttaggaaagtttgatgttttgtcattgtatccattcatatatgatggaaagataaaagcagtatcatttgcttgcggtgacggatcgttttttgtagagattgatgattatgacaattttaaattgcttaataatgataagcttacgttgataggacacgatctgaaagattttttagtaaacatttcatactgcggtattgaacttaattgtaagattttagatacggccataatgacttatcttttaaatccgtctgagtcgaattacgacataagtcgcgtattgaaaaaatacttgaaagaggatttgcaaaacatagatgatatagtaggcaagggcaggaataaaaagagctacgatgacattgacaaaaagcttttagtcgattatatgtgttcagccgcatcaaacttatctaagttaaaagataagctcatgtcatttataaaagagatggagatggaagatcttttaaaaaatgtggaaattccgcttattgaagtgctaaaatctatggaggtgtacggctttacattagataaagatgtacttagaagtatttctaaagaaatagatgaaaagacagataagattgtaaaagatatttacgatgctgctggatacgaatttaatattaactctacaaagcagttatcagaatttttgtttgataaactgaatttgccagcaataaaaaagactaaaacagggtattcgactgacatggaagtccttgcagaacttataccgtacaatgacatagtaggagaaataatagaatatagacagcttatgaagcttaaatctacgtacatagatggcttcattcccatcatggatgaaaataatagggtccactctacgtttaaacaaacagttgctgctacagggagaattagctcatctgagcctaatctgcagaacatacctgtaagagaagaatttggcaggaggataagaaaggcatttgtatcaagttatgaagatgggcttataatatctgctgattattctcagattgagctaagggttcttgcacatctttcagaggatgaaaaacttattgagtcatttttgaacaacgaagatatacatttaaggacggcatcggaggtttttaaggtttcgaaagaagaagtgacaagtgaaatgagaaggcgggcgaaagctgtcaactttggtattgtatatggtataagcgattacggcttatctaaagacttaaagatttcgcgaaaagaagcgaaagaatacatagacaattattttgacaggtacaagggcgtcaaaaattacatcgactcaattgtcaaatttgcaaaggaaaatgggtatgttacgactatcttaaataggagaagatacataccggaaatcaattcaaaaaattttaaccaaagatcttttggcgagagaatggcaatgaatacacctattcaaggtagcgctgcggatataataaagatgtcgatggttaaagtatacaatgaattaaaggaaagaggattgaaatcaagacttattcttcaggtgcacgatgagcttataattgacacacatcctgatgaagttgaaatagtcaaggagcttctaaaatcaataatggaaaatatcataaagttgaaagttcctttagttgtagatatagggcaagggaaaaactggtatgatgcaaaataaaaggatcc

SEQ ID NO: 978 - DNA, 2678 bp, Artificial Sequence
  Description of Artificial Sequence: Synthetic Clostridium thermosulfurogenes DNA Polymerase T632V
atgaaatacctgctgccgaccgctgctgctggtctgctgctcctcgctgcccagccggcgatggccatggcgaaatttttgatcatagatggtaatagcttgatgtacagggcgtattttgccctgcctgatttgatgaacagcgaaggaatgcatacaaatgccatatacggtttttcaatgatgcttcttaaattgctggaggaggagaaaccagactacatagcaatagctttcgataaaaaggcttctacatttaggcacaaggagtacagtgcttataaaggaacccgccagtcgatgccagaagagctgatagaacaggtggatattttaaaagatgtgataaatgcatttaacataaagaccatcgagatagagggatttgaagcagatgatatcattggtacagtatcaaaaattgcttccgaaagtgggatggatgtgcttatcgtcacaggcgacagagatgcgcttcagcttgtgtcggcaaatgtaaaagtaaaaatatgtaaaaaaggcataacgcagatggatgagtacgatgaaaaggcggtctttgaaaagtatgaagtgacgccgcttcaattcatagacttgaaagggcttatgggagacaaatcagacaacattccaggagtgcccaatataggggagaagacggccataaagcttgttaaagaatttggatcaattgaaaatttactgatgaatacagataagttaaaagggaaaataaaagaaaatgtagaaaacaatgcagaattagctgttttaagcaaacggcttgctacgattgagagaaatgttcctattgatattgatttgaatgaatacgcggttaaaaattacgatgtcaataagcttacagagctatttgaaaaattggaattttcaagcctcatctcagatttaaaagatgatagtcgtgatacaaaggatattaaagaatggcctgtaagagattttacatacgttaaaaatgttttaggaaagtttgatgttttgtcattgtatccattcatatatgatggaaagataaaagcagtatcatttgcttgcggtgacggatcgttttttgtagagattgatgattatgacaattttaaattgcttaataatgataagcttacgttgataggacacgatctgaaagattttttagtaaacatttcatactgcggtattgaacttaattgtaagattttagatacggccataatgacttatcttttaaatccgtctgagtcgaattacgacataagtcgcgtattgaaaaaatacttgaaagaggatttgcaaaacatagatgatatagtaggcaagggcaggaataaaaagagctacgatgacattgacaaaaagcttttagtcgattatatgtgttcagccgcatcaaacttatctaagttaaaagataagctcatgtcatttataaaagagatggagatggaagatcttttaaaaaatgtggaaattccgcttattgaagtgctaaaatctatggaggtgtacggctttacattagataaagatgtacttagaagtatttctaaagaaatagatgaaaagacagataagattgtaaaagatatttacgatgctgctggatacgaatttaatattaactctacaaagcagttatcagaatttttgtttgataaactgaatttgccagcaataaaaaagactaaaacagggtattcgactgacatggaagtccttgcagaacttataccgtacaatgacatagtaggagaaataatagaatatagacagcttatgaagcttaaatctacgtacatagatggcttcattcccatcatggatgaaaataatagggtccactctacgtttaaacaaacagttgctgctacagggagaattagctcagttgagcctaatctgcagaacatacctgtaagagaagaatttggcaggaggataagaaaggcatttgtatcaagttatgaagatgggcttataatatctgctgattattctcagattgagctaagggttcttgcacatctttcagaggatgaaaaacttattgagtcatttttgaacaacgaagatatacatttaaggacggcatcggaggtttttaaggtttcgaaagaagaagtgacaagtgaaatgagaaggcgggcgaaagctgtcaactttggtattgtatatggtataagcgattacggcttatctaaagacttaaagatttcgcgaaaagaagcgaaagaatacatagacaattattttgacaggtacaagggcgtcaaaaattacatcgactcaattgtcaaatttgcaaaggaaaatgggtatgttacgactatcttaaataggagaagatacataccggaaatcaattcaaaaaattttaaccaaagatcttttggcgagagaatggcaatgaatacacctattcaaggtagcgctgcggatataataaagatgtcgatggttaaagtatacaatgaattaaaggaaagaggattgaaatcaagacttattcttcaggtgcacgatgagcttataattgacacacatcctgatgaagttgaaatagtcaaggagcttctaaaatcaataatggaaaatatcataaagttgaaagttcctttagttgtagatatagggcaagggaaaaactggtatgatgcaaaataaaaggatcc

SEQ ID NO: 979 - DNA, 2678 bp, Artificial Sequence
  Description of Artificial Sequence: Synthetic Clostridium thermosulfurogenes DNA Polymerase T632W
atgaaatacctgctgccgaccgctgctgctggtctgctgctcctcgctgcccagccggcgatggccatggcgaaatttttgatcatagatggtaatagcttgatgtacagggcgtattttgccctgcctgatttgatgaacagcgaaggaatgcatacaaatgccatatacggtttttcaatgatgcttcttaaattgctggaggaggagaaaccagactacatagcaatagctttcgataaaaaggcttctacatttaggcacaaggagtacagtgcttataaaggaacccgccagtcgatgccagaagagctgatagaacaggtggatattttaaaagatgtgataaatgcatttaacataaagaccatcgagatagagggatttgaagcagatgatatcattggtacagtatcaaaaattgcttccgaaagtgggatggatgtgcttatcgtcacaggcgacagagatgcgcttcagcttgtgtcggcaaatgtaaaagtaaaaatatgtaaaaaaggcataacgcagatggatgagtacgatgaaaaggcggtctttgaaaagtatgaagtgacgccgcttcaattcatagacttgaaagggcttatgggagacaaatcagacaacattccaggagtgcccaatataggggagaagacggccataaagcttgttaaagaatttggatcaattgaaaatttactgatgaatacagataagttaaaagggaaaataaaagaaaatgtagaaaacaatgcagaattagctgttttaagcaaacggcttgctacgattgagagaaatgttcctattgatattgatttgaatgaatacgcggttaaaaattacgatgtcaataagcttacagagctatttgaaaaattggaattttcaagcctcatctcagatttaaaagatgatagtcgtgatacaaaggatattaaagaatggcctgtaagagattttacatacgttaaaaatgttttaggaaagtttgatgttttgtcattgtatccattcatatatgatggaaagataaaagcagtatcatttgcttgcggtgacggatcgttttttgtagagattgatgattatgacaattttaaattgcttaataatgataagcttacgttgataggacacgatctgaaagattttttagtaaacatttcatactgcggtattgaacttaattgtaagattttagatacggccataatgacttatcttttaaatccgtctgagtcgaattacgacataagtcgcgtattgaaaaaatacttgaaagaggatttgcaaaacatagatgatatagtaggcaagggcaggaataaaaagagctacgatgacattgacaaaaagcttttagtcgattatatgtgttcagccgcatcaaacttatctaagttaaaagataagctcatgtcatttataaaagagatggagatggaagatcttttaaaaaatgtggaaattccgcttattgaagtgctaaaatctatggaggtgtacggctttacattagataaagatgtacttagaagtatttctaaagaaatagatgaaaagacagataagattgtaaaagatatttacgatgctgctggatacgaatttaatattaactctacaaagcagttatcagaatttttgtttgataaactgaatttgccagcaataaaaaagactaaaacagggtattcgactgacatggaagtccttgcagaacttataccgtacaatgacatagtaggagaaataatagaatatagacagcttatgaagcttaaatctacgtacatagatggcttcattcccatcatggatgaaaataatagggtccactctacgtttaaacaaacagttgctgctacagggagaattagctcatgggagcctaatctgcagaacatacctgtaagagaagaatttggcaggaggataagaaaggcatttgtatcaagttatgaagatgggcttataatatctgctgattattctcagattgagctaagggttcttgcacatctttcagaggatgaaaaacttattgagtcatttttgaacaacgaagatatacatttaaggacggcatcggaggtttttaaggtttcgaaagaagaagtgacaagtgaaatgagaaggcgggcgaaagctgtcaactttggtattgtatatggtataagcgattacggcttatctaaagacttaaagatttcgcgaaaagaagcgaaagaatacatagacaattattttgacaggtacaagggcgtcaaaaattacatcgactcaattgtcaaatttgcaaaggaaaatgggtatgttacgactatcttaaataggagaagatacataccggaaatcaattcaaaaaattttaaccaaagatcttttggcgagagaatggcaatgaatacacctattcaaggtagcgctgcggatataataaagatgtcgatggttaaagtatacaatgaattaaaggaaagaggattgaaatcaagacttattcttcaggtgcacgatgagcttataattgacacacatcctgatgaagttgaaatagtcaaggagcttctaaaatcaataatggaaaatatcataaagttgaaagttcctttagttgtagatatagggcaagggaaaaactggtatgatgcaaaataaaaggatcc

SEQ ID NO: 980 - DNA, 2678 bp, Artificial Sequence
  Description of Artificial Sequence: Synthetic Clostridium thermosulfurogenes DNA Polymerase T632Y
atgaaatacctgctgccgaccgctgctgctggtctgctgctcctcgctgcccagccggcgatggccatggcgaaatttttgatcatagatggtaatagcttgatgtacagggcgtattttgccctgcctgatttgatgaacagcgaaggaatgcatacaaatgccatatacggtttttcaatgatgcttcttaaattgctggaggaggagaaaccagactacatagcaatagctttcgataaaaaggcttctacatttaggcacaaggagtacagtgcttataaaggaacccgccagtcgatgccagaagagctgatagaacaggtggatattttaaaagatgtgataaatgcatttaacataaagaccatcgagatagagggatttgaagcagatgatatcattggtacagtatcaaaaattgcttccgaaagtgggatggatgtgcttatcgtcacaggcgacagagatgcgcttcagcttgtgtcggcaaatgtaaaagtaaaaatatgtaaaaaaggcataacgcagatggatgagtacgatgaaaaggcggtctttgaaaagtatgaagtgacgccgcttcaattcatagacttgaaagggcttatgggagacaaatcagacaacattccaggagtgcccaatataggggagaagacggccataaagcttgttaaagaatttggatcaattgaaaatttactgatgaatacagataagttaaaagggaaaataaaagaaaatgtagaaaacaatgcagaattagctgttttaagcaaacggcttgctacgattgagagaaatgttcctattgatattgatttgaatgaatacgcggttaaaaattacgatgtcaataagcttacagagctatttgaaaaattggaattttcaagcctcatctcagatttaaaagatgatagtcgtgatacaaaggatattaaagaatggcctgtaagagattttacatacgttaaaaatgttttaggaaagtttgatgttttgtcattgtatccattcatatatgatggaaagataaaagcagtatcatttgcttgcggtgacggatcgttttttgtagagattgatgattatgacaattttaaattgcttaataatgataagcttacgttgataggacacgatctgaaagattttttagtaaacatttcatactgcggtattgaacttaattgtaagattttagatacggccataatgacttatcttttaaatccgtctgagtcgaattacgacataagtcgcgtattgaaaaaatacttgaaagaggatttgcaaaacatagatgatatagtaggcaagggcaggaataaaaagagctacgatgacattgacaaaaagcttttagtcgattatatgtgttcagccgcatcaaacttatctaagttaaaagataagctcatgtcatttataaaagagatggagatggaagatcttttaaaaaatgtggaaattccgcttattgaagtgctaaaatctatggaggtgtacggctttacattagataaagatgtacttagaagtatttctaaagaaatagatgaaaagacagataagattgtaaaagatatttacgatgctgctggatacgaatttaatattaactctacaaagcagttatcagaatttttgtttgataaactgaatttgccagcaataaaaaagactaaaacagggtattcgactgacatggaagtccttgcagaacttataccgtacaatgacatagtaggagaaataatagaatatagacagcttatgaagcttaaatctacgtacatagatggcttcattcccatcatggatgaaaataatagggtccactctacgtttaaacaaacagttgctgctacagggagaattagctcatatgagcctaatctgcagaacatacctgtaagagaagaatttggcaggaggataagaaaggcatttgtatcaagttatgaagatgggcttataatatctgctgattattctcagattgagctaagggttcttgcacatctttcagaggatgaaaaacttattgagtcatttttgaacaacgaagatatacatttaaggacggcatcggaggtttttaaggtttcgaaagaagaagtgacaagtgaaatgagaaggcgggcgaaagctgtcaactttggtattgtatatggtataagcgattacggcttatctaaagacttaaagatttcgcgaaaagaagcgaaagaatacatagacaattattttgacaggtacaagggcgtcaaaaattacatcgactcaattgtcaaatttgcaaaggaaaatgggtatgttacgactatcttaaataggagaagatacataccggaaatcaattcaaaaaattttaaccaaagatcttttggcgagagaatggcaatgaatacacctattcaaggtagcgctgcggatataataaagatgtcgatggttaaagtatacaatgaattaaaggaaagaggattgaaatcaagacttattcttcaggtgcacgatgagcttataattgacacacatcctgatgaagttgaaatagtcaaggagcttctaaaatcaataatggaaaatatcataaagttgaaagttcctttagttgtagatatagggcaagggaaaaactggtatgatgcaaaataaaaggatcc

SEQ ID NO: 981 - DNA, 2678 bp, Artificial Sequence
  Description of Artificial Sequence: Synthetic Clostridium thermosulfurogenes DNA Polymerase E633A
atgaaatacctgctgccgaccgctgctgctggtctgctgctcctcgctgcccagccggcgatggccatggcgaaatttttgatcatagatggtaatagcttgatgtacagggcgtattttgccctgcctgatttgatgaacagcgaaggaatgcatacaaatgccatatacggtttttcaatgatgcttcttaaattgctggaggaggagaaaccagactacatagcaatagctttcgataaaaaggcttctacatttaggcacaaggagtacagtgcttataaaggaacccgccagtcgatgccagaagagctgatagaacaggtggatattttaaaagatgtgataaatgcatttaacataaagaccatcgagatagagggatttgaagcagatgatatcattggtacagtatcaaaaattgcttccgaaagtgggatggatgtgcttatcgtcacaggcgacagagatgcgcttcagcttgtgtcggcaaatgtaaaagtaaaaatatgtaaaaaaggcataacgcagatggatgagtacgatgaaaaggcggtctttgaaaagtatgaagtgacgccgcttcaattcatagacttgaaagggcttatgggagacaaatcagacaacattccaggagtgcccaatataggggagaagacggccataaagcttgttaaagaatttggatcaattgaaaatttactgatgaatacagataagttaaaagggaaaataaaagaaaatgtagaaaacaatgcagaattagctgttttaagcaaacggcttgctacgattgagagaaatgttcctattgatattgatttgaatgaatacgcggttaaaaattacgatgtcaataagcttacagagctatttgaaaaattggaattttcaagcctcatctcagatttaaaagatgatagtcgtgatacaaaggatattaaagaatggcctgtaagagattttacatacgttaaaaatgttttaggaaagtttgatgttttgtcattgtatccattcatatatgatggaaagataaaagcagtatcatttgcttgcggtgacggatcgttttttgtagagattgatgattatgacaattttaaattgcttaataatgataagcttacgttgataggacacgatctgaaagattttttagtaaacatttcatactgcggtattgaacttaattgtaagattttagatacggccataatgacttatcttttaaatccgtctgagtcgaattacgacataagtcgcgtattgaaaaaatacttgaaagaggatttgcaaaacatagatgatatagtaggcaagggcaggaataaaaagagctacgatgacattgacaaaaagcttttagtcgattatatgtgttcagccgcatcaaacttatctaagttaaaagataagctcatgtcatttataaaagagatggagatggaagatcttttaaaaaatgtggaaattccgcttattgaagtgctaaaatctatggaggtgtacggctttacattagataaagatgtacttagaagtatttctaaagaaatagatgaaaagacagataagattgtaaaagatatttacgatgctgctggatacgaatttaatattaactctacaaagcagttatcagaatttttgtttgataaactgaatttgccagcaataaaaaagactaaaacagggtattcgactgacatggaagtccttgcagaacttataccgtacaatgacatagtaggagaaataatagaatatagacagcttatgaagcttaaatctacgtacatagatggcttcattcccatcatggatgaaaataatagggtccactctacgtttaaacaaacagttgctgctacagggagaattagctcaacagctcctaatctgcagaacatacctgtaagagaagaatttggcaggaggataagaaaggcatttgtatcaagttatgaagatgggcttataatatctgctgattattctcagattgagctaagggttcttgcacatctttcagaggatgaaaaacttattgagtcatttttgaacaacgaagatatacatttaaggacggcatcggaggtttttaaggtttcgaaagaagaagtgacaagtgaaatgagaaggcgggcgaaagctgtcaactttggtattgtatatggtataagcgattacggcttatctaaagacttaaagatttcgcgaaaagaagcgaaagaatacatagacaattattttgacaggtacaagggcgtcaaaaattacatcgactcaattgtcaaatttgcaaaggaaaatgggtatgttacgactatcttaaataggagaagatacataccggaaatcaattcaaaaaattttaaccaaagatcttttggcgagagaatggcaatgaatacacctattcaaggtagcgctgcggatataataaagatgtcgatggttaaagtatacaatgaattaaaggaaagaggattgaaatcaagacttattcttcaggtgcacgatgagcttataattgacacacatcctgatgaagttgaaatagtcaaggagcttctaaaatcaataatggaaaatatcataaagttgaaagttcctttagttgtagatatagggcaagggaaaaactggtatgatgcaaaataaaaggatcc

SEQ ID NO: 982 - DNA, 2678 bp, Artificial Sequence
  Description of Artificial Sequence: Synthetic Clostridium thermosulfurogenes DNA Polymerase E633C
atgaaatacctgctgccgaccgctgctgctggtctgctgctcctcgctgcccagccggcgatggccatggcgaaatttttgatcatagatggtaatagcttgatgtacagggcgtattttgccctgcctgatttgatgaacagcgaaggaatgcatacaaatgccatatacggtttttcaatgatgcttcttaaattgctggaggaggagaaaccagactacatagcaatagctttcgataaaaaggcttctacatttaggcacaaggagtacagtgcttataaaggaacccgccagtcgatgccagaagagctgatagaacaggtggatattttaaaagatgtgataaatgcatttaacataaagaccatcgagatagagggatttgaagcagatgatatcattggtacagtatcaaaaattgcttccgaaagtgggatggatgtgcttatcgtcacaggcgacagagatgcgcttcagcttgtgtcggcaaatgtaaaagtaaaaatatgtaaaaaaggcataacgcagatggatgagtacgatgaaaaggcggtctttgaaaagtatgaagtgacgccgcttcaattcatagacttgaaagggcttatgggagacaaatcagacaacattccaggagtgcccaatataggggagaagacggccataaagcttgttaaagaatttggatcaattgaaaatttactgatgaatacagataagttaaaagggaaaataaaagaaaatgtagaaaacaatgcagaattagctgttttaagcaaacggcttgctacgattgagagaaatgttcctattgatattgatttgaatgaatacgcggttaaaaattacgatgtcaataagcttacagagctatttgaaaaattggaattttcaagcctcatctcagatttaaaagatgatagtcgtgatacaaaggatattaaagaatggcctgtaagagattttacatacgttaaaaatgttttaggaaagtttgatgttttgtcattgtatccattcatatatgatggaaagataaaagcagtatcatttgcttgcggtgacggatcgttttttgtagagattgatgattatgacaattttaaattgcttaataatgataagcttacgttgataggacacgatctgaaagattttttagtaaacatttcatactgcggtattgaacttaattgtaagattttagatacggccataatgacttatcttttaaatccgtctgagtcgaattacgacataagtcgcgtattgaaaaaatacttgaaagaggatttgcaaaacatagatgatatagtaggcaagggcaggaataaaaagagctacgatgacattgacaaaaagcttttagtcgattatatgtgttcagccgcatcaaacttatctaagttaaaagataagctcatgtcatttataaaagagatggagatggaagatcttttaaaaaatgtggaaattccgcttattgaagtgctaaaatctatggaggtgtacggctttacattagataaagatgtacttagaagtatttctaaagaaatagatgaaaagacagataagattgtaaaagatatttacgatgctgctggatacgaatttaatattaactctacaaagcagttatcagaatttttgtttgataaactgaatttgccagcaataaaaaagactaaaacagggtattcgactgacatggaagtccttgcagaacttataccgtacaatgacatagtaggagaaataatagaatatagacagcttatgaagcttaaatctacgtacatagatggcttcattcccatcatggatgaaaataatagggtccactctacgtttaaacaaacagttgctgctacagggagaattagctcaacatgtcctaatctgcagaacatacctgtaagagaagaatttggcaggaggataagaaaggcatttgtatcaagttatgaagatgggcttataatatctgctgattattctcagattgagctaagggttcttgcacatctttcagaggatgaaaaacttattgagtcatttttgaacaacgaagatatacatttaaggacggcatcggaggtttttaaggtttcgaaagaagaagtgacaagtgaaatgagaaggcgggcgaaagctgtcaactttggtattgtatatggtataagcgattacggcttatctaaagacttaaagatttcgcgaaaagaagcgaaagaatacatagacaattattttgacaggtacaagggcgtcaaaaattacatcgactcaattgtcaaatttgcaaaggaaaatgggtatgttacgactatcttaaataggagaagatacataccggaaatcaattcaaaaaattttaaccaaagatcttttggcgagagaatggcaatgaatacacctattcaaggtagcgctgcggatataataaagatgtcgatggttaaagtatacaatgaattaaaggaaagaggattgaaatcaagacttattcttcaggtgcacgatgagcttataattgacacacatcctgatgaagttgaaatagtcaaggagcttctaaaatcaataatggaaaatatcataaagttgaaagttcctttagttgtagatatagggcaagggaaaaactggtatgatgcaaaataaaaggatcc

SEQ ID NO: 983 - DNA, 2678 bp, Artificial Sequence
  Description of Artificial Sequence: Synthetic Clostridium thermosulfurogenes DNA Polymerase E633D
atgaaatacctgctgccgaccgctgctgctggtctgctgctcctcgctgcccagccggcgatggccatggcgaaatttttgatcatagatggtaatagcttgatgtacagggcgtattttgccctgcctgatttgatgaacagcgaaggaatgcatacaaatgccatatacggtttttcaatgatgcttcttaaattgctggaggaggagaaaccagactacatagcaatagctttcgataaaaaggcttctacatttaggcacaaggagtacagtgcttataaaggaacccgccagtcgatgccagaagagctgatagaacaggtggatattttaaaagatgtgataaatgcatttaacataaagaccatcgagatagagggatttgaagcagatgatatcattggtacagtatcaaaaattgcttccgaaagtgggatggatgtgcttatcgtcacaggcgacagagatgcgcttcagcttgtgtcggcaaatgtaaaagtaaaaatatgtaaaaaaggcataacgcagatggatgagtacgatgaaaaggcggtctttgaaaagtatgaagtgacgccgcttcaattcatagacttgaaagggcttatgggagacaaatcagacaacattccaggagtgcccaatataggggagaagacggccataaagcttgttaaagaatttggatcaattgaaaatttactgatgaatacagataagttaaaagggaaaataaaagaaaatgtagaaaacaatgcagaattagctgttttaagcaaacggcttgctacgattgagagaaatgttcctattgatattgatttgaatgaatacgcggttaaaaattacgatgtcaataagcttacagagctatttgaaaaattggaattttcaagcctcatctcagatttaaaagatgatagtcgtgatacaaaggatattaaagaatggcctgtaagagattttacatacgttaaaaatgttttaggaaagtttgatgttttgtcattgtatccattcatatatgatggaaagataaaagcagtatcatttgcttgcggtgacggatcgttttttgtagagattgatgattatgacaattttaaattgcttaataatgataagcttacgttgataggacacgatctgaaagattttttagtaaacatttcatactgcggtattgaacttaattgtaagattttagatacggccataatgacttatcttttaaatccgtctgagtcgaattacgacataagtcgcgtattgaaaaaatacttgaaagaggatttgcaaaacatagatgatatagtaggcaagggcaggaataaaaagagctacgatgacattgacaaaaagcttttagtcgattatatgtgttcagccgcatcaaacttatctaagttaaaagataagctcatgtcatttataaaagagatggagatggaagatcttttaaaaaatgtggaaattccgcttattgaagtgctaaaatctatggaggtgtacggctttacattagataaagatgtacttagaagtatttctaaagaaatagatgaaaagacagataagattgtaaaagatatttacgatgctgctggatacgaatttaatattaactctacaaagcagttatcagaatttttgtttgataaactgaatttgccagcaataaaaaagactaaaacagggtattcgactgacatggaagtccttgcagaacttataccgtacaatgacatagtaggagaaataatagaatatagacagcttatgaagcttaaatctacgtacatagatggcttcattcccatcatggatgaaaataatagggtccactctacgtttaaacaaacagttgctgctacagggagaattagctcaacagatcctaatctgcagaacatacctgtaagagaagaatttggcaggaggataagaaaggcatttgtatcaagttatgaagatgggcttataatatctgctgattattctcagattgagctaagggttcttgcacatctttcagaggatgaaaaacttattgagtcatttttgaacaacgaagatatacatttaaggacggcatcggaggtttttaaggtttcgaaagaagaagtgacaagtgaaatgagaaggcgggcgaaagctgtcaactttggtattgtatatggtataagcgattacggcttatctaaagacttaaagatttcgcgaaaagaagcgaaagaatacatagacaattattttgacaggtacaagggcgtcaaaaattacatcgactcaattgtcaaatttgcaaaggaaaatgggtatgttacgactatcttaaataggagaagatacataccggaaatcaattcaaaaaattttaaccaaagatcttttggcgagagaatggcaatgaatacacctattcaaggtagcgctgcggatataataaagatgtcgatggttaaagtatacaatgaattaaaggaaagaggattgaaatcaagacttattcttcaggtgcacgatgagcttataattgacacacatcctgatgaagttgaaatagtcaaggagcttctaaaatcaataatggaaaatatcataaagttgaaagttcctttagttgtagatatagggcaagggaaaaactggtatgatgcaaaataaaaggatcc

SEQ ID NO: 984 - DNA, 2678 bp, Artificial Sequence
  Description of Artificial Sequence: Synthetic Clostridium thermosulfurogenes DNA Polymerase E633F
atgaaatacctgctgccgaccgctgctgctggtctgctgctcctcgctgcccagccggcgatggccatggcgaaatttttgatcatagatggtaatagcttgatgtacagggcgtattttgccctgcctgatttgatgaacagcgaaggaatgcatacaaatgccatatacggtttttcaatgatgcttcttaaattgctggaggaggagaaaccagactacatagcaatagctttcgataaaaaggcttctacatttaggcacaaggagtacagtgcttataaaggaacccgccagtcgatgccagaagagctgatagaacaggtggatattttaaaagatgtgataaatgcatttaacataaagaccatcgagatagagggatttgaagcagatgatatcattggtacagtatcaaaaattgcttccgaaagtgggatggatgtgcttatcgtcacaggcgacagagatgcgcttcagcttgtgtcggcaaatgtaaaagtaaaaatatgtaaaaaaggcataacgcagatggatgagtacgatgaaaaggcggtctttgaaaagtatgaagtgacgccgcttcaattcatagacttgaaagggcttatgggagacaaatcagacaacattccaggagtgcccaatataggggagaagacggccataaagcttgttaaagaatttggatcaattgaaaatttactgatgaatacagataagttaaaagggaaaataaaagaaaatgtagaaaacaatgcagaattagctgttttaagcaaacggcttgctacgattgagagaaatgttcctattgatattgatttgaatgaatacgcggttaaaaattacgatgtcaataagcttacagagctatttgaaaaattggaattttcaagcctcatctcagatttaaaagatgatagtcgtgatacaaaggatattaaagaatggcctgtaagagattttacatacgttaaaaatgttttaggaaagtttgatgttttgtcattgtatccattcatatatgatggaaagataaaagcagtatcatttgcttgcggtgacggatcgttttttgtagagattgatgattatgacaattttaaattgcttaataatgataagcttacgttgataggacacgatctgaaagattttttagtaaacatttcatactgcggtattgaacttaattgtaagattttagatacggccataatgacttatcttttaaatccgtctgagtcgaattacgacataagtcgcgtattgaaaaaatacttgaaagaggatttgcaaaacatagatgatatagtaggcaagggcaggaataaaaagagctacgatgacattgacaaaaagcttttagtcgattatatgtgttcagccgcatcaaacttatctaagttaaaagataagctcatgtcatttataaaagagatggagatggaagatcttttaaaaaatgtggaaattccgcttattgaagtgctaaaatctatggaggtgtacggctttacattagataaagatgtacttagaagtatttctaaagaaatagatgaaaagacagataagattgtaaaagatatttacgatgctgctggatacgaatttaatattaactctacaaagcagttatcagaatttttgtttgataaactgaatttgccagcaataaaaaagactaaaacagggtattcgactgacatggaagtccttgcagaacttataccgtacaatgacatagtaggagaaataatagaatatagacagcttatgaagcttaaatctacgtacatagatggcttcattcccatcatggatgaaaataatagggtccactctacgtttaaacaaacagttgctgctacagggagaattagctcaacatttcctaatctgcagaacatacctgtaagagaagaatttggcaggaggataagaaaggcatttgtatcaagttatgaagatgggcttataatatctgctgattattctcagattgagctaagggttcttgcacatctttcagaggatgaaaaacttattgagtcatttttgaacaacgaagatatacatttaaggacggcatcggaggtttttaaggtttcgaaagaagaagtgacaagtgaaatgagaaggcgggcgaaagctgtcaactttggtattgtatatggtataagcgattacggcttatctaaagacttaaagatttcgcgaaaagaagcgaaagaatacatagacaattattttgacaggtacaagggcgtcaaaaattacatcgactcaattgtcaaatttgcaaaggaaaatgggtatgttacgactatcttaaataggagaagatacataccggaaatcaattcaaaaaattttaaccaaagatcttttggcgagagaatggcaatgaatacacctattcaaggtagcgctgcggatataataaagatgtcgatggttaaagtatacaatgaattaaaggaaagaggattgaaatcaagacttattcttcaggtgcacgatgagcttataattgacacacatcctgatgaagttgaaatagtcaaggagcttctaaaatcaataatggaaaatatcataaagttgaaagttcctttagttgtagatatagggcaagggaaaaactggtatgatgcaaaataaaaggatcc

SEQ ID NO: 985 - DNA, 2678 bp, Artificial Sequence
  Description of Artificial Sequence: Synthetic Clostridium thermosulfurogenes DNA Polymerase E633G
atgaaatacctgctgccgaccgctgctgctggtctgctgctcctcgctgcccagccggcgatggccatggcgaaatttttgatcatagatggtaatagcttgatgtacagggcgtattttgccctgcctgatttgatgaacagcgaaggaatgcatacaaatgccatatacggtttttcaatgatgcttcttaaattgctggaggaggagaaaccagactacatagcaatagctttcgataaaaaggcttctacatttaggcacaaggagtacagtgcttataaaggaacccgccagtcgatgccagaagagctgatagaacaggtggatattttaaaagatgtgataaatgcatttaacataaagaccatcgagatagagggatttgaagcagatgatatcattggtacagtatcaaaaattgcttccgaaagtgggatggatgtgcttatcgtcacaggcgacagagatgcgcttcagcttgtgtcggcaaatgtaaaagtaaaaatatgtaaaaaaggcataacgcagatggatgagtacgatgaaaaggcggtctttgaaaagtatgaagtgacgccgcttcaattcatagacttgaaagggcttatgggagacaaatcagacaacattccaggagtgcccaatataggggagaagacggccataaagcttgttaaagaatttggatcaattgaaaatttactgatgaatacagataagttaaaagggaaaataaaagaaaatgtagaaaacaatgcagaattagctgttttaagcaaacggcttgctacgattgagagaaatgttcctattgatattgatttgaatgaatacgcggttaaaaattacgatgtcaataagcttacagagctatttgaaaaattggaattttcaagcctcatctcagatttaaaagatgatagtcgtgatacaaaggatattaaagaatggcctgtaagagattttacatacgttaaaaatgttttaggaaagtttgatgttttgtcattgtatccattcatatatgatggaaagataaaagcagtatcatttgcttgcggtgacggatcgttttttgtagagattgatgattatgacaattttaaattgcttaataatgataagcttacgttgataggacacgatctgaaagattttttagtaaacatttcatactgcggtattgaacttaattgtaagattttagatacggccataatgacttatcttttaaatccgtctgagtcgaattacgacataagtcgcgtattgaaaaaatacttgaaagaggatttgcaaaacatagatgatatagtaggcaagggcaggaataaaaagagctacgatgacattgacaaaaagcttttagtcgattatatgtgttcagccgcatcaaacttatctaagttaaaagataagctcatgtcatttataaaagagatggagatggaagatcttttaaaaaatgtggaaattccgcttattgaagtgctaaaatctatggaggtgtacggctttacattagataaagatgtacttagaagtatttctaaagaaatagatgaaaagacagataagattgtaaaagatatttacgatgctgctggatacgaatttaatattaactctacaaagcagttatcagaatttttgtttgataaactgaatttgccagcaataaaaaagactaaaacagggtattcgactgacatggaagtccttgcagaacttataccgtacaatgacatagtaggagaaataatagaatatagacagcttatgaagcttaaatctacgtacatagatggcttcattcccatcatggatgaaaataatagggtccactctacgtttaaacaaacagttgctgctacagggagaattagctcaacaggtcctaatctgcagaacatacctgtaagagaagaatttggcaggaggataagaaaggcatttgtatcaagttatgaagatgggcttataatatctgctgattattctcagattgagctaagggttcttgcacatctttcagaggatgaaaaacttattgagtcatttttgaacaacgaagatatacatttaaggacggcatcggaggtttttaaggtttcgaaagaagaagtgacaagtgaaatgagaaggcgggcgaaagctgtcaactttggtattgtatatggtataagcgattacggcttatctaaagacttaaagatttcgcgaaaagaagcgaaagaatacatagacaattattttgacaggtacaagggcgtcaaaaattacatcgactcaattgtcaaatttgcaaaggaaaatgggtatgttacgactatcttaaataggagaagatacataccggaaatcaattcaaaaaattttaaccaaagatcttttggcgagagaatggcaatgaatacacctattcaaggtagcgctgcggatataataaagatgtcgatggttaaagtatacaatgaattaaaggaaagaggattgaaatcaagacttattcttcaggtgcacgatgagcttataattgacacacatcctgatgaagttgaaatagtcaaggagcttctaaaatcaataatggaaaatatcataaagttgaaagttcctttagttgtagatatagggcaagggaaaaactggtatgatgcaaaataaaaggatcc

SEQ ID NO: 986 - DNA, 2678 bp, Artificial Sequence
  Description of Artificial Sequence: Synthetic Clostridium thermosulfurogenes DNA Polymerase E633H
atgaaatacctgctgccgaccgctgctgctggtctgctgctcctcgctgcccagccggcgatggccatggcgaaatttttgatcatagatggtaatagcttgatgtacagggcgtattttgccctgcctgatttgatgaacagcgaaggaatgcatacaaatgccatatacggtttttcaatgatgcttcttaaattgctggaggaggagaaaccagactacatagcaatagctttcgataaaaaggcttctacatttaggcacaaggagtacagtgcttataaaggaacccgccagtcgatgccagaagagctgatagaacaggtggatattttaaaagatgtgataaatgcatttaacataaagaccatcgagatagagggatttgaagcagatgatatcattggtacagtatcaaaaattgcttccgaaagtgggatggatgtgcttatcgtcacaggcgacagagatgcgcttcagcttgtgtcggcaaatgtaaaagtaaaaatatgtaaaaaaggcataacgcagatggatgagtacgatgaaaaggcggtctttgaaaagtatgaagtgacgccgcttcaattcatagacttgaaagggcttatgggagacaaatcagacaacattccaggagtgcccaatataggggagaagacggccataaagcttgttaaagaatttggatcaattgaaaatttactgatgaatacagataagttaaaagggaaaataaaagaaaatgtagaaaacaatgcagaattagctgttttaagcaaacggcttgctacgattgagagaaatgttcctattgatattgatttgaatgaatacgcggttaaaaattacgatgtcaataagcttacagagctatttgaaaaattggaattttcaagcctcatctcagatttaaaagatgatagtcgtgatacaaaggatattaaagaatggcctgtaagagattttacatacgttaaaaatgttttaggaaagtttgatgttttgtcattgtatccattcatatatgatggaaagataaaagcagtatcatttgcttgcggtgacggatcgttttttgtagagattgatgattatgacaattttaaattgcttaataatgataagcttacgttgataggacacgatctgaaagattttttagtaaacatttcatactgcggtattgaacttaattgtaagattttagatacggccataatgacttatcttttaaatccgtctgagtcgaattacgacataagtcgcgtattgaaaaaatacttgaaagaggatttgcaaaacatagatgatatagtaggcaagggcaggaataaaaagagctacgatgacattgacaaaaagcttttagtcgattatatgtgttcagccgcatcaaacttatctaagttaaaagataagctcatgtcatttataaaagagatggagatggaagatcttttaaaaaatgtggaaattccgcttattgaagtgctaaaatctatggaggtgtacggctttacattagataaagatgtacttagaagtatttctaaagaaatagatgaaaagacagataagattgtaaaagatatttacgatgctgctggatacgaatttaatattaactctacaaagcagttatcagaatttttgtttgataaactgaatttgccagcaataaaaaagactaaaacagggtattcgactgacatggaagtccttgcagaacttataccgtacaatgacatagtaggagaaataatagaatatagacagcttatgaagcttaaatctacgtacatagatggcttcattcccatcatggatgaaaataatagggtccactctacgtttaaacaaacagttgctgctacagggagaattagctcaacacatcctaatctgcagaacatacctgtaagagaagaatttggcaggaggataagaaaggcatttgtatcaagttatgaagatgggcttataatatctgctgattattctcagattgagctaagggttcttgcacatctttcagaggatgaaaaacttattgagtcatttttgaacaacgaagatatacatttaaggacggcatcggaggtttttaaggtttcgaaagaagaagtgacaagtgaaatgagaaggcgggcgaaagctgtcaactttggtattgtatatggtataagcgattacggcttatctaaagacttaaagatttcgcgaaaagaagcgaaagaatacatagacaattattttgacaggtacaagggcgtcaaaaattacatcgactcaattgtcaaatttgcaaaggaaaatgggtatgttacgactatcttaaataggagaagatacataccggaaatcaattcaaaaaattttaaccaaagatcttttggcgagagaatggcaatgaatacacctattcaaggtagcgctgcggatataataaagatgtcgatggttaaagtatacaatgaattaaaggaaagaggattgaaatcaagacttattcttcaggtgcacgatgagcttataattgacacacatcctgatgaagttgaaatagtcaaggagcttctaaaatcaataatggaaaatatcataaagttgaaagttcctttagttgtagatatagggcaagggaaaaactggtatgatgcaaaataaaaggatcc

SEQ ID NO: 987 - DNA, 2678 bp, Artificial Sequence
  Description of Artificial Sequence: Synthetic Clostridium thermosulfurogenes DNA Polymerase E633I
atgaaatacctgctgccgaccgctgctgctggtctgctgctcctcgctgcccagccggcgatggccatggcgaaatttttgatcatagatggtaatagcttgatgtacagggcgtattttgccctgcctgatttgatgaacagcgaaggaatgcatacaaatgccatatacggtttttcaatgatgcttcttaaattgctggaggaggagaaaccagactacatagcaatagctttcgataaaaaggcttctacatttaggcacaaggagtacagtgcttataaaggaacccgccagtcgatgccagaagagctgatagaacaggtggatattttaaaagatgtgataaatgcatttaacataaagaccatcgagatagagggatttgaagcagatgatatcattggtacagtatcaaaaattgcttccgaaagtgggatggatgtgcttatcgtcacaggcgacagagatgcgcttcagcttgtgtcggcaaatgtaaaagtaaaaatatgtaaaaaaggcataacgcagatggatgagtacgatgaaaaggcggtctttgaaaagtatgaagtgacgccgcttcaattcatagacttgaaagggcttatgggagacaaatcagacaacattccaggagtgcccaatataggggagaagacggccataaagcttgttaaagaatttggatcaattgaaaatttactgatgaatacagataagttaaaagggaaaataaaagaaaatgtagaaaacaatgcagaattagctgttttaagcaaacggcttgctacgattgagagaaatgttcctattgatattgatttgaatgaatacgcggttaaaaattacgatgtcaataagcttacagagctatttgaaaaattggaattttcaagcctcatctcagatttaaaagatgatagtcgtgatacaaaggatattaaagaatggcctgtaagagattttacatacgttaaaaatgttttaggaaagtttgatgttttgtcattgtatccattcatatatgatggaaagataaaagcagtatcatttgcttgcggtgacggatcgttttttgtagagattgatgattatgacaattttaaattgcttaataatgataagcttacgttgataggacacgatctgaaagattttttagtaaacatttcatactgcggtattgaacttaattgtaagattttagatacggccataatgacttatcttttaaatccgtctgagtcgaattacgacataagtcgcgtattgaaaaaatacttgaaagaggatttgcaaaacatagatgatatagtaggcaagggcaggaataaaaagagctacgatgacattgacaaaaagcttttagtcgattatatgtgttcagccgcatcaaacttatctaagttaaaagataagctcatgtcatttataaaagagatggagatggaagatcttttaaaaaatgtggaaattccgcttattgaagtgctaaaatctatggaggtgtacggctttacattagataaagatgtacttagaagtatttctaaagaaatagatgaaaagacagataagattgtaaaagatatttacgatgctgctggatacgaatttaatattaactctacaaagcagttatcagaatttttgtttgataaactgaatttgccagcaataaaaaagactaaaacagggtattcgactgacatggaagtccttgcagaacttataccgtacaatgacatagtaggagaaataatagaatatagacagcttatgaagcttaaatctacgtacatagatggcttcattcccatcatggatgaaaataatagggtccactctacgtttaaacaaacagttgctgctacagggagaattagctcaacaattcctaatctgcagaacatacctgtaagagaagaatttggcaggaggataagaaaggcatttgtatcaagttatgaagatgggcttataatatctgctgattattctcagattgagctaagggttcttgcacatctttcagaggatgaaaaacttattgagtcatttttgaacaacgaagatatacatttaaggacggcatcggaggtttttaaggtttcgaaagaagaagtgacaagtgaaatgagaaggcgggcgaaagctgtcaactttggtattgtatatggtataagcgattacggcttatctaaagacttaaagatttcgcgaaaagaagcgaaagaatacatagacaattattttgacaggtacaagggcgtcaaaaattacatcgactcaattgtcaaatttgcaaaggaaaatgggtatgttacgactatcttaaataggagaagatacataccggaaatcaattcaaaaaattttaaccaaagatcttttggcgagagaatggcaatgaatacacctattcaaggtagcgctgcggatataataaagatgtcgatggttaaagtatacaatgaattaaaggaaagaggattgaaatcaagacttattcttcaggtgcacgatgagcttataattgacacacatcctgatgaagttgaaatagtcaaggagcttctaaaatcaataatggaaaatatcataaagttgaaagttcctttagttgtagatatagggcaagggaaaaactggtatgatgcaaaataaaaggatcc

SEQ ID NO: 988 - DNA, 2678 bp, Artificial Sequence
  Description of Artificial Sequence: Synthetic Clostridium thermosulfurogenes DNA Polymerase E633L
atgaaatacctgctgccgaccgctgctgctggtctgctgctcctcgctgcccagccggcgatggccatggcgaaatttttgatcatagatggtaatagcttgatgtacagggcgtattttgccctgcctgatttgatgaacagcgaaggaatgcatacaaatgccatatacggtttttcaatgatgcttcttaaattgctggaggaggagaaaccagactacatagcaatagctttcgataaaaaggcttctacatttaggcacaaggagtacagtgcttataaaggaacccgccagtcgatgccagaagagctgatagaacaggtggatattttaaaagatgtgataaatgcatttaacataaagaccatcgagatagagggatttgaagcagatgatatcattggtacagtatcaaaaattgcttccgaaagtgggatggatgtgcttatcgtcacaggcgacagagatgcgcttcagcttgtgtcggcaaatgtaaaagtaaaaatatgtaaaaaaggcataacgcagatggatgagtacgatgaaaaggcggtctttgaaaagtatgaagtgacgccgcttcaattcatagacttgaaagggcttatgggagacaaatcagacaacattccaggagtgcccaatataggggagaagacggccataaagcttgttaaagaatttggatcaattgaaaatttactgatgaatacagataagttaaaagggaaaataaaagaaaatgtagaaaacaatgcagaattagctgttttaagcaaacggcttgctacgattgagagaaatgttcctattgatattgatttgaatgaatacgcggttaaaaattacgatgtcaataagcttacagagctatttgaaaaattggaattttcaagcctcatctcagatttaaaagatgatagtcgtgatacaaaggatattaaagaatggcctgtaagagattttacatacgttaaaaatgttttaggaaagtttgatgttttgtcattgtatccattcatatatgatggaaagataaaagcagtatcatttgcttgcggtgacggatcgttttttgtagagattgatgattatgacaattttaaattgcttaataatgataagcttacgttgataggacacgatctgaaagattttttagtaaacatttcatactgcggtattgaacttaattgtaagattttagatacggccataatgacttatcttttaaatccgtctgagtcgaattacgacataagtcgcgtattgaaaaaatacttgaaagaggatttgcaaaacatagatgatatagtaggcaagggcaggaataaaaagagctacgatgacattgacaaaaagcttttagtcgattatatgtgttcagccgcatcaaacttatctaagttaaaagataagctcatgtcatttataaaagagatggagatggaagatcttttaaaaaatgtggaaattccgcttattgaagtgctaaaatctatggaggtgtacggctttacattagataaagatgtacttagaagtatttctaaagaaatagatgaaaagacagataagattgtaaaagatatttacgatgctgctggatacgaatttaatattaactctacaaagcagttatcagaatttttgtttgataaactgaatttgccagcaataaaaaagactaaaacagggtattcgactgacatggaagtccttgcagaacttataccgtacaatgacatagtaggagaaataatagaatatagacagcttatgaagcttaaatctacgtacatagatggcttcattcccatcatggatgaaaataatagggtccactctacgtttaaacaaacagttgctgctacagggagaattagctcaacacttcctaatctgcagaacatacctgtaagagaagaatttggcaggaggataagaaaggcatttgtatcaagttatgaagatgggcttataatatctgctgattattctcagattgagctaagggttcttgcacatctttcagaggatgaaaaacttattgagtcatttttgaacaacgaagatatacatttaaggacggcatcggaggtttttaaggtttcgaaagaagaagtgacaagtgaaatgagaaggcgggcgaaagctgtcaactttggtattgtatatggtataagcgattacggcttatctaaagacttaaagatttcgcgaaaagaagcgaaagaatacatagacaattattttgacaggtacaagggcgtcaaaaattacatcgactcaattgtcaaatttgcaaaggaaaatgggtatgttacgactatcttaaataggagaagatacataccggaaatcaattcaaaaaattttaaccaaagatcttttggcgagagaatggcaatgaatacacctattcaaggtagcgctgcggatataataaagatgtcgatggttaaagtatacaatgaattaaaggaaagaggattgaaatcaagacttattcttcaggtgcacgatgagcttataattgacacacatcctgatgaagttgaaatagtcaaggagcttctaaaatcaataatggaaaatatcataaagttgaaagttcctttagttgtagatatagggcaagggaaaaactggtatgatgcaaaataaaaggatcc

SEQ ID NO: 989 - DNA, 2678 bp, Artificial Sequence
  Description of Artificial Sequence: Synthetic Clostridium thermosulfurogenes DNA Polymerase E633M
atgaaatacctgctgccgaccgctgctgctggtctgctgctcctcgctgcccagccggcgatggccatggcgaaatttttgatcatagatggtaatagcttgatgtacagggcgtattttgccctgcctgatttgatgaacagcgaaggaatgcatacaaatgccatatacggtttttcaatgatgcttcttaaattgctggaggaggagaaaccagactacatagcaatagctttcgataaaaaggcttctacatttaggcacaaggagtacagtgcttataaaggaacccgccagtcgatgccagaagagctgatagaacaggtggatattttaaaagatgtgataaatgcatttaacataaagaccatcgagatagagggatttgaagcagatgatatcattggtacagtatcaaaaattgcttccgaaagtgggatggatgtgcttatcgtcacaggcgacagagatgcgcttcagcttgtgtcggcaaatgtaaaagtaaaaatatgtaaaaaaggcataacgcagatggatgagtacgatgaaaaggcggtctttgaaaagtatgaagtgacgccgcttcaattcatagacttgaaagggcttatgggagacaaatcagacaacattccaggagtgcccaatataggggagaagacggccataaagcttgttaaagaatttggatcaattgaaaatttactgatgaatacagataagttaaaagggaaaataaaagaaaatgtagaaaacaatgcagaattagctgttttaagcaaacggcttgctacgattgagagaaatgttcctattgatattgatttgaatgaatacgcggttaaaaattacgatgtcaataagcttacagagctatttgaaaaattggaattttcaagcctcatctcagatttaaaagatgatagtcgtgatacaaaggatattaaagaatggcctgtaagagattttacatacgttaaaaatgttttaggaaagtttgatgttttgtcattgtatccattcatatatgatggaaagataaaagcagtatcatttgcttgcggtgacggatcgttttttgtagagattgatgattatgacaattttaaattgcttaataatgataagcttacgttgataggacacgatctgaaagattttttagtaaacatttcatactgcggtattgaacttaattgtaagattttagatacggccataatgacttatcttttaaatccgtctgagtcgaattacgacataagtcgcgtattgaaaaaatacttgaaagaggatttgcaaaacatagatgatatagtaggcaagggcaggaataaaaagagctacgatgacattgacaaaaagcttttagtcgattatatgtgttcagccgcatcaaacttatctaagttaaaagataagctcatgtcatttataaaagagatggagatggaagatcttttaaaaaatgtggaaattccgcttattgaagtgctaaaatctatggaggtgtacggctttacattagataaagatgtacttagaagtatttctaaagaaatagatgaaaagacagataagattgtaaaagatatttacgatgctgctggatacgaatttaatattaactctacaaagcagttatcagaatttttgtttgataaactgaatttgccagcaataaaaaagactaaaacagggtattcgactgacatggaagtccttgcagaacttataccgtacaatgacatagtaggagaaataatagaatatagacagcttatgaagcttaaatctacgtacatagatggcttcattcccatcatggatgaaaataatagggtccactctacgtttaaacaaacagttgctgctacagggagaattagctcaacaatgcctaatctgcagaacatacctgtaagagaagaatttggcaggaggataagaaaggcatttgtatcaagttatgaagatgggcttataatatctgctgattattctcagattgagctaagggttcttgcacatctttcagaggatgaaaaacttattgagtcatttttgaacaacgaagatatacatttaaggacggcatcggaggtttttaaggtttcgaaagaagaagtgacaagtgaaatgagaaggcgggcgaaagctgtcaactttggtattgtatatggtataagcgattacggcttatctaaagacttaaagatttcgcgaaaagaagcgaaagaatacatagacaattattttgacaggtacaagggcgtcaaaaattacatcgactcaattgtcaaatttgcaaaggaaaatgggtatgttacgactatcttaaataggagaagatacataccggaaatcaattcaaaaaattttaaccaaagatcttttggcgagagaatggcaatgaatacacctattcaaggtagcgctgcggatataataaagatgtcgatggttaaagtatacaatgaattaaaggaaagaggattgaaatcaagacttattcttcaggtgcacgatgagcttataattgacacacatcctgatgaagttgaaatagtcaaggagcttctaaaatcaataatggaaaatatcataaagttgaaagttcctttagttgtagatatagggcaagggaaaaactggtatgatgcaaaataaaaggatcc

SEQ ID NO: 990 - DNA, 2678 bp, Artificial Sequence
  Description of Artificial Sequence: Synthetic Clostridium thermosulfurogenes DNA Polymerase E633N
atgaaatacctgctgccgaccgctgctgctggtctgctgctcctcgctgcccagccggcgatggccatggcgaaatttttgatcatagatggtaatagcttgatgtacagggcgtattttgccctgcctgatttgatgaacagcgaaggaatgcatacaaatgccatatacggtttttcaatgatgcttcttaaattgctggaggaggagaaaccagactacatagcaatagctttcgataaaaaggcttctacatttaggcacaaggagtacagtgcttataaaggaacccgccagtcgatgccagaagagctgatagaacaggtggatattttaaaagatgtgataaatgcatttaacataaagaccatcgagatagagggatttgaagcagatgatatcattggtacagtatcaaaaattgcttccgaaagtgggatggatgtgcttatcgtcacaggcgacagagatgcgcttcagcttgtgtcggcaaatgtaaaagtaaaaatatgtaaaaaaggcataacgcagatggatgagtacgatgaaaaggcggtctttgaaaagtatgaagtgacgccgcttcaattcatagacttgaaagggcttatgggagacaaatcagacaacattccaggagtgcccaatataggggagaagacggccataaagcttgttaaagaatttggatcaattgaaaatttactgatgaatacagataagttaaaagggaaaataaaagaaaatgtagaaaacaatgcagaattagctgttttaagcaaacggcttgctacgattgagagaaatgttcctattgatattgatttgaatgaatacgcggttaaaaattacgatgtcaataagcttacagagctatttgaaaaattggaattttcaagcctcatctcagatttaaaagatgatagtcgtgatacaaaggatattaaagaatggcctgtaagagattttacatacgttaaaaatgttttaggaaagtttgatgttttgtcattgtatccattcatatatgatggaaagataaaagcagtatcatttgcttgcggtgacggatcgttttttgtagagattgatgattatgacaattttaaattgcttaataatgataagcttacgttgataggacacgatctgaaagattttttagtaaacatttcatactgcggtattgaacttaattgtaagattttagatacggccataatgacttatcttttaaatccgtctgagtcgaattacgacataagtcgcgtattgaaaaaatacttgaaagaggatttgcaaaacatagatgatatagtaggcaagggcaggaataaaaagagctacgatgacattgacaaaaagcttttagtcgattatatgtgttcagccgcatcaaacttatctaagttaaaagataagctcatgtcatttataaaagagatggagatggaagatcttttaaaaaatgtggaaattccgcttattgaagtgctaaaatctatggaggtgtacggctttacattagataaagatgtacttagaagtatttctaaagaaatagatgaaaagacagataagattgtaaaagatatttacgatgctgctggatacgaatttaatattaactctacaaagcagttatcagaatttttgtttgataaactgaatttgccagcaataaaaaagactaaaacagggtattcgactgacatggaagtccttgcagaacttataccgtacaatgacatagtaggagaaataatagaatatagacagcttatgaagcttaaatctacgtacatagatggcttcattcccatcatggatgaaaataatagggtccactctacgtttaaacaaacagttgctgctacagggagaattagctcaacaaatcctaatctgcagaacatacctgtaagagaagaatttggcaggaggataagaaaggcatttgtatcaagttatgaagatgggcttataatatctgctgattattctcagattgagctaagggttcttgcacatctttcagaggatgaaaaacttattgagtcatttttgaacaacgaagatatacatttaaggacggcatcggaggtttttaaggtttcgaaagaagaagtgacaagtgaaatgagaaggcgggcgaaagctgtcaactttggtattgtatatggtataagcgattacggcttatctaaagacttaaagatttcgcgaaaagaagcgaaagaatacatagacaattattttgacaggtacaagggcgtcaaaaattacatcgactcaattgtcaaatttgcaaaggaaaatgggtatgttacgactatcttaaataggagaagatacataccggaaatcaattcaaaaaattttaaccaaagatcttttggcgagagaatggcaatgaatacacctattcaaggtagcgctgcggatataataaagatgtcgatggttaaagtatacaatgaattaaaggaaagaggattgaaatcaagacttattcttcaggtgcacgatgagcttataattgacacacatcctgatgaagttgaaatagtcaaggagcttctaaaatcaataatggaaaatatcataaagttgaaagttcctttagttgtagatatagggcaagggaaaaactggtatgatgcaaaataaaaggatcc

SEQ ID NO: 991 - DNA, 2678 bp, Artificial Sequence
  Description of Artificial Sequence: Synthetic Clostridium thermosulfurogenes DNA Polymerase E633P
atgaaatacctgctgccgaccgctgctgctggtctgctgctcctcgctgcccagccggcgatggccatggcgaaatttttgatcatagatggtaatagcttgatgtacagggcgtattttgccctgcctgatttgatgaacagcgaaggaatgcatacaaatgccatatacggtttttcaatgatgcttcttaaattgctggaggaggagaaaccagactacatagcaatagctttcgataaaaaggcttctacatttaggcacaaggagtacagtgcttataaaggaacccgccagtcgatgccagaagagctgatagaacaggtggatattttaaaagatgtgataaatgcatttaacataaagaccatcgagatagagggatttgaagcagatgatatcattggtacagtatcaaaaattgcttccgaaagtgggatggatgtgcttatcgtcacaggcgacagagatgcgcttcagcttgtgtcggcaaatgtaaaagtaaaaatatgtaaaaaaggcataacgcagatggatgagtacgatgaaaaggcggtctttgaaaagtatgaagtgacgccgcttcaattcatagacttgaaagggcttatgggagacaaatcagacaacattccaggagtgcccaatataggggagaagacggccataaagcttgttaaagaatttggatcaattgaaaatttactgatgaatacagataagttaaaagggaaaataaaagaaaatgtagaaaacaatgcagaattagctgttttaagcaaacggcttgctacgattgagagaaatgttcctattgatattgatttgaatgaatacgcggttaaaaattacgatgtcaataagcttacagagctatttgaaaaattggaattttcaagcctcatctcagatttaaaagatgatagtcgtgatacaaaggatattaaagaatggcctgtaagagattttacatacgttaaaaatgttttaggaaagtttgatgttttgtcattgtatccattcatatatgatggaaagataaaagcagtatcatttgcttgcggtgacggatcgttttttgtagagattgatgattatgacaattttaaattgcttaataatgataagcttacgttgataggacacgatctgaaagattttttagtaaacatttcatactgcggtattgaacttaattgtaagattttagatacggccataatgacttatcttttaaatccgtctgagtcgaattacgacataagtcgcgtattgaaaaaatacttgaaagaggatttgcaaaacatagatgatatagtaggcaagggcaggaataaaaagagctacgatgacattgacaaaaagcttttagtcgattatatgtgttcagccgcatcaaacttatctaagttaaaagataagctcatgtcatttataaaagagatggagatggaagatcttttaaaaaatgtggaaattccgcttattgaagtgctaaaatctatggaggtgtacggctttacattagataaagatgtacttagaagtatttctaaagaaatagatgaaaagacagataagattgtaaaagatatttacgatgctgctggatacgaatttaatattaactctacaaagcagttatcagaatttttgtttgataaactgaatttgccagcaataaaaaagactaaaacagggtattcgactgacatggaagtccttgcagaacttataccgtacaatgacatagtaggagaaataatagaatatagacagcttatgaagcttaaatctacgtacatagatggcttcattcccatcatggatgaaaataatagggtccactctacgtttaaacaaacagttgctgctacagggagaattagctcaacacctcctaatctgcagaacatacctgtaagagaagaatttggcaggaggataagaaaggcatttgtatcaagttatgaagatgggcttataatatctgctgattattctcagattgagctaagggttcttgcacatctttcagaggatgaaaaacttattgagtcatttttgaacaacgaagatatacatttaaggacggcatcggaggtttttaaggtttcgaaagaagaagtgacaagtgaaatgagaaggcgggcgaaagctgtcaactttggtattgtatatggtataagcgattacggcttatctaaagacttaaagatttcgcgaaaagaagcgaaagaatacatagacaattattttgacaggtacaagggcgtcaaaaattacatcgactcaattgtcaaatttgcaaaggaaaatgggtatgttacgactatcttaaataggagaagatacataccggaaatcaattcaaaaaattttaaccaaagatcttttggcgagagaatggcaatgaatacacctattcaaggtagcgctgcggatataataaagatgtcgatggttaaagtatacaatgaattaaaggaaagaggattgaaatcaagacttattcttcaggtgcacgatgagcttataattgacacacatcctgatgaagttgaaatagtcaaggagcttctaaaatcaataatggaaaatatcataaagttgaaagttcctttagttgtagatatagggcaagggaaaaactggtatgatgcaaaataaaaggatcc

SEQ ID NO: 992 - DNA, 2678 bp, Artificial Sequence
  Description of Artificial Sequence: Synthetic Clostridium thermosulfurogenes DNA Polymerase E633Q
atgaaatacctgctgccgaccgctgctgctggtctgctgctcctcgctgcccagccggcgatggccatggcgaaatttttgatcatagatggtaatagcttgatgtacagggcgtattttgccctgcctgatttgatgaacagcgaaggaatgcatacaaatgccatatacggtttttcaatgatgcttcttaaattgctggaggaggagaaaccagactacatagcaatagctttcgataaaaaggcttctacatttaggcacaaggagtacagtgcttataaaggaacccgccagtcgatgccagaagagctgatagaacaggtggatattttaaaagatgtgataaatgcatttaacataaagaccatcgagatagagggatttgaagcagatgatatcattggtacagtatcaaaaattgcttccgaaagtgggatggatgtgcttatcgtcacaggcgacagagatgcgcttcagcttgtgtcggcaaatgtaaaagtaaaaatatgtaaaaaaggcataacgcagatggatgagtacgatgaaaaggcggtctttgaaaagtatgaagtgacgccgcttcaattcatagacttgaaagggcttatgggagacaaatcagacaacattccaggagtgcccaatataggggagaagacggccataaagcttgttaaagaatttggatcaattgaaaatttactgatgaatacagataagttaaaagggaaaataaaagaaaatgtagaaaacaatgcagaattagctgttttaagcaaacggcttgctacgattgagagaaatgttcctattgatattgatttgaatgaatacgcggttaaaaattacgatgtcaataagcttacagagctatttgaaaaattggaattttcaagcctcatctcagatttaaaagatgatagtcgtgatacaaaggatattaaagaatggcctgtaagagattttacatacgttaaaaatgttttaggaaagtttgatgttttgtcattgtatccattcatatatgatggaaagataaaagcagtatcatttgcttgcggtgacggatcgttttttgtagagattgatgattatgacaattttaaattgcttaataatgataagcttacgttgataggacacgatctgaaagattttttagtaaacatttcatactgcggtattgaacttaattgtaagattttagatacggccataatgacttatcttttaaatccgtctgagtcgaattacgacataagtcgcgtattgaaaaaatacttgaaagaggatttgcaaaacatagatgatatagtaggcaagggcaggaataaaaagagctacgatgacattgacaaaaagcttttagtcgattatatgtgttcagccgcatcaaacttatctaagttaaaagataagctcatgtcatttataaaagagatggagatggaagatcttttaaaaaatgtggaaattccgcttattgaagtgctaaaatctatggaggtgtacggctttacattagataaagatgtacttagaagtatttctaaagaaatagatgaaaagacagataagattgtaaaagatatttacgatgctgctggatacgaatttaatattaactctacaaagcagttatcagaatttttgtttgataaactgaatttgccagcaataaaaaagactaaaacagggtattcgactgacatggaagtccttgcagaacttataccgtacaatgacatagtaggagaaataatagaatatagacagcttatgaagcttaaatctacgtacatagatggcttcattcccatcatggatgaaaataatagggtccactctacgtttaaacaaacagttgctgctacagggagaattagctcaacacaacctaatctgcagaacatacctgtaagagaagaatttggcaggaggataagaaaggcatttgtatcaagttatgaagatgggcttataatatctgctgattattctcagattgagctaagggttcttgcacatctttcagaggatgaaaaacttattgagtcatttttgaacaacgaagatatacatttaaggacggcatcggaggtttttaaggtttcgaaagaagaagtgacaagtgaaatgagaaggcgggcgaaagctgtcaactttggtattgtatatggtataagcgattacggcttatctaaagacttaaagatttcgcgaaaagaagcgaaagaatacatagacaattattttgacaggtacaagggcgtcaaaaattacatcgactcaattgtcaaatttgcaaaggaaaatgggtatgttacgactatcttaaataggagaagatacataccggaaatcaattcaaaaaattttaaccaaagatcttttggcgagagaatggcaatgaatacacctattcaaggtagcgctgcggatataataaagatgtcgatggttaaagtatacaatgaattaaaggaaagaggattgaaatcaagacttattcttcaggtgcacgatgagcttataattgacacacatcctgatgaagttgaaatagtcaaggagcttctaaaatcaataatggaaaatatcataaagttgaaagttcctttagttgtagatatagggcaagggaaaaactggtatgatgcaaaataaaaggatcc

SEQ ID NO: 993 - DNA, 2678 bp, Artificial Sequence
  Description of Artificial Sequence: Synthetic Clostridium thermosulfurogenes DNA Polymerase E633R
atgaaatacctgctgccgaccgctgctgctggtctgctgctcctcgctgcccagccggcgatggccatggcgaaatttttgatcatagatggtaatagcttgatgtacagggcgtattttgccctgcctgatttgatgaacagcgaaggaatgcatacaaatgccatatacggtttttcaatgatgcttcttaaattgctggaggaggagaaaccagactacatagcaatagctttcgataaaaaggcttctacatttaggcacaaggagtacagtgcttataaaggaacccgccagtcgatgccagaagagctgatagaacaggtggatattttaaaagatgtgataaatgcatttaacataaagaccatcgagatagagggatttgaagcagatgatatcattggtacagtatcaaaaattgcttccgaaagtgggatggatgtgcttatcgtcacaggcgacagagatgcgcttcagcttgtgtcggcaaatgtaaaagtaaaaatatgtaaaaaaggcataacgcagatggatgagtacgatgaaaaggcggtctttgaaaagtatgaagtgacgccgcttcaattcatagacttgaaagggcttatgggagacaaatcagacaacattccaggagtgcccaatataggggagaagacggccataaagcttgttaaagaatttggatcaattgaaaatttactgatgaatacagataagttaaaagggaaaataaaagaaaatgtagaaaacaatgcagaattagctgttttaagcaaacggcttgctacgattgagagaaatgttcctattgatattgatttgaatgaatacgcggttaaaaattacgatgtcaataagcttacagagctatttgaaaaattggaattttcaagcctcatctcagatttaaaagatgatagtcgtgatacaaaggatattaaagaatggcctgtaagagattttacatacgttaaaaatgttttaggaaagtttgatgttttgtcattgtatccattcatatatgatggaaagataaaagcagtatcatttgcttgcggtgacggatcgttttttgtagagattgatgattatgacaattttaaattgcttaataatgataagcttacgttgataggacacgatctgaaagattttttagtaaacatttcatactgcggtattgaacttaattgtaagattttagatacggccataatgacttatcttttaaatccgtctgagtcgaattacgacataagtcgcgtattgaaaaaatacttgaaagaggatttgcaaaacatagatgatatagtaggcaagggcaggaataaaaagagctacgatgacattgacaaaaagcttttagtcgattatatgtgttcagccgcatcaaacttatctaagttaaaagataagctcatgtcatttataaaagagatggagatggaagatcttttaaaaaatgtggaaattccgcttattgaagtgctaaaatctatggaggtgtacggctttacattagataaagatgtacttagaagtatttctaaagaaatagatgaaaagacagataagattgtaaaagatatttacgatgctgctggatacgaatttaatattaactctacaaagcagttatcagaatttttgtttgataaactgaatttgccagcaataaaaaagactaaaacagggtattcgactgacatggaagtccttgcagaacttataccgtacaatgacatagtaggagaaataatagaatatagacagcttatgaagcttaaatctacgtacatagatggcttcattcccatcatggatgaaaataatagggtccactctacgtttaaacaaacagttgctgctacagggagaattagctcaacacgtcctaatctgcagaacatacctgtaagagaagaatttggcaggaggataagaaaggcatttgtatcaagttatgaagatgggcttataatatctgctgattattctcagattgagctaagggttcttgcacatctttcagaggatgaaaaacttattgagtcatttttgaacaacgaagatatacatttaaggacggcatcggaggtttttaaggtttcgaaagaagaagtgacaagtgaaatgagaaggcgggcgaaagctgtcaactttggtattgtatatggtataagcgattacggcttatctaaagacttaaagatttcgcgaaaagaagcgaaagaatacatagacaattattttgacaggtacaagggcgtcaaaaattacatcgactcaattgtcaaatttgcaaaggaaaatgggtatgttacgactatcttaaataggagaagatacataccggaaatcaattcaaaaaattttaaccaaagatcttttggcgagagaatggcaatgaatacacctattcaaggtagcgctgcggatataataaagatgtcgatggttaaagtatacaatgaattaaaggaaagaggattgaaatcaagacttattcttcaggtgcacgatgagcttataattgacacacatcctgatgaagttgaaatagtcaaggagcttctaaaatcaataatggaaaatatcataaagttgaaagttcctttagttgtagatatagggcaagggaaaaactggtatgatgcaaaataaaaggatcc

SEQ ID NO: 994 - DNA, 2678 bp, Artificial Sequence
  Description of Artificial Sequence: Synthetic Clostridium thermosulfurogenes DNA Polymerase E633S
atgaaatacctgctgccgaccgctgctgctggtctgctgctcctcgctgcccagccggcgatggccatggcgaaatttttgatcatagatggtaatagcttgatgtacagggcgtattttgccctgcctgatttgatgaacagcgaaggaatgcatacaaatgccatatacggtttttcaatgatgcttcttaaattgctggaggaggagaaaccagactacatagcaatagctttcgataaaaaggcttctacatttaggcacaaggagtacagtgcttataaaggaacccgccagtcgatgccagaagagctgatagaacaggtggatattttaaaagatgtgataaatgcatttaacataaagaccatcgagatagagggatttgaagcagatgatatcattggtacagtatcaaaaattgcttccgaaagtgggatggatgtgcttatcgtcacaggcgacagagatgcgcttcagcttgtgtcggcaaatgtaaaagtaaaaatatgtaaaaaaggcataacgcagatggatgagtacgatgaaaaggcggtctttgaaaagtatgaagtgacgccgcttcaattcatagacttgaaagggcttatgggagacaaatcagacaacattccaggagtgcccaatataggggagaagacggccataaagcttgttaaagaatttggatcaattgaaaatttactgatgaatacagataagttaaaagggaaaataaaagaaaatgtagaaaacaatgcagaattagctgttttaagcaaacggcttgctacgattgagagaaatgttcctattgatattgatttgaatgaatacgcggttaaaaattacgatgtcaataagcttacagagctatttgaaaaattggaattttcaagcctcatctcagatttaaaagatgatagtcgtgatacaaaggatattaaagaatggcctgtaagagattttacatacgttaaaaatgttttaggaaagtttgatgttttgtcattgtatccattcatatatgatggaaagataaaagcagtatcatttgcttgcggtgacggatcgttttttgtagagattgatgattatgacaattttaaattgcttaataatgataagcttacgttgataggacacgatctgaaagattttttagtaaacatttcatactgcggtattgaacttaattgtaagattttagatacggccataatgacttatcttttaaatccgtctgagtcgaattacgacataagtcgcgtattgaaaaaatacttgaaagaggatttgcaaaacatagatgatatagtaggcaagggcaggaataaaaagagctacgatgacattgacaaaaagcttttagtcgattatatgtgttcagccgcatcaaacttatctaagttaaaagataagctcatgtcatttataaaagagatggagatggaagatcttttaaaaaatgtggaaattccgcttattgaagtgctaaaatctatggaggtgtacggctttacattagataaagatgtacttagaagtatttctaaagaaatagatgaaaagacagataagattgtaaaagatatttacgatgctgctggatacgaatttaatattaactctacaaagcagttatcagaatttttgtttgataaactgaatttgccagcaataaaaaagactaaaacagggtattcgactgacatggaagtccttgcagaacttataccgtacaatgacatagtaggagaaataatagaatatagacagcttatgaagcttaaatctacgtacatagatggcttcattcccatcatggatgaaaataatagggtccactctacgtttaaacaaacagttgctgctacagggagaattagctcaacatctcctaatctgcagaacatacctgtaagagaagaatttggcaggaggataagaaaggcatttgtatcaagttatgaagatgggcttataatatctgctgattattctcagattgagctaagggttcttgcacatctttcagaggatgaaaaacttattgagtcatttttgaacaacgaagatatacatttaaggacggcatcggaggtttttaaggtttcgaaagaagaagtgacaagtgaaatgagaaggcgggcgaaagctgtcaactttggtattgtatatggtataagcgattacggcttatctaaagacttaaagatttcgcgaaaagaagcgaaagaatacatagacaattattttgacaggtacaagggcgtcaaaaattacatcgactcaattgtcaaatttgcaaaggaaaatgggtatgttacgactatcttaaataggagaagatacataccggaaatcaattcaaaaaattttaaccaaagatcttttggcgagagaatggcaatgaatacacctattcaaggtagcgctgcggatataataaagatgtcgatggttaaagtatacaatgaattaaaggaaagaggattgaaatcaagacttattcttcaggtgcacgatgagcttataattgacacacatcctgatgaagttgaaatagtcaaggagcttctaaaatcaataatggaaaatatcataaagttgaaagttcctttagttgtagatatagggcaagggaaaaactggtatgatgcaaaataaaaggatcc

SEQ ID NO: 995 - DNA, 2678 bp, Artificial Sequence
  Description of Artificial Sequence: Synthetic Clostridium thermosulfurogenes DNA Polymerase E633T
atgaaatacctgctgccgaccgctgctgctggtctgctgctcctcgctgcccagccggcgatggccatggcgaaatttttgatcatagatggtaatagcttgatgtacagggcgtattttgccctgcctgatttgatgaacagcgaaggaatgcatacaaatgccatatacggtttttcaatgatgcttcttaaattgctggaggaggagaaaccagactacatagcaatagctttcgataaaaaggcttctacatttaggcacaaggagtacagtgcttataaaggaacccgccagtcgatgccagaagagctgatagaacaggtggatattttaaaagatgtgataaatgcatttaacataaagaccatcgagatagagggatttgaagcagatgatatcattggtacagtatcaaaaattgcttccgaaagtgggatggatgtgcttatcgtcacaggcgacagagatgcgcttcagcttgtgtcggcaaatgtaaaagtaaaaatatgtaaaaaaggcataacgcagatggatgagtacgatgaaaaggcggtctttgaaaagtatgaagtgacgccgcttcaattcatagacttgaaagggcttatgggagacaaatcagacaacattccaggagtgcccaatataggggagaagacggccataaagcttgttaaagaatttggatcaattgaaaatttactgatgaatacagataagttaaaagggaaaataaaagaaaatgtagaaaacaatgcagaattagctgttttaagcaaacggcttgctacgattgagagaaatgttcctattgatattgatttgaatgaatacgcggttaaaaattacgatgtcaataagcttacagagctatttgaaaaattggaattttcaagcctcatctcagatttaaaagatgatagtcgtgatacaaaggatattaaagaatggcctgtaagagattttacatacgttaaaaatgttttaggaaagtttgatgttttgtcattgtatccattcatatatgatggaaagataaaagcagtatcatttgcttgcggtgacggatcgttttttgtagagattgatgattatgacaattttaaattgcttaataatgataagcttacgttgataggacacgatctgaaagattttttagtaaacatttcatactgcggtattgaacttaattgtaagattttagatacggccataatgacttatcttttaaatccgtctgagtcgaattacgacataagtcgcgtattgaaaaaatacttgaaagaggatttgcaaaacatagatgatatagtaggcaagggcaggaataaaaagagctacgatgacattgacaaaaagcttttagtcgattatatgtgttcagccgcatcaaacttatctaagttaaaagataagctcatgtcatttataaaagagatggagatggaagatcttttaaaaaatgtggaaattccgcttattgaagtgctaaaatctatggaggtgtacggctttacattagataaagatgtacttagaagtatttctaaagaaatagatgaaaagacagataagattgtaaaagatatttacgatgctgctggatacgaatttaatattaactctacaaagcagttatcagaatttttgtttgataaactgaatttgccagcaataaaaaagactaaaacagggtattcgactgacatggaagtccttgcagaacttataccgtacaatgacatagtaggagaaataatagaatatagacagcttatgaagcttaaatctacgtacatagatggcttcattcccatcatggatgaaaataatagggtccactctacgtttaaacaaacagttgctgctacagggagaattagctcaacaactcctaatctgcagaacatacctgtaagagaagaatttggcaggaggataagaaaggcatttgtatcaagttatgaagatgggcttataatatctgctgattattctcagattgagctaagggttcttgcacatctttcagaggatgaaaaacttattgagtcatttttgaacaacgaagatatacatttaaggacggcatcggaggtttttaaggtttcgaaagaagaagtgacaagtgaaatgagaaggcgggcgaaagctgtcaactttggtattgtatatggtataagcgattacggcttatctaaagacttaaagatttcgcgaaaagaagcgaaagaatacatagacaattattttgacaggtacaagggcgtcaaaaattacatcgactcaattgtcaaatttgcaaaggaaaatgggtatgttacgactatcttaaataggagaagatacataccggaaatcaattcaaaaaattttaaccaaagatcttttggcgagagaatggcaatgaatacacctattcaaggtagcgctgcggatataataaagatgtcgatggttaaagtatacaatgaattaaaggaaagaggattgaaatcaagacttattcttcaggtgcacgatgagcttataattgacacacatcctgatgaagttgaaatagtcaaggagcttctaaaatcaataatggaaaatatcataaagttgaaagttcctttagttgtagatatagggcaagggaaaaactggtatgatgcaaaataaaaggatcc

SEQ ID NO: 996 - DNA, 2678 bp, Artificial Sequence
  Description of Artificial Sequence: Synthetic Clostridium thermosulfurogenes DNA Polymerase E633V
atgaaatacctgctgccgaccgctgctgctggtctgctgctcctcgctgcccagccggcgatggccatggcgaaatttttgatcatagatggtaatagcttgatgtacagggcgtattttgccctgcctgatttgatgaacagcgaaggaatgcatacaaatgccatatacggtttttcaatgatgcttcttaaattgctggaggaggagaaaccagactacatagcaatagctttcgataaaaaggcttctacatttaggcacaaggagtacagtgcttataaaggaacccgccagtcgatgccagaagagctgatagaacaggtggatattttaaaagatgtgataaatgcatttaacataaagaccatcgagatagagggatttgaagcagatgatatcattggtacagtatcaaaaattgcttccgaaagtgggatggatgtgcttatcgtcacaggcgacagagatgcgcttcagcttgtgtcggcaaatgtaaaagtaaaaatatgtaaaaaaggcataacgcagatggatgagtacgatgaaaaggcggtctttgaaaagtatgaagtgacgccgcttcaattcatagacttgaaagggcttatgggagacaaatcagacaacattccaggagtgcccaatataggggagaagacggccataaagcttgttaaagaatttggatcaattgaaaatttactgatgaatacagataagttaaaagggaaaataaaagaaaatgtagaaaacaatgcagaattagctgttttaagcaaacggcttgctacgattgagagaaatgttcctattgatattgatttgaatgaatacgcggttaaaaattacgatgtcaataagcttacagagctatttgaaaaattggaattttcaagcctcatctcagatttaaaagatgatagtcgtgatacaaaggatattaaagaatggcctgtaagagattttacatacgttaaaaatgttttaggaaagtttgatgttttgtcattgtatccattcatatatgatggaaagataaaagcagtatcatttgcttgcggtgacggatcgttttttgtagagattgatgattatgacaattttaaattgcttaataatgataagcttacgttgataggacacgatctgaaagattttttagtaaacatttcatactgcggtattgaacttaattgtaagattttagatacggccataatgacttatcttttaaatccgtctgagtcgaattacgacataagtcgcgtattgaaaaaatacttgaaagaggatttgcaaaacatagatgatatagtaggcaagggcaggaataaaaagagctacgatgacattgacaaaaagcttttagtcgattatatgtgttcagccgcatcaaacttatctaagttaaaagataagctcatgtcatttataaaagagatggagatggaagatcttttaaaaaatgtggaaattccgcttattgaagtgctaaaatctatggaggtgtacggctttacattagataaagatgtacttagaagtatttctaaagaaatagatgaaaagacagataagattgtaaaagatatttacgatgctgctggatacgaatttaatattaactctacaaagcagttatcagaatttttgtttgataaactgaatttgccagcaataaaaaagactaaaacagggtattcgactgacatggaagtccttgcagaacttataccgtacaatgacatagtaggagaaataatagaatatagacagcttatgaagcttaaatctacgtacatagatggcttcattcccatcatggatgaaaataatagggtccactctacgtttaaacaaacagttgctgctacagggagaattagctcaacagttcctaatctgcagaacatacctgtaagagaagaatttggcaggaggataagaaaggcatttgtatcaagttatgaagatgggcttataatatctgctgattattctcagattgagctaagggttcttgcacatctttcagaggatgaaaaacttattgagtcatttttgaacaacgaagatatacatttaaggacggcatcggaggtttttaaggtttcgaaagaagaagtgacaagtgaaatgagaaggcgggcgaaagctgtcaactttggtattgtatatggtataagcgattacggcttatctaaagacttaaagatttcgcgaaaagaagcgaaagaatacatagacaattattttgacaggtacaagggcgtcaaaaattacatcgactcaattgtcaaatttgcaaaggaaaatgggtatgttacgactatcttaaataggagaagatacataccggaaatcaattcaaaaaattttaaccaaagatcttttggcgagagaatggcaatgaatacacctattcaaggtagcgctgcggatataataaagatgtcgatggttaaagtatacaatgaattaaaggaaagaggattgaaatcaagacttattcttcaggtgcacgatgagcttataattgacacacatcctgatgaagttgaaatagtcaaggagcttctaaaatcaataatggaaaatatcataaagttgaaagttcctttagttgtagatatagggcaagggaaaaactggtatgatgcaaaataaaaggatcc

SEQ ID NO: 997 - DNA, 2678 bp, Artificial Sequence
  Description of Artificial Sequence: Synthetic Clostridium thermosulfurogenes DNA Polymerase E633W
atgaaatacctgctgccgaccgctgctgctggtctgctgctcctcgctgcccagccggcgatggccatggcgaaatttttgatcatagatggtaatagcttgatgtacagggcgtattttgccctgcctgatttgatgaacagcgaaggaatgcatacaaatgccatatacggtttttcaatgatgcttcttaaattgctggaggaggagaaaccagactacatagcaatagctttcgataaaaaggcttctacatttaggcacaaggagtacagtgcttataaaggaacccgccagtcgatgccagaagagctgatagaacaggtggatattttaaaagatgtgataaatgcatttaacataaagaccatcgagatagagggatttgaagcagatgatatcattggtacagtatcaaaaattgcttccgaaagtgggatggatgtgcttatcgtcacaggcgacagagatgcgcttcagcttgtgtcggcaaatgtaaaagtaaaaatatgtaaaaaaggcataacgcagatggatgagtacgatgaaaaggcggtctttgaaaagtatgaagtgacgccgcttcaattcatagacttgaaagggcttatgggagacaaatcagacaacattccaggagtgcccaatataggggagaagacggccataaagcttgttaaagaatttggatcaattgaaaatttactgatgaatacagataagttaaaagggaaaataaaagaaaatgtagaaaacaatgcagaattagctgttttaagcaaacggcttgctacgattgagagaaatgttcctattgatattgatttgaatgaatacgcggttaaaaattacgatgtcaataagcttacagagctatttgaaaaattggaattttcaagcctcatctcagatttaaaagatgatagtcgtgatacaaaggatattaaagaatggcctgtaagagattttacatacgttaaaaatgttttaggaaagtttgatgttttgtcattgtatccattcatatatgatggaaagataaaagcagtatcatttgcttgcggtgacggatcgttttttgtagagattgatgattatgacaattttaaattgcttaataatgataagcttacgttgataggacacgatctgaaagattttttagtaaacatttcatactgcggtattgaacttaattgtaagattttagatacggccataatgacttatcttttaaatccgtctgagtcgaattacgacataagtcgcgtattgaaaaaatacttgaaagaggatttgcaaaacatagatgatatagtaggcaagggcaggaataaaaagagctacgatgacattgacaaaaagcttttagtcgattatatgtgttcagccgcatcaaacttatctaagttaaaagataagctcatgtcatttataaaagagatggagatggaagatcttttaaaaaatgtggaaattccgcttattgaagtgctaaaatctatggaggtgtacggctttacattagataaagatgtacttagaagtatttctaaagaaatagatgaaaagacagataagattgtaaaagatatttacgatgctgctggatacgaatttaatattaactctacaaagcagttatcagaatttttgtttgataaactgaatttgccagcaataaaaaagactaaaacagggtattcgactgacatggaagtccttgcagaacttataccgtacaatgacatagtaggagaaataatagaatatagacagcttatgaagcttaaatctacgtacatagatggcttcattcccatcatggatgaaaataatagggtccactctacgtttaaacaaacagttgctgctacagggagaattagctcaacatggcctaatctgcagaacatacctgtaagagaagaatttggcaggaggataagaaaggcatttgtatcaagttatgaagatgggcttataatatctgctgattattctcagattgagctaagggttcttgcacatctttcagaggatgaaaaacttattgagtcatttttgaacaacgaagatatacatttaaggacggcatcggaggtttttaaggtttcgaaagaagaagtgacaagtgaaatgagaaggcgggcgaaagctgtcaactttggtattgtatatggtataagcgattacggcttatctaaagacttaaagatttcgcgaaaagaagcgaaagaatacatagacaattattttgacaggtacaagggcgtcaaaaattacatcgactcaattgtcaaatttgcaaaggaaaatgggtatgttacgactatcttaaataggagaagatacataccggaaatcaattcaaaaaattttaaccaaagatcttttggcgagagaatggcaatgaatacacctattcaaggtagcgctgcggatataataaagatgtcgatggttaaagtatacaatgaattaaaggaaagaggattgaaatcaagacttattcttcaggtgcacgatgagcttataattgacacacatcctgatgaagttgaaatagtcaaggagcttctaaaatcaataatggaaaatatcataaagttgaaagttcctttagttgtagatatagggcaagggaaaaactggtatgatgcaaaataaaaggatcc

SEQ ID NO: 998 - DNA, 2678 bp, Artificial Sequence
  Description of Artificial Sequence: Synthetic Clostridium thermosulfurogenes DNA Polymerase E633Y
atgaaatacctgctgccgaccgctgctgctggtctgctgctcctcgctgcccagccggcgatggccatggcgaaatttttgatcatagatggtaatagcttgatgtacagggcgtattttgccctgcctgatttgatgaacagcgaaggaatgcatacaaatgccatatacggtttttcaatgatgcttcttaaattgctggaggaggagaaaccagactacatagcaatagctttcgataaaaaggcttctacatttaggcacaaggagtacagtgcttataaaggaacccgccagtcgatgccagaagagctgatagaacaggtggatattttaaaagatgtgataaatgcatttaacataaagaccatcgagatagagggatttgaagcagatgatatcattggtacagtatcaaaaattgcttccgaaagtgggatggatgtgcttatcgtcacaggcgacagagatgcgcttcagcttgtgtcggcaaatgtaaaagtaaaaatatgtaaaaaaggcataacgcagatggatgagtacgatgaaaaggcggtctttgaaaagtatgaagtgacgccgcttcaattcatagacttgaaagggcttatgggagacaaatcagacaacattccaggagtgcccaatataggggagaagacggccataaagcttgttaaagaatttggatcaattgaaaatttactgatgaatacagataagttaaaagggaaaataaaagaaaatgtagaaaacaatgcagaattagctgttttaagcaaacggcttgctacgattgagagaaatgttcctattgatattgatttgaatgaatacgcggttaaaaattacgatgtcaataagcttacagagctatttgaaaaattggaattttcaagcctcatctcagatttaaaagatgatagtcgtgatacaaaggatattaaagaatggcctgtaagagattttacatacgttaaaaatgttttaggaaagtttgatgttttgtcattgtatccattcatatatgatggaaagataaaagcagtatcatttgcttgcggtgacggatcgttttttgtagagattgatgattatgacaattttaaattgcttaataatgataagcttacgttgataggacacgatctgaaagattttttagtaaacatttcatactgcggtattgaacttaattgtaagattttagatacggccataatgacttatcttttaaatccgtctgagtcgaattacgacataagtcgcgtattgaaaaaatacttgaaagaggatttgcaaaacatagatgatatagtaggcaagggcaggaataaaaagagctacgatgacattgacaaaaagcttttagtcgattatatgtgttcagccgcatcaaacttatctaagttaaaagataagctcatgtcatttataaaagagatggagatggaagatcttttaaaaaatgtggaaattccgcttattgaagtgctaaaatctatggaggtgtacggctttacattagataaagatgtacttagaagtatttctaaagaaatagatgaaaagacagataagattgtaaaagatatttacgatgctgctggatacgaatttaatattaactctacaaagcagttatcagaatttttgtttgataaactgaatttgccagcaataaaaaagactaaaacagggtattcgactgacatggaagtccttgcagaacttataccgtacaatgacatagtaggagaaataatagaatatagacagcttatgaagcttaaatctacgtacatagatggcttcattcccatcatggatgaaaataatagggtccactctacgtttaaacaaacagttgctgctacagggagaattagctcaacatatcctaatctgcagaacatacctgtaagagaagaatttggcaggaggataagaaaggcatttgtatcaagttatgaagatgggcttataatatctgctgattattctcagattgagctaagggttcttgcacatctttcagaggatgaaaaacttattgagtcatttttgaacaacgaagatatacatttaaggacggcatcggaggtttttaaggtttcgaaagaagaagtgacaagtgaaatgagaaggcgggcgaaagctgtcaactttggtattgtatatggtataagcgattacggcttatctaaagacttaaagatttcgcgaaaagaagcgaaagaatacatagacaattattttgacaggtacaagggcgtcaaaaattacatcgactcaattgtcaaatttgcaaaggaaaatgggtatgttacgactatcttaaataggagaagatacataccggaaatcaattcaaaaaattttaaccaaagatcttttggcgagagaatggcaatgaatacacctattcaaggtagcgctgcggatataataaagatgtcgatggttaaagtatacaatgaattaaaggaaagaggattgaaatcaagacttattcttcaggtgcacgatgagcttataattgacacacatcctgatgaagttgaaatagtcaaggagcttctaaaatcaataatggaaaatatcataaagttgaaagttcctttagttgtagatatagggcaagggaaaaactggtatgatgcaaaataaaaggatcc

SEQ ID NO: 999 - DNA, 2678 bp, Artificial Sequence
  Description of Artificial Sequence: Synthetic Clostridium thermosulfurogenes DNA Polymerase R716A
atgaaatacctgctgccgaccgctgctgctggtctgctgctcctcgctgcccagccggcgatggccatggcgaaatttttgatcatagatggtaatagcttgatgtacagggcgtattttgccctgcctgatttgatgaacagcgaaggaatgcatacaaatgccatatacggtttttcaatgatgcttcttaaattgctggaggaggagaaaccagactacatagcaatagctttcgataaaaaggcttctacatttaggcacaaggagtacagtgcttataaaggaacccgccagtcgatgccagaagagctgatagaacaggtggatattttaaaagatgtgataaatgcatttaacataaagaccatcgagatagagggatttgaagcagatgatatcattggtacagtatcaaaaattgcttccgaaagtgggatggatgtgcttatcgtcacaggcgacagagatgcgcttcagcttgtgtcggcaaatgtaaaagtaaaaatatgtaaaaaaggcataacgcagatggatgagtacgatgaaaaggcggtctttgaaaagtatgaagtgacgccgcttcaattcatagacttgaaagggcttatgggagacaaatcagacaacattccaggagtgcccaatataggggagaagacggccataaagcttgttaaagaatttggatcaattgaaaatttactgatgaatacagataagttaaaagggaaaataaaagaaaatgtagaaaacaatgcagaattagctgttttaagcaaacggcttgctacgattgagagaaatgttcctattgatattgatttgaatgaatacgcggttaaaaattacgatgtcaataagcttacagagctatttgaaaaattggaattttcaagcctcatctcagatttaaaagatgatagtcgtgatacaaaggatattaaagaatggcctgtaagagattttacatacgttaaaaatgttttaggaaagtttgatgttttgtcattgtatccattcatatatgatggaaagataaaagcagtatcatttgcttgcggtgacggatcgttttttgtagagattgatgattatgacaattttaaattgcttaataatgataagcttacgttgataggacacgatctgaaagattttttagtaaacatttcatactgcggtattgaacttaattgtaagattttagatacggccataatgacttatcttttaaatccgtctgagtcgaattacgacataagtcgcgtattgaaaaaatacttgaaagaggatttgcaaaacatagatgatatagtaggcaagggcaggaataaaaagagctacgatgacattgacaaaaagcttttagtcgattatatgtgttcagccgcatcaaacttatctaagttaaaagataagctcatgtcatttataaaagagatggagatggaagatcttttaaaaaatgtggaaattccgcttattgaagtgctaaaatctatggaggtgtacggctttacattagataaagatgtacttagaagtatttctaaagaaatagatgaaaagacagataagattgtaaaagatatttacgatgctgctggatacgaatttaatattaactctacaaagcagttatcagaatttttgtttgataaactgaatttgccagcaataaaaaagactaaaacagggtattcgactgacatggaagtccttgcagaacttataccgtacaatgacatagtaggagaaataatagaatatagacagcttatgaagcttaaatctacgtacatagatggcttcattcccatcatggatgaaaataatagggtccactctacgtttaaacaaacagttgctgctacagggagaattagctcaacagagcctaatctgcagaacatacctgtaagagaagaatttggcaggaggataagaaaggcatttgtatcaagttatgaagatgggcttataatatctgctgattattctcagattgagctaagggttcttgcacatctttcagaggatgaaaaacttattgagtcatttttgaacaacgaagatatacatttaaggacggcatcggaggtttttaaggtttcgaaagaagaagtgacaagtgaaatgagagctcgggcgaaagctgtcaactttggtattgtatatggtataagcgattacggcttatctaaagacttaaagatttcgcgaaaagaagcgaaagaatacatagacaattattttgacaggtacaagggcgtcaaaaattacatcgactcaattgtcaaatttgcaaaggaaaatgggtatgttacgactatcttaaataggagaagatacataccggaaatcaattcaaaaaattttaaccaaagatcttttggcgagagaatggcaatgaatacacctattcaaggtagcgctgcggatataataaagatgtcgatggttaaagtatacaatgaattaaaggaaagaggattgaaatcaagacttattcttcaggtgcacgatgagcttataattgacacacatcctgatgaagttgaaatagtcaaggagcttctaaaatcaataatggaaaatatcataaagttgaaagttcctttagttgtagatatagggcaagggaaaaactggtatgatgcaaaataaaaggatcc

SEQ ID NO: 1000 - DNA, 2678 bp, Artificial Sequence
  Description of Artificial Sequence: Synthetic Clostridium thermosulfurogenes DNA Polymerase R716C
atgaaatacctgctgccgaccgctgctgctggtctgctgctcctcgctgcccagccggcgatggccatggcgaaatttttgatcatagatggtaatagcttgatgtacagggcgtattttgccctgcctgatttgatgaacagcgaaggaatgcatacaaatgccatatacggtttttcaatgatgcttcttaaattgctggaggaggagaaaccagactacatagcaatagctttcgataaaaaggcttctacatttaggcacaaggagtacagtgcttataaaggaacccgccagtcgatgccagaagagctgatagaacaggtggatattttaaaagatgtgataaatgcatttaacataaagaccatcgagatagagggatttgaagcagatgatatcattggtacagtatcaaaaattgcttccgaaagtgggatggatgtgcttatcgtcacaggcgacagagatgcgcttcagcttgtgtcggcaaatgtaaaagtaaaaatatgtaaaaaaggcataacgcagatggatgagtacgatgaaaaggcggtctttgaaaagtatgaagtgacgccgcttcaattcatagacttgaaagggcttatgggagacaaatcagacaacattccaggagtgcccaatataggggagaagacggccataaagcttgttaaagaatttggatcaattgaaaatttactgatgaatacagataagttaaaagggaaaataaaagaaaatgtagaaaacaatgcagaattagctgttttaagcaaacggcttgctacgattgagagaaatgttcctattgatattgatttgaatgaatacgcggttaaaaattacgatgtcaataagcttacagagctatttgaaaaattggaattttcaagcctcatctcagatttaaaagatgatagtcgtgatacaaaggatattaaagaatggcctgtaagagattttacatacgttaaaaatgttttaggaaagtttgatgttttgtcattgtatccattcatatatgatggaaagataaaagcagtatcatttgcttgcggtgacggatcgttttttgtagagattgatgattatgacaattttaaattgcttaataatgataagcttacgttgataggacacgatctgaaagattttttagtaaacatttcatactgcggtattgaacttaattgtaagattttagatacggccataatgacttatcttttaaatccgtctgagtcgaattacgacataagtcgcgtattgaaaaaatacttgaaagaggatttgcaaaacatagatgatatagtaggcaagggcaggaataaaaagagctacgatgacattgacaaaaagcttttagtcgattatatgtgttcagccgcatcaaacttatctaagttaaaagataagctcatgtcatttataaaagagatggagatggaagatcttttaaaaaatgtggaaattccgcttattgaagtgctaaaatctatggaggtgtacggctttacattagataaagatgtacttagaagtatttctaaagaaatagatgaaaagacagataagattgtaaaagatatttacgatgctgctggatacgaatttaatattaactctacaaagcagttatcagaatttttgtttgataaactgaatttgccagcaataaaaaagactaaaacagggtattcgactgacatggaagtccttgcagaacttataccgtacaatgacatagtaggagaaataatagaatatagacagcttatgaagcttaaatctacgtacatagatggcttcattcccatcatggatgaaaataatagggtccactctacgtttaaacaaacagttgctgctacagggagaattagctcaacagagcctaatctgcagaacatacctgtaagagaagaatttggcaggaggataagaaaggcatttgtatcaagttatgaagatgggcttataatatctgctgattattctcagattgagctaagggttcttgcacatctttcagaggatgaaaaacttattgagtcatttttgaacaacgaagatatacatttaaggacggcatcggaggtttttaaggtttcgaaagaagaagtgacaagtgaaatgagatgtcgggcgaaagctgtcaactttggtattgtatatggtataagcgattacggcttatctaaagacttaaagatttcgcgaaaagaagcgaaagaatacatagacaattattttgacaggtacaagggcgtcaaaaattacatcgactcaattgtcaaatttgcaaaggaaaatgggtatgttacgactatcttaaataggagaagatacataccggaaatcaattcaaaaaattttaaccaaagatcttttggcgagagaatggcaatgaatacacctattcaaggtagcgctgcggatataataaagatgtcgatggttaaagtatacaatgaattaaaggaaagaggattgaaatcaagacttattcttcaggtgcacgatgagcttataattgacacacatcctgatgaagttgaaatagtcaaggagcttctaaaatcaataatggaaaatatcataaagttgaaagttcctttagttgtagatatagggcaagggaaaaactggtatgatgcaaaataaaaggatcc

SEQ ID NO: 1001 - DNA, 2678 bp, Artificial Sequence
  Description of Artificial Sequence: Synthetic Clostridium thermosulfurogenes DNA Polymerase R716D
atgaaatacctgctgccgaccgctgctgctggtctgctgctcctcgctgcccagccggcgatggccatggcgaaatttttgatcatagatggtaatagcttgatgtacagggcgtattttgccctgcctgatttgatgaacagcgaaggaatgcatacaaatgccatatacggtttttcaatgatgcttcttaaattgctggaggaggagaaaccagactacatagcaatagctttcgataaaaaggcttctacatttaggcacaaggagtacagtgcttataaaggaacccgccagtcgatgccagaagagctgatagaacaggtggatattttaaaagatgtgataaatgcatttaacataaagaccatcgagatagagggatttgaagcagatgatatcattggtacagtatcaaaaattgcttccgaaagtgggatggatgtgcttatcgtcacaggcgacagagatgcgcttcagcttgtgtcggcaaatgtaaaagtaaaaatatgtaaaaaaggcataacgcagatggatgagtacgatgaaaaggcggtctttgaaaagtatgaagtgacgccgcttcaattcatagacttgaaagggcttatgggagacaaatcagacaacattccaggagtgcccaatataggggagaagacggccataaagcttgttaaagaatttggatcaattgaaaatttactgatgaatacagataagttaaaagggaaaataaaagaaaatgtagaaaacaatgcagaattagctgttttaagcaaacggcttgctacgattgagagaaatgttcctattgatattgatttgaatgaatacgcggttaaaaattacgatgtcaataagcttacagagctatttgaaaaattggaattttcaagcctcatctcagatttaaaagatgatagtcgtgatacaaaggatattaaagaatggcctgtaagagattttacatacgttaaaaatgttttaggaaagtttgatgttttgtcattgtatccattcatatatgatggaaagataaaagcagtatcatttgcttgcggtgacggatcgttttttgtagagattgatgattatgacaattttaaattgcttaataatgataagcttacgttgataggacacgatctgaaagattttttagtaaacatttcatactgcggtattgaacttaattgtaagattttagatacggccataatgacttatcttttaaatccgtctgagtcgaattacgacataagtcgcgtattgaaaaaatacttgaaagaggatttgcaaaacatagatgatatagtaggcaagggcaggaataaaaagagctacgatgacattgacaaaaagcttttagtcgattatatgtgttcagccgcatcaaacttatctaagttaaaagataagctcatgtcatttataaaagagatggagatggaagatcttttaaaaaatgtggaaattccgcttattgaagtgctaaaatctatggaggtgtacggctttacattagataaagatgtacttagaagtatttctaaagaaatagatgaaaagacagataagattgtaaaagatatttacgatgctgctggatacgaatttaatattaactctacaaagcagttatcagaatttttgtttgataaactgaatttgccagcaataaaaaagactaaaacagggtattcgactgacatggaagtccttgcagaacttataccgtacaatgacatagtaggagaaataatagaatatagacagcttatgaagcttaaatctacgtacatagatggcttcattcccatcatggatgaaaataatagggtccactctacgtttaaacaaacagttgctgctacagggagaattagctcaacagagcctaatctgcagaacatacctgtaagagaagaatttggcaggaggataagaaaggcatttgtatcaagttatgaagatgggcttataatatctgctgattattctcagattgagctaagggttcttgcacatctttcagaggatgaaaaacttattgagtcatttttgaacaacgaagatatacatttaaggacggcatcggaggtttttaaggtttcgaaagaagaagtgacaagtgaaatgagagatcgggcgaaagctgtcaactttggtattgtatatggtataagcgattacggcttatctaaagacttaaagatttcgcgaaaagaagcgaaagaatacatagacaattattttgacaggtacaagggcgtcaaaaattacatcgactcaattgtcaaatttgcaaaggaaaatgggtatgttacgactatcttaaataggagaagatacataccggaaatcaattcaaaaaattttaaccaaagatcttttggcgagagaatggcaatgaatacacctattcaaggtagcgctgcggatataataaagatgtcgatggttaaagtatacaatgaattaaaggaaagaggattgaaatcaagacttattcttcaggtgcacgatgagcttataattgacacacatcctgatgaagttgaaatagtcaaggagcttctaaaatcaataatggaaaatatcataaagttgaaagttcctttagttgtagatatagggcaagggaaaaactggtatgatgcaaaataaaaggatcc

SEQ ID NO: 1002 - DNA, 2678 bp, Artificial Sequence
  Description of Artificial Sequence: Synthetic Clostridium thermosulfurogenes DNA Polymerase R716F
atgaaatacctgctgccgaccgctgctgctggtctgctgctcctcgctgcccagccggcgatggccatggcgaaatttttgatcatagatggtaatagcttgatgtacagggcgtattttgccctgcctgatttgatgaacagcgaaggaatgcatacaaatgccatatacggtttttcaatgatgcttcttaaattgctggaggaggagaaaccagactacatagcaatagctttcgataaaaaggcttctacatttaggcacaaggagtacagtgcttataaaggaacccgccagtcgatgccagaagagctgatagaacaggtggatattttaaaagatgtgataaatgcatttaacataaagaccatcgagatagagggatttgaagcagatgatatcattggtacagtatcaaaaattgcttccgaaagtgggatggatgtgcttatcgtcacaggcgacagagatgcgcttcagcttgtgtcggcaaatgtaaaagtaaaaatatgtaaaaaaggcataacgcagatggatgagtacgatgaaaaggcggtctttgaaaagtatgaagtgacgccgcttcaattcatagacttgaaagggcttatgggagacaaatcagacaacattccaggagtgcccaatataggggagaagacggccataaagcttgttaaagaatttggatcaattgaaaatttactgatgaatacagataagttaaaagggaaaataaaagaaaatgtagaaaacaatgcagaattagctgttttaagcaaacggcttgctacgattgagagaaatgttcctattgatattgatttgaatgaatacgcggttaaaaattacgatgtcaataagcttacagagctatttgaaaaattggaattttcaagcctcatctcagatttaaaagatgatagtcgtgatacaaaggatattaaagaatggcctgtaagagattttacatacgttaaaaatgttttaggaaagtttgatgttttgtcattgtatccattcatatatgatggaaagataaaagcagtatcatttgcttgcggtgacggatcgttttttgtagagattgatgattatgacaattttaaattgcttaataatgataagcttacgttgataggacacgatctgaaagattttttagtaaacatttcatactgcggtattgaacttaattgtaagattttagatacggccataatgacttatcttttaaatccgtctgagtcgaattacgacataagtcgcgtattgaaaaaatacttgaaagaggatttgcaaaacatagatgatatagtaggcaagggcaggaataaaaagagctacgatgacattgacaaaaagcttttagtcgattatatgtgttcagccgcatcaaacttatctaagttaaaagataagctcatgtcatttataaaagagatggagatggaagatcttttaaaaaatgtggaaattccgcttattgaagtgctaaaatctatggaggtgtacggctttacattagataaagatgtacttagaagtatttctaaagaaatagatgaaaagacagataagattgtaaaagatatttacgatgctgctggatacgaatttaatattaactctacaaagcagttatcagaatttttgtttgataaactgaatttgccagcaataaaaaagactaaaacagggtattcgactgacatggaagtccttgcagaacttataccgtacaatgacatagtaggagaaataatagaatatagacagcttatgaagcttaaatctacgtacatagatggcttcattcccatcatggatgaaaataatagggtccactctacgtttaaacaaacagttgctgctacagggagaattagctcaacagagcctaatctgcagaacatacctgtaagagaagaatttggcaggaggataagaaaggcatttgtatcaagttatgaagatgggcttataatatctgctgattattctcagattgagctaagggttcttgcacatctttcagaggatgaaaaacttattgagtcatttttgaacaacgaagatatacatttaaggacggcatcggaggtttttaaggtttcgaaagaagaagtgacaagtgaaatgagatttcgggcgaaagctgtcaactttggtattgtatatggtataagcgattacggcttatctaaagacttaaagatttcgcgaaaagaagcgaaagaatacatagacaattattttgacaggtacaagggcgtcaaaaattacatcgactcaattgtcaaatttgcaaaggaaaatgggtatgttacgactatcttaaataggagaagatacataccggaaatcaattcaaaaaattttaaccaaagatcttttggcgagagaatggcaatgaatacacctattcaaggtagcgctgcggatataataaagatgtcgatggttaaagtatacaatgaattaaaggaaagaggattgaaatcaagacttattcttcaggtgcacgatgagcttataattgacacacatcctgatgaagttgaaatagtcaaggagcttctaaaatcaataatggaaaatatcataaagttgaaagttcctttagttgtagatatagggcaagggaaaaactggtatgatgcaaaataaaaggatcc

SEQ ID NO: 1003 - DNA, 2678 bp, Artificial Sequence
  Description of Artificial Sequence: Synthetic Clostridium thermosulfurogenes DNA Polymerase R716G
atgaaatacctgctgccgaccgctgctgctggtctgctgctcctcgctgcccagccggcgatggccatggcgaaatttttgatcatagatggtaatagcttgatgtacagggcgtattttgccctgcctgatttgatgaacagcgaaggaatgcatacaaatgccatatacggtttttcaatgatgcttcttaaattgctggaggaggagaaaccagactacatagcaatagctttcgataaaaaggcttctacatttaggcacaaggagtacagtgcttataaaggaacccgccagtcgatgccagaagagctgatagaacaggtggatattttaaaagatgtgataaatgcatttaacataaagaccatcgagatagagggatttgaagcagatgatatcattggtacagtatcaaaaattgcttccgaaagtgggatggatgtgcttatcgtcacaggcgacagagatgcgcttcagcttgtgtcggcaaatgtaaaagtaaaaatatgtaaaaaaggcataacgcagatggatgagtacgatgaaaaggcggtctttgaaaagtatgaagtgacgccgcttcaattcatagacttgaaagggcttatgggagacaaatcagacaacattccaggagtgcccaatataggggagaagacggccataaagcttgttaaagaatttggatcaattgaaaatttactgatgaatacagataagttaaaagggaaaataaaagaaaatgtagaaaacaatgcagaattagctgttttaagcaaacggcttgctacgattgagagaaatgttcctattgatattgatttgaatgaatacgcggttaaaaattacgatgtcaataagcttacagagctatttgaaaaattggaattttcaagcctcatctcagatttaaaagatgatagtcgtgatacaaaggatattaaagaatggcctgtaagagattttacatacgttaaaaatgttttaggaaagtttgatgttttgtcattgtatccattcatatatgatggaaagataaaagcagtatcatttgcttgcggtgacggatcgttttttgtagagattgatgattatgacaattttaaattgcttaataatgataagcttacgttgataggacacgatctgaaagattttttagtaaacatttcatactgcggtattgaacttaattgtaagattttagatacggccataatgacttatcttttaaatccgtctgagtcgaattacgacataagtcgcgtattgaaaaaatacttgaaagaggatttgcaaaacatagatgatatagtaggcaagggcaggaataaaaagagctacgatgacattgacaaaaagcttttagtcgattatatgtgttcagccgcatcaaacttatctaagttaaaagataagctcatgtcatttataaaagagatggagatggaagatcttttaaaaaatgtggaaattccgcttattgaagtgctaaaatctatggaggtgtacggctttacattagataaagatgtacttagaagtatttctaaagaaatagatgaaaagacagataagattgtaaaagatatttacgatgctgctggatacgaatttaatattaactctacaaagcagttatcagaatttttgtttgataaactgaatttgccagcaataaaaaagactaaaacagggtattcgactgacatggaagtccttgcagaacttataccgtacaatgacatagtaggagaaataatagaatatagacagcttatgaagcttaaatctacgtacatagatggcttcattcccatcatggatgaaaataatagggtccactctacgtttaaacaaacagttgctgctacagggagaattagctcaacagagcctaatctgcagaacatacctgtaagagaagaatttggcaggaggataagaaaggcatttgtatcaagttatgaagatgggcttataatatctgctgattattctcagattgagctaagggttcttgcacatctttcagaggatgaaaaacttattgagtcatttttgaacaacgaagatatacatttaaggacggcatcggaggtttttaaggtttcgaaagaagaagtgacaagtgaaatgagaggtcgggcgaaagctgtcaactttggtattgtatatggtataagcgattacggcttatctaaagacttaaagatttcgcgaaaagaagcgaaagaatacatagacaattattttgacaggtacaagggcgtcaaaaattacatcgactcaattgtcaaatttgcaaaggaaaatgggtatgttacgactatcttaaataggagaagatacataccggaaatcaattcaaaaaattttaaccaaagatcttttggcgagagaatggcaatgaatacacctattcaaggtagcgctgcggatataataaagatgtcgatggttaaagtatacaatgaattaaaggaaagaggattgaaatcaagacttattcttcaggtgcacgatgagcttataattgacacacatcctgatgaagttgaaatagtcaaggagcttctaaaatcaataatggaaaatatcataaagttgaaagttcctttagttgtagatatagggcaagggaaaaactggtatgatgcaaaataaaaggatcc

SEQ ID NO: 1004 - DNA, 2678 bp, Artificial Sequence
  Description of Artificial Sequence: Synthetic Clostridium thermosulfurogenes DNA Polymerase R716H
atgaaatacctgctgccgaccgctgctgctggtctgctgctcctcgctgcccagccggcgatggccatggcgaaatttttgatcatagatggtaatagcttgatgtacagggcgtattttgccctgcctgatttgatgaacagcgaaggaatgcatacaaatgccatatacggtttttcaatgatgcttcttaaattgctggaggaggagaaaccagactacatagcaatagctttcgataaaaaggcttctacatttaggcacaaggagtacagtgcttataaaggaacccgccagtcgatgccagaagagctgatagaacaggtggatattttaaaagatgtgataaatgcatttaacataaagaccatcgagatagagggatttgaagcagatgatatcattggtacagtatcaaaaattgcttccgaaagtgggatggatgtgcttatcgtcacaggcgacagagatgcgcttcagcttgtgtcggcaaatgtaaaagtaaaaatatgtaaaaaaggcataacgcagatggatgagtacgatgaaaaggcggtctttgaaaagtatgaagtgacgccgcttcaattcatagacttgaaagggcttatgggagacaaatcagacaacattccaggagtgcccaatataggggagaagacggccataaagcttgttaaagaatttggatcaattgaaaatttactgatgaatacagataagttaaaagggaaaataaaagaaaatgtagaaaacaatgcagaattagctgttttaagcaaacggcttgctacgattgagagaaatgttcctattgatattgatttgaatgaatacgcggttaaaaattacgatgtcaataagcttacagagctatttgaaaaattggaattttcaagcctcatctcagatttaaaagatgatagtcgtgatacaaaggatattaaagaatggcctgtaagagattttacatacgttaaaaatgttttaggaaagtttgatgttttgtcattgtatccattcatatatgatggaaagataaaagcagtatcatttgcttgcggtgacggatcgttttttgtagagattgatgattatgacaattttaaattgcttaataatgataagcttacgttgataggacacgatctgaaagattttttagtaaacatttcatactgcggtattgaacttaattgtaagattttagatacggccataatgacttatcttttaaatccgtctgagtcgaattacgacataagtcgcgtattgaaaaaatacttgaaagaggatttgcaaaacatagatgatatagtaggcaagggcaggaataaaaagagctacgatgacattgacaaaaagcttttagtcgattatatgtgttcagccgcatcaaacttatctaagttaaaagataagctcatgtcatttataaaagagatggagatggaagatcttttaaaaaatgtggaaattccgcttattgaagtgctaaaatctatggaggtgtacggctttacattagataaagatgtacttagaagtatttctaaagaaatagatgaaaagacagataagattgtaaaagatatttacgatgctgctggatacgaatttaatattaactctacaaagcagttatcagaatttttgtttgataaactgaatttgccagcaataaaaaagactaaaacagggtattcgactgacatggaagtccttgcagaacttataccgtacaatgacatagtaggagaaataatagaatatagacagcttatgaagcttaaatctacgtacatagatggcttcattcccatcatggatgaaaataatagggtccactctacgtttaaacaaacagttgctgctacagggagaattagctcaacagagcctaatctgcagaacatacctgtaagagaagaatttggcaggaggataagaaaggcatttgtatcaagttatgaagatgggcttataatatctgctgattattctcagattgagctaagggttcttgcacatctttcagaggatgaaaaacttattgagtcatttttgaacaacgaagatatacatttaaggacggcatcggaggtttttaaggtttcgaaagaagaagtgacaagtgaaatgagacatcgggcgaaagctgtcaactttggtattgtatatggtataagcgattacggcttatctaaagacttaaagatttcgcgaaaagaagcgaaagaatacatagacaattattttgacaggtacaagggcgtcaaaaattacatcgactcaattgtcaaatttgcaaaggaaaatgggtatgttacgactatcttaaataggagaagatacataccggaaatcaattcaaaaaattttaaccaaagatcttttggcgagagaatggcaatgaatacacctattcaaggtagcgctgcggatataataaagatgtcgatggttaaagtatacaatgaattaaaggaaagaggattgaaatcaagacttattcttcaggtgcacgatgagcttataattgacacacatcctgatgaagttgaaatagtcaaggagcttctaaaatcaataatggaaaatatcataaagttgaaagttcctttagttgtagatatagggcaagggaaaaactggtatgatgcaaaataaaaggatcc

SEQ ID NO: 1005 - DNA, 2678 bp, Artificial Sequence
  Description of Artificial Sequence: Synthetic Clostridium thermosulfurogenes DNA Polymerase R716I
atgaaatacctgctgccgaccgctgctgctggtctgctgctcctcgctgcccagccggcgatggccatggcgaaatttttgatcatagatggtaatagcttgatgtacagggcgtattttgccctgcctgatttgatgaacagcgaaggaatgcatacaaatgccatatacggtttttcaatgatgcttcttaaattgctggaggaggagaaaccagactacatagcaatagctttcgataaaaaggcttctacatttaggcacaaggagtacagtgcttataaaggaacccgccagtcgatgccagaagagctgatagaacaggtggatattttaaaagatgtgataaatgcatttaacataaagaccatcgagatagagggatttgaagcagatgatatcattggtacagtatcaaaaattgcttccgaaagtgggatggatgtgcttatcgtcacaggcgacagagatgcgcttcagcttgtgtcggcaaatgtaaaagtaaaaatatgtaaaaaaggcataacgcagatggatgagtacgatgaaaaggcggtctttgaaaagtatgaagtgacgccgcttcaattcatagacttgaaagggcttatgggagacaaatcagacaacattccaggagtgcccaatataggggagaagacggccataaagcttgttaaagaatttggatcaattgaaaatttactgatgaatacagataagttaaaagggaaaataaaagaaaatgtagaaaacaatgcagaattagctgttttaagcaaacggcttgctacgattgagagaaatgttcctattgatattgatttgaatgaatacgcggttaaaaattacgatgtcaataagcttacagagctatttgaaaaattggaattttcaagcctcatctcagatttaaaagatgatagtcgtgatacaaaggatattaaagaatggcctgtaagagattttacatacgttaaaaatgttttaggaaagtttgatgttttgtcattgtatccattcatatatgatggaaagataaaagcagtatcatttgcttgcggtgacggatcgttttttgtagagattgatgattatgacaattttaaattgcttaataatgataagcttacgttgataggacacgatctgaaagattttttagtaaacatttcatactgcggtattgaacttaattgtaagattttagatacggccataatgacttatcttttaaatccgtctgagtcgaattacgacataagtcgcgtattgaaaaaatacttgaaagaggatttgcaaaacatagatgatatagtaggcaagggcaggaataaaaagagctacgatgacattgacaaaaagcttttagtcgattatatgtgttcagccgcatcaaacttatctaagttaaaagataagctcatgtcatttataaaagagatggagatggaagatcttttaaaaaatgtggaaattccgcttattgaagtgctaaaatctatggaggtgtacggctttacattagataaagatgtacttagaagtatttctaaagaaatagatgaaaagacagataagattgtaaaagatatttacgatgctgctggatacgaatttaatattaactctacaaagcagttatcagaatttttgtttgataaactgaatttgccagcaataaaaaagactaaaacagggtattcgactgacatggaagtccttgcagaacttataccgtacaatgacatagtaggagaaataatagaatatagacagcttatgaagcttaaatctacgtacatagatggcttcattcccatcatggatgaaaataatagggtccactctacgtttaaacaaacagttgctgctacagggagaattagctcaacagagcctaatctgcagaacatacctgtaagagaagaatttggcaggaggataagaaaggcatttgtatcaagttatgaagatgggcttataatatctgctgattattctcagattgagctaagggttcttgcacatctttcagaggatgaaaaacttattgagtcatttttgaacaacgaagatatacatttaaggacggcatcggaggtttttaaggtttcgaaagaagaagtgacaagtgaaatgagaattcgggcgaaagctgtcaactttggtattgtatatggtataagcgattacggcttatctaaagacttaaagatttcgcgaaaagaagcgaaagaatacatagacaattattttgacaggtacaagggcgtcaaaaattacatcgactcaattgtcaaatttgcaaaggaaaatgggtatgttacgactatcttaaataggagaagatacataccggaaatcaattcaaaaaattttaaccaaagatcttttggcgagagaatggcaatgaatacacctattcaaggtagcgctgcggatataataaagatgtcgatggttaaagtatacaatgaattaaaggaaagaggattgaaatcaagacttattcttcaggtgcacgatgagcttataattgacacacatcctgatgaagttgaaatagtcaaggagcttctaaaatcaataatggaaaatatcataaagttgaaagttcctttagttgtagatatagggcaagggaaaaactggtatgatgcaaaataaaaggatcc

SEQ ID NO: 1006 - DNA, 2678 bp, Artificial Sequence
  Description of Artificial Sequence: Synthetic Clostridium thermosulfurogenes DNA Polymerase R716L
atgaaatacctgctgccgaccgctgctgctggtctgctgctcctcgctgcccagccggcgatggccatggcgaaatttttgatcatagatggtaatagcttgatgtacagggcgtattttgccctgcctgatttgatgaacagcgaaggaatgcatacaaatgccatatacggtttttcaatgatgcttcttaaattgctggaggaggagaaaccagactacatagcaatagctttcgataaaaaggcttctacatttaggcacaaggagtacagtgcttataaaggaacccgccagtcgatgccagaagagctgatagaacaggtggatattttaaaagatgtgataaatgcatttaacataaagaccatcgagatagagggatttgaagcagatgatatcattggtacagtatcaaaaattgcttccgaaagtgggatggatgtgcttatcgtcacaggcgacagagatgcgcttcagcttgtgtcggcaaatgtaaaagtaaaaatatgtaaaaaaggcataacgcagatggatgagtacgatgaaaaggcggtctttgaaaagtatgaagtgacgccgcttcaattcatagacttgaaagggcttatgggagacaaatcagacaacattccaggagtgcccaatataggggagaagacggccataaagcttgttaaagaatttggatcaattgaaaatttactgatgaatacagataagttaaaagggaaaataaaagaaaatgtagaaaacaatgcagaattagctgttttaagcaaacggcttgctacgattgagagaaatgttcctattgatattgatttgaatgaatacgcggttaaaaattacgatgtcaataagcttacagagctatttgaaaaattggaattttcaagcctcatctcagatttaaaagatgatagtcgtgatacaaaggatattaaagaatggcctgtaagagattttacatacgttaaaaatgttttaggaaagtttgatgttttgtcattgtatccattcatatatgatggaaagataaaagcagtatcatttgcttgcggtgacggatcgttttttgtagagattgatgattatgacaattttaaattgcttaataatgataagcttacgttgataggacacgatctgaaagattttttagtaaacatttcatactgcggtattgaacttaattgtaagattttagatacggccataatgacttatcttttaaatccgtctgagtcgaattacgacataagtcgcgtattgaaaaaatacttgaaagaggatttgcaaaacatagatgatatagtaggcaagggcaggaataaaaagagctacgatgacattgacaaaaagcttttagtcgattatatgtgttcagccgcatcaaacttatctaagttaaaagataagctcatgtcatttataaaagagatggagatggaagatcttttaaaaaatgtggaaattccgcttattgaagtgctaaaatctatggaggtgtacggctttacattagataaagatgtacttagaagtatttctaaagaaatagatgaaaagacagataagattgtaaaagatatttacgatgctgctggatacgaatttaatattaactctacaaagcagttatcagaatttttgtttgataaactgaatttgccagcaataaaaaagactaaaacagggtattcgactgacatggaagtccttgcagaacttataccgtacaatgacatagtaggagaaataatagaatatagacagcttatgaagcttaaatctacgtacatagatggcttcattcccatcatggatgaaaataatagggtccactctacgtttaaacaaacagttgctgctacagggagaattagctcaacagagcctaatctgcagaacatacctgtaagagaagaatttggcaggaggataagaaaggcatttgtatcaagttatgaagatgggcttataatatctgctgattattctcagattgagctaagggttcttgcacatctttcagaggatgaaaaacttattgagtcatttttgaacaacgaagatatacatttaaggacggcatcggaggtttttaaggtttcgaaagaagaagtgacaagtgaaatgagacttcgggcgaaagctgtcaactttggtattgtatatggtataagcgattacggcttatctaaagacttaaagatttcgcgaaaagaagcgaaagaatacatagacaattattttgacaggtacaagggcgtcaaaaattacatcgactcaattgtcaaatttgcaaaggaaaatgggtatgttacgactatcttaaataggagaagatacataccggaaatcaattcaaaaaattttaaccaaagatcttttggcgagagaatggcaatgaatacacctattcaaggtagcgctgcggatataataaagatgtcgatggttaaagtatacaatgaattaaaggaaagaggattgaaatcaagacttattcttcaggtgcacgatgagcttataattgacacacatcctgatgaagttgaaatagtcaaggagcttctaaaatcaataatggaaaatatcataaagttgaaagttcctttagttgtagatatagggcaagggaaaaactggtatgatgcaaaataaaaggatcc

SEQ ID NO: 1007 - DNA, 2678 bp, Artificial Sequence
  Description of Artificial Sequence: Synthetic Clostridium thermosulfurogenes DNA Polymerase R716M
atgaaatacctgctgccgaccgctgctgctggtctgctgctcctcgctgcccagccggcgatggccatggcgaaatttttgatcatagatggtaatagcttgatgtacagggcgtattttgccctgcctgatttgatgaacagcgaaggaatgcatacaaatgccatatacggtttttcaatgatgcttcttaaattgctggaggaggagaaaccagactacatagcaatagctttcgataaaaaggcttctacatttaggcacaaggagtacagtgcttataaaggaacccgccagtcgatgccagaagagctgatagaacaggtggatattttaaaagatgtgataaatgcatttaacataaagaccatcgagatagagggatttgaagcagatgatatcattggtacagtatcaaaaattgcttccgaaagtgggatggatgtgcttatcgtcacaggcgacagagatgcgcttcagcttgtgtcggcaaatgtaaaagtaaaaatatgtaaaaaaggcataacgcagatggatgagtacgatgaaaaggcggtctttgaaaagtatgaagtgacgccgcttcaattcatagacttgaaagggcttatgggagacaaatcagacaacattccaggagtgcccaatataggggagaagacggccataaagcttgttaaagaatttggatcaattgaaaatttactgatgaatacagataagttaaaagggaaaataaaagaaaatgtagaaaacaatgcagaattagctgttttaagcaaacggcttgctacgattgagagaaatgttcctattgatattgatttgaatgaatacgcggttaaaaattacgatgtcaataagcttacagagctatttgaaaaattggaattttcaagcctcatctcagatttaaaagatgatagtcgtgatacaaaggatattaaagaatggcctgtaagagattttacatacgttaaaaatgttttaggaaagtttgatgttttgtcattgtatccattcatatatgatggaaagataaaagcagtatcatttgcttgcggtgacggatcgttttttgtagagattgatgattatgacaattttaaattgcttaataatgataagcttacgttgataggacacgatctgaaagattttttagtaaacatttcatactgcggtattgaacttaattgtaagattttagatacggccataatgacttatcttttaaatccgtctgagtcgaattacgacataagtcgcgtattgaaaaaatacttgaaagaggatttgcaaaacatagatgatatagtaggcaagggcaggaataaaaagagctacgatgacattgacaaaaagcttttagtcgattatatgtgttcagccgcatcaaacttatctaagttaaaagataagctcatgtcatttataaaagagatggagatggaagatcttttaaaaaatgtggaaattccgcttattgaagtgctaaaatctatggaggtgtacggctttacattagataaagatgtacttagaagtatttctaaagaaatagatgaaaagacagataagattgtaaaagatatttacgatgctgctggatacgaatttaatattaactctacaaagcagttatcagaatttttgtttgataaactgaatttgccagcaataaaaaagactaaaacagggtattcgactgacatggaagtccttgcagaacttataccgtacaatgacatagtaggagaaataatagaatatagacagcttatgaagcttaaatctacgtacatagatggcttcattcccatcatggatgaaaataatagggtccactctacgtttaaacaaacagttgctgctacagggagaattagctcaacagagcctaatctgcagaacatacctgtaagagaagaatttggcaggaggataagaaaggcatttgtatcaagttatgaagatgggcttataatatctgctgattattctcagattgagctaagggttcttgcacatctttcagaggatgaaaaacttattgagtcatttttgaacaacgaagatatacatttaaggacggcatcggaggtttttaaggtttcgaaagaagaagtgacaagtgaaatgagaatgcgggcgaaagctgtcaactttggtattgtatatggtataagcgattacggcttatctaaagacttaaagatttcgcgaaaagaagcgaaagaatacatagacaattattttgacaggtacaagggcgtcaaaaattacatcgactcaattgtcaaatttgcaaaggaaaatgggtatgttacgactatcttaaataggagaagatacataccggaaatcaattcaaaaaattttaaccaaagatcttttggcgagagaatggcaatgaatacacctattcaaggtagcgctgcggatataataaagatgtcgatggttaaagtatacaatgaattaaaggaaagaggattgaaatcaagacttattcttcaggtgcacgatgagcttataattgacacacatcctgatgaagttgaaatagtcaaggagcttctaaaatcaataatggaaaatatcataaagttgaaagttcctttagttgtagatatagggcaagggaaaaactggtatgatgcaaaataaaaggatcc

SEQ ID NO: 1008 - DNA, 2678 bp, Artificial Sequence
  Description of Artificial Sequence: Synthetic Clostridium thermosulfurogenes DNA Polymerase R716N
atgaaatacctgctgccgaccgctgctgctggtctgctgctcctcgctgcccagccggcgatggccatggcgaaatttttgatcatagatggtaatagcttgatgtacagggcgtattttgccctgcctgatttgatgaacagcgaaggaatgcatacaaatgccatatacggtttttcaatgatgcttcttaaattgctggaggaggagaaaccagactacatagcaatagctttcgataaaaaggcttctacatttaggcacaaggagtacagtgcttataaaggaacccgccagtcgatgccagaagagctgatagaacaggtggatattttaaaagatgtgataaatgcatttaacataaagaccatcgagatagagggatttgaagcagatgatatcattggtacagtatcaaaaattgcttccgaaagtgggatggatgtgcttatcgtcacaggcgacagagatgcgcttcagcttgtgtcggcaaatgtaaaagtaaaaatatgtaaaaaaggcataacgcagatggatgagtacgatgaaaaggcggtctttgaaaagtatgaagtgacgccgcttcaattcatagacttgaaagggcttatgggagacaaatcagacaacattccaggagtgcccaatataggggagaagacggccataaagcttgttaaagaatttggatcaattgaaaatttactgatgaatacagataagttaaaagggaaaataaaagaaaatgtagaaaacaatgcagaattagctgttttaagcaaacggcttgctacgattgagagaaatgttcctattgatattgatttgaatgaatacgcggttaaaaattacgatgtcaataagcttacagagctatttgaaaaattggaattttcaagcctcatctcagatttaaaagatgatagtcgtgatacaaaggatattaaagaatggcctgtaagagattttacatacgttaaaaatgttttaggaaagtttgatgttttgtcattgtatccattcatatatgatggaaagataaaagcagtatcatttgcttgcggtgacggatcgttttttgtagagattgatgattatgacaattttaaattgcttaataatgataagcttacgttgataggacacgatctgaaagattttttagtaaacatttcatactgcggtattgaacttaattgtaagattttagatacggccataatgacttatcttttaaatccgtctgagtcgaattacgacataagtcgcgtattgaaaaaatacttgaaagaggatttgcaaaacatagatgatatagtaggcaagggcaggaataaaaagagctacgatgacattgacaaaaagcttttagtcgattatatgtgttcagccgcatcaaacttatctaagttaaaagataagctcatgtcatttataaaagagatggagatggaagatcttttaaaaaatgtggaaattccgcttattgaagtgctaaaatctatggaggtgtacggctttacattagataaagatgtacttagaagtatttctaaagaaatagatgaaaagacagataagattgtaaaagatatttacgatgctgctggatacgaatttaatattaactctacaaagcagttatcagaatttttgtttgataaactgaatttgccagcaataaaaaagactaaaacagggtattcgactgacatggaagtccttgcagaacttataccgtacaatgacatagtaggagaaataatagaatatagacagcttatgaagcttaaatctacgtacatagatggcttcattcccatcatggatgaaaataatagggtccactctacgtttaaacaaacagttgctgctacagggagaattagctcaacagagcctaatctgcagaacatacctgtaagagaagaatttggcaggaggataagaaaggcatttgtatcaagttatgaagatgggcttataatatctgctgattattctcagattgagctaagggttcttgcacatctttcagaggatgaaaaacttattgagtcatttttgaacaacgaagatatacatttaaggacggcatcggaggtttttaaggtttcgaaagaagaagtgacaagtgaaatgagaaatcgggcgaaagctgtcaactttggtattgtatatggtataagcgattacggcttatctaaagacttaaagatttcgcgaaaagaagcgaaagaatacatagacaattattttgacaggtacaagggcgtcaaaaattacatcgactcaattgtcaaatttgcaaaggaaaatgggtatgttacgactatcttaaataggagaagatacataccggaaatcaattcaaaaaattttaaccaaagatcttttggcgagagaatggcaatgaatacacctattcaaggtagcgctgcggatataataaagatgtcgatggttaaagtatacaatgaattaaaggaaagaggattgaaatcaagacttattcttcaggtgcacgatgagcttataattgacacacatcctgatgaagttgaaatagtcaaggagcttctaaaatcaataatggaaaatatcataaagttgaaagttcctttagttgtagatatagggcaagggaaaaactggtatgatgcaaaataaaaggatcc

SEQ ID NO: 1009 - DNA, 2678 bp, Artificial Sequence
  Description of Artificial Sequence: Synthetic Clostridium thermosulfurogenes DNA Polymerase R716P
atgaaatacctgctgccgaccgctgctgctggtctgctgctcctcgctgcccagccggcgatggccatggcgaaatttttgatcatagatggtaatagcttgatgtacagggcgtattttgccctgcctgatttgatgaacagcgaaggaatgcatacaaatgccatatacggtttttcaatgatgcttcttaaattgctggaggaggagaaaccagactacatagcaatagctttcgataaaaaggcttctacatttaggcacaaggagtacagtgcttataaaggaacccgccagtcgatgccagaagagctgatagaacaggtggatattttaaaagatgtgataaatgcatttaacataaagaccatcgagatagagggatttgaagcagatgatatcattggtacagtatcaaaaattgcttccgaaagtgggatggatgtgcttatcgtcacaggcgacagagatgcgcttcagcttgtgtcggcaaatgtaaaagtaaaaatatgtaaaaaaggcataacgcagatggatgagtacgatgaaaaggcggtctttgaaaagtatgaagtgacgccgcttcaattcatagacttgaaagggcttatgggagacaaatcagacaacattccaggagtgcccaatataggggagaagacggccataaagcttgttaaagaatttggatcaattgaaaatttactgatgaatacagataagttaaaagggaaaataaaagaaaatgtagaaaacaatgcagaattagctgttttaagcaaacggcttgctacgattgagagaaatgttcctattgatattgatttgaatgaatacgcggttaaaaattacgatgtcaataagcttacagagctatttgaaaaattggaattttcaagcctcatctcagatttaaaagatgatagtcgtgatacaaaggatattaaagaatggcctgtaagagattttacatacgttaaaaatgttttaggaaagtttgatgttttgtcattgtatccattcatatatgatggaaagataaaagcagtatcatttgcttgcggtgacggatcgttttttgtagagattgatgattatgacaattttaaattgcttaataatgataagcttacgttgataggacacgatctgaaagattttttagtaaacatttcatactgcggtattgaacttaattgtaagattttagatacggccataatgacttatcttttaaatccgtctgagtcgaattacgacataagtcgcgtattgaaaaaatacttgaaagaggatttgcaaaacatagatgatatagtaggcaagggcaggaataaaaagagctacgatgacattgacaaaaagcttttagtcgattatatgtgttcagccgcatcaaacttatctaagttaaaagataagctcatgtcatttataaaagagatggagatggaagatcttttaaaaaatgtggaaattccgcttattgaagtgctaaaatctatggaggtgtacggctttacattagataaagatgtacttagaagtatttctaaagaaatagatgaaaagacagataagattgtaaaagatatttacgatgctgctggatacgaatttaatattaactctacaaagcagttatcagaatttttgtttgataaactgaatttgccagcaataaaaaagactaaaacagggtattcgactgacatggaagtccttgcagaacttataccgtacaatgacatagtaggagaaataatagaatatagacagcttatgaagcttaaatctacgtacatagatggcttcattcccatcatggatgaaaataatagggtccactctacgtttaaacaaacagttgctgctacagggagaattagctcaacagagcctaatctgcagaacatacctgtaagagaagaatttggcaggaggataagaaaggcatttgtatcaagttatgaagatgggcttataatatctgctgattattctcagattgagctaagggttcttgcacatctttcagaggatgaaaaacttattgagtcatttttgaacaacgaagatatacatttaaggacggcatcggaggtttttaaggtttcgaaagaagaagtgacaagtgaaatgagacctcgggcgaaagctgtcaactttggtattgtatatggtataagcgattacggcttatctaaagacttaaagatttcgcgaaaagaagcgaaagaatacatagacaattattttgacaggtacaagggcgtcaaaaattacatcgactcaattgtcaaatttgcaaaggaaaatgggtatgttacgactatcttaaataggagaagatacataccggaaatcaattcaaaaaattttaaccaaagatcttttggcgagagaatggcaatgaatacacctattcaaggtagcgctgcggatataataaagatgtcgatggttaaagtatacaatgaattaaaggaaagaggattgaaatcaagacttattcttcaggtgcacgatgagcttataattgacacacatcctgatgaagttgaaatagtcaaggagcttctaaaatcaataatggaaaatatcataaagttgaaagttcctttagttgtagatatagggcaagggaaaaactggtatgatgcaaaataaaaggatcc

SEQ ID NO: 1010 - DNA, 2678 bp, Artificial Sequence
  Description of Artificial Sequence: Synthetic Clostridium thermosulfurogenes DNA Polymerase R716Q
atgaaatacctgctgccgaccgctgctgctggtctgctgctcctcgctgcccagccggcgatggccatggcgaaatttttgatcatagatggtaatagcttgatgtacagggcgtattttgccctgcctgatttgatgaacagcgaaggaatgcatacaaatgccatatacggtttttcaatgatgcttcttaaattgctggaggaggagaaaccagactacatagcaatagctttcgataaaaaggcttctacatttaggcacaaggagtacagtgcttataaaggaacccgccagtcgatgccagaagagctgatagaacaggtggatattttaaaagatgtgataaatgcatttaacataaagaccatcgagatagagggatttgaagcagatgatatcattggtacagtatcaaaaattgcttccgaaagtgggatggatgtgcttatcgtcacaggcgacagagatgcgcttcagcttgtgtcggcaaatgtaaaagtaaaaatatgtaaaaaaggcataacgcagatggatgagtacgatgaaaaggcggtctttgaaaagtatgaagtgacgccgcttcaattcatagacttgaaagggcttatgggagacaaatcagacaacattccaggagtgcccaatataggggagaagacggccataaagcttgttaaagaatttggatcaattgaaaatttactgatgaatacagataagttaaaagggaaaataaaagaaaatgtagaaaacaatgcagaattagctgttttaagcaaacggcttgctacgattgagagaaatgttcctattgatattgatttgaatgaatacgcggttaaaaattacgatgtcaataagcttacagagctatttgaaaaattggaattttcaagcctcatctcagatttaaaagatgatagtcgtgatacaaaggatattaaagaatggcctgtaagagattttacatacgttaaaaatgttttaggaaagtttgatgttttgtcattgtatccattcatatatgatggaaagataaaagcagtatcatttgcttgcggtgacggatcgttttttgtagagattgatgattatgacaattttaaattgcttaataatgataagcttacgttgataggacacgatctgaaagattttttagtaaacatttcatactgcggtattgaacttaattgtaagattttagatacggccataatgacttatcttttaaatccgtctgagtcgaattacgacataagtcgcgtattgaaaaaatacttgaaagaggatttgcaaaacatagatgatatagtaggcaagggcaggaataaaaagagctacgatgacattgacaaaaagcttttagtcgattatatgtgttcagccgcatcaaacttatctaagttaaaagataagctcatgtcatttataaaagagatggagatggaagatcttttaaaaaatgtggaaattccgcttattgaagtgctaaaatctatggaggtgtacggctttacattagataaagatgtacttagaagtatttctaaagaaatagatgaaaagacagataagattgtaaaagatatttacgatgctgctggatacgaatttaatattaactctacaaagcagttatcagaatttttgtttgataaactgaatttgccagcaataaaaaagactaaaacagggtattcgactgacatggaagtccttgcagaacttataccgtacaatgacatagtaggagaaataatagaatatagacagcttatgaagcttaaatctacgtacatagatggcttcattcccatcatggatgaaaataatagggtccactctacgtttaaacaaacagttgctgctacagggagaattagctcaacagagcctaatctgcagaacatacctgtaagagaagaatttggcaggaggataagaaaggcatttgtatcaagttatgaagatgggcttataatatctgctgattattctcagattgagctaagggttcttgcacatctttcagaggatgaaaaacttattgagtcatttttgaacaacgaagatatacatttaaggacggcatcggaggtttttaaggtttcgaaagaagaagtgacaagtgaaatgagacaacgggcgaaagctgtcaactttggtattgtatatggtataagcgattacggcttatctaaagacttaaagatttcgcgaaaagaagcgaaagaatacatagacaattattttgacaggtacaagggcgtcaaaaattacatcgactcaattgtcaaatttgcaaaggaaaatgggtatgttacgactatcttaaataggagaagatacataccggaaatcaattcaaaaaattttaaccaaagatcttttggcgagagaatggcaatgaatacacctattcaaggtagcgctgcggatataataaagatgtcgatggttaaagtatacaatgaattaaaggaaagaggattgaaatcaagacttattcttcaggtgcacgatgagcttataattgacacacatcctgatgaagttgaaatagtcaaggagcttctaaaatcaataatggaaaatatcataaagttgaaagttcctttagttgtagatatagggcaagggaaaaactggtatgatgcaaaataaaaggatcc

SEQ ID NO: 1011 - DNA, 2678 bp, Artificial Sequence
  Description of Artificial Sequence: Synthetic Clostridium thermosulfurogenes DNA Polymerase R716R
atgaaatacctgctgccgaccgctgctgctggtctgctgctcctcgctgcccagccggcgatggccatggcgaaatttttgatcatagatggtaatagcttgatgtacagggcgtattttgccctgcctgatttgatgaacagcgaaggaatgcatacaaatgccatatacggtttttcaatgatgcttcttaaattgctggaggaggagaaaccagactacatagcaatagctttcgataaaaaggcttctacatttaggcacaaggagtacagtgcttataaaggaacccgccagtcgatgccagaagagctgatagaacaggtggatattttaaaagatgtgataaatgcatttaacataaagaccatcgagatagagggatttgaagcagatgatatcattggtacagtatcaaaaattgcttccgaaagtgggatggatgtgcttatcgtcacaggcgacagagatgcgcttcagcttgtgtcggcaaatgtaaaagtaaaaatatgtaaaaaaggcataacgcagatggatgagtacgatgaaaaggcggtctttgaaaagtatgaagtgacgccgcttcaattcatagacttgaaagggcttatgggagacaaatcagacaacattccaggagtgcccaatataggggagaagacggccataaagcttgttaaagaatttggatcaattgaaaatttactgatgaatacagataagttaaaagggaaaataaaagaaaatgtagaaaacaatgcagaattagctgttttaagcaaacggcttgctacgattgagagaaatgttcctattgatattgatttgaatgaatacgcggttaaaaattacgatgtcaataagcttacagagctatttgaaaaattggaattttcaagcctcatctcagatttaaaagatgatagtcgtgatacaaaggatattaaagaatggcctgtaagagattttacatacgttaaaaatgttttaggaaagtttgatgttttgtcattgtatccattcatatatgatggaaagataaaagcagtatcatttgcttgcggtgacggatcgttttttgtagagattgatgattatgacaattttaaattgcttaataatgataagcttacgttgataggacacgatctgaaagattttttagtaaacatttcatactgcggtattgaacttaattgtaagattttagatacggccataatgacttatcttttaaatccgtctgagtcgaattacgacataagtcgcgtattgaaaaaatacttgaaagaggatttgcaaaacatagatgatatagtaggcaagggcaggaataaaaagagctacgatgacattgacaaaaagcttttagtcgattatatgtgttcagccgcatcaaacttatctaagttaaaagataagctcatgtcatttataaaagagatggagatggaagatcttttaaaaaatgtggaaattccgcttattgaagtgctaaaatctatggaggtgtacggctttacattagataaagatgtacttagaagtatttctaaagaaatagatgaaaagacagataagattgtaaaagatatttacgatgctgctggatacgaatttaatattaactctacaaagcagttatcagaatttttgtttgataaactgaatttgccagcaataaaaaagactaaaacagggtattcgactgacatggaagtccttgcagaacttataccgtacaatgacatagtaggagaaataatagaatatagacagcttatgaagcttaaatctacgtacatagatggcttcattcccatcatggatgaaaataatagggtccactctacgtttaaacaaacagttgctgctacagggagaattagctcaacagagcctaatctgcagaacatacctgtaagagaagaatttggcaggaggataagaaaggcatttgtatcaagttatgaagatgggcttataatatctgctgattattctcagattgagctaagggttcttgcacatctttcagaggatgaaaaacttattgagtcatttttgaacaacgaagatatacatttaaggacggcatcggaggtttttaaggtttcgaaagaagaagtgacaagtgaaatgagacgtcgggcgaaagctgtcaactttggtattgtatatggtataagcgattacggcttatctaaagacttaaagatttcgcgaaaagaagcgaaagaatacatagacaattattttgacaggtacaagggcgtcaaaaattacatcgactcaattgtcaaatttgcaaaggaaaatgggtatgttacgactatcttaaataggagaagatacataccggaaatcaattcaaaaaattttaaccaaagatcttttggcgagagaatggcaatgaatacacctattcaaggtagcgctgcggatataataaagatgtcgatggttaaagtatacaatgaattaaaggaaagaggattgaaatcaagacttattcttcaggtgcacgatgagcttataattgacacacatcctgatgaagttgaaatagtcaaggagcttctaaaatcaataatggaaaatatcataaagttgaaagttcctttagttgtagatatagggcaagggaaaaactggtatgatgcaaaataaaaggatcc

SEQ ID NO: 1012 - DNA, 2678 bp, Artificial Sequence
  Description of Artificial Sequence: Synthetic Clostridium thermosulfurogenes DNA Polymerase R716S
atgaaatacctgctgccgaccgctgctgctggtctgctgctcctcgctgcccagccggcgatggccatggcgaaatttttgatcatagatggtaatagcttgatgtacagggcgtattttgccctgcctgatttgatgaacagcgaaggaatgcatacaaatgccatatacggtttttcaatgatgcttcttaaattgctggaggaggagaaaccagactacatagcaatagctttcgataaaaaggcttctacatttaggcacaaggagtacagtgcttataaaggaacccgccagtcgatgccagaagagctgatagaacaggtggatattttaaaagatgtgataaatgcatttaacataaagaccatcgagatagagggatttgaagcagatgatatcattggtacagtatcaaaaattgcttccgaaagtgggatggatgtgcttatcgtcacaggcgacagagatgcgcttcagcttgtgtcggcaaatgtaaaagtaaaaatatgtaaaaaaggcataacgcagatggatgagtacgatgaaaaggcggtctttgaaaagtatgaagtgacgccgcttcaattcatagacttgaaagggcttatgggagacaaatcagacaacattccaggagtgcccaatataggggagaagacggccataaagcttgttaaagaatttggatcaattgaaaatttactgatgaatacagataagttaaaagggaaaataaaagaaaatgtagaaaacaatgcagaattagctgttttaagcaaacggcttgctacgattgagagaaatgttcctattgatattgatttgaatgaatacgcggttaaaaattacgatgtcaataagcttacagagctatttgaaaaattggaattttcaagcctcatctcagatttaaaagatgatagtcgtgatacaaaggatattaaagaatggcctgtaagagattttacatacgttaaaaatgttttaggaaagtttgatgttttgtcattgtatccattcatatatgatggaaagataaaagcagtatcatttgcttgcggtgacggatcgttttttgtagagattgatgattatgacaattttaaattgcttaataatgataagcttacgttgataggacacgatctgaaagattttttagtaaacatttcatactgcggtattgaacttaattgtaagattttagatacggccataatgacttatcttttaaatccgtctgagtcgaattacgacataagtcgcgtattgaaaaaatacttgaaagaggatttgcaaaacatagatgatatagtaggcaagggcaggaataaaaagagctacgatgacattgacaaaaagcttttagtcgattatatgtgttcagccgcatcaaacttatctaagttaaaagataagctcatgtcatttataaaagagatggagatggaagatcttttaaaaaatgtggaaattccgcttattgaagtgctaaaatctatggaggtgtacggctttacattagataaagatgtacttagaagtatttctaaagaaatagatgaaaagacagataagattgtaaaagatatttacgatgctgctggatacgaatttaatattaactctacaaagcagttatcagaatttttgtttgataaactgaatttgccagcaataaaaaagactaaaacagggtattcgactgacatggaagtccttgcagaacttataccgtacaatgacatagtaggagaaataatagaatatagacagcttatgaagcttaaatctacgtacatagatggcttcattcccatcatggatgaaaataatagggtccactctacgtttaaacaaacagttgctgctacagggagaattagctcaacagagcctaatctgcagaacatacctgtaagagaagaatttggcaggaggataagaaaggcatttgtatcaagttatgaagatgggcttataatatctgctgattattctcagattgagctaagggttcttgcacatctttcagaggatgaaaaacttattgagtcatttttgaacaacgaagatatacatttaaggacggcatcggaggtttttaaggtttcgaaagaagaagtgacaagtgaaatgagatctcgggcgaaagctgtcaactttggtattgtatatggtataagcgattacggcttatctaaagacttaaagatttcgcgaaaagaagcgaaagaatacatagacaattattttgacaggtacaagggcgtcaaaaattacatcgactcaattgtcaaatttgcaaaggaaaatgggtatgttacgactatcttaaataggagaagatacataccggaaatcaattcaaaaaattttaaccaaagatcttttggcgagagaatggcaatgaatacacctattcaaggtagcgctgcggatataataaagatgtcgatggttaaagtatacaatgaattaaaggaaagaggattgaaatcaagacttattcttcaggtgcacgatgagcttataattgacacacatcctgatgaagttgaaatagtcaaggagcttctaaaatcaataatggaaaatatcataaagttgaaagttcctttagttgtagatatagggcaagggaaaaactggtatgatgcaaaataaaaggatcc

SEQ ID NO: 1013 - DNA, 2678 bp, Artificial Sequence
  Description of Artificial Sequence: Synthetic Clostridium thermosulfurogenes DNA Polymerase R716T
atgaaatacctgctgccgaccgctgctgctggtctgctgctcctcgctgcccagccggcgatggccatggcgaaatttttgatcatagatggtaatagcttgatgtacagggcgtattttgccctgcctgatttgatgaacagcgaaggaatgcatacaaatgccatatacggtttttcaatgatgcttcttaaattgctggaggaggagaaaccagactacatagcaatagctttcgataaaaaggcttctacatttaggcacaaggagtacagtgcttataaaggaacccgccagtcgatgccagaagagctgatagaacaggtggatattttaaaagatgtgataaatgcatttaacataaagaccatcgagatagagggatttgaagcagatgatatcattggtacagtatcaaaaattgcttccgaaagtgggatggatgtgcttatcgtcacaggcgacagagatgcgcttcagcttgtgtcggcaaatgtaaaagtaaaaatatgtaaaaaaggcataacgcagatggatgagtacgatgaaaaggcggtctttgaaaagtatgaagtgacgccgcttcaattcatagacttgaaagggcttatgggagacaaatcagacaacattccaggagtgcccaatataggggagaagacggccataaagcttgttaaagaatttggatcaattgaaaatttactgatgaatacagataagttaaaagggaaaataaaagaaaatgtagaaaacaatgcagaattagctgttttaagcaaacggcttgctacgattgagagaaatgttcctattgatattgatttgaatgaatacgcggttaaaaattacgatgtcaataagcttacagagctatttgaaaaattggaattttcaagcctcatctcagatttaaaagatgatagtcgtgatacaaaggatattaaagaatggcctgtaagagattttacatacgttaaaaatgttttaggaaagtttgatgttttgtcattgtatccattcatatatgatggaaagataaaagcagtatcatttgcttgcggtgacggatcgttttttgtagagattgatgattatgacaattttaaattgcttaataatgataagcttacgttgataggacacgatctgaaagattttttagtaaacatttcatactgcggtattgaacttaattgtaagattttagatacggccataatgacttatcttttaaatccgtctgagtcgaattacgacataagtcgcgtattgaaaaaatacttgaaagaggatttgcaaaacatagatgatatagtaggcaagggcaggaataaaaagagctacgatgacattgacaaaaagcttttagtcgattatatgtgttcagccgcatcaaacttatctaagttaaaagataagctcatgtcatttataaaagagatggagatggaagatcttttaaaaaatgtggaaattccgcttattgaagtgctaaaatctatggaggtgtacggctttacattagataaagatgtacttagaagtatttctaaagaaatagatgaaaagacagataagattgtaaaagatatttacgatgctgctggatacgaatttaatattaactctacaaagcagttatcagaatttttgtttgataaactgaatttgccagcaataaaaaagactaaaacagggtattcgactgacatggaagtccttgcagaacttataccgtacaatgacatagtaggagaaataatagaatatagacagcttatgaagcttaaatctacgtacatagatggcttcattcccatcatggatgaaaataatagggtccactctacgtttaaacaaacagttgctgctacagggagaattagctcaacagagcctaatctgcagaacatacctgtaagagaagaatttggcaggaggataagaaaggcatttgtatcaagttatgaagatgggcttataatatctgctgattattctcagattgagctaagggttcttgcacatctttcagaggatgaaaaacttattgagtcatttttgaacaacgaagatatacatttaaggacggcatcggaggtttttaaggtttcgaaagaagaagtgacaagtgaaatgagaactcgggcgaaagctgtcaactttggtattgtatatggtataagcgattacggcttatctaaagacttaaagatttcgcgaaaagaagcgaaagaatacatagacaattattttgacaggtacaagggcgtcaaaaattacatcgactcaattgtcaaatttgcaaaggaaaatgggtatgttacgactatcttaaataggagaagatacataccggaaatcaattcaaaaaattttaaccaaagatcttttggcgagagaatggcaatgaatacacctattcaaggtagcgctgcggatataataaagatgtcgatggttaaagtatacaatgaattaaaggaaagaggattgaaatcaagacttattcttcaggtgcacgatgagcttataattgacacacatcctgatgaagttgaaatagtcaaggagcttctaaaatcaataatggaaaatatcataaagttgaaagttcctttagttgtagatatagggcaagggaaaaactggtatgatgcaaaataaaaggatcc

SEQ ID NO: 1014 - DNA, 2678 bp, Artificial Sequence
  Description of Artificial Sequence: Synthetic Clostridium thermosulfurogenes DNA Polymerase R716V
atgaaatacctgctgccgaccgctgctgctggtctgctgctcctcgctgcccagccggcgatggccatggcgaaatttttgatcatagatggtaatagcttgatgtacagggcgtattttgccctgcctgatttgatgaacagcgaaggaatgcatacaaatgccatatacggtttttcaatgatgcttcttaaattgctggaggaggagaaaccagactacatagcaatagctttcgataaaaaggcttctacatttaggcacaaggagtacagtgcttataaaggaacccgccagtcgatgccagaagagctgatagaacaggtggatattttaaaagatgtgataaatgcatttaacataaagaccatcgagatagagggatttgaagcagatgatatcattggtacagtatcaaaaattgcttccgaaagtgggatggatgtgcttatcgtcacaggcgacagagatgcgcttcagcttgtgtcggcaaatgtaaaagtaaaaatatgtaaaaaaggcataacgcagatggatgagtacgatgaaaaggcggtctttgaaaagtatgaagtgacgccgcttcaattcatagacttgaaagggcttatgggagacaaatcagacaacattccaggagtgcccaatataggggagaagacggccataaagcttgttaaagaatttggatcaattgaaaatttactgatgaatacagataagttaaaagggaaaataaaagaaaatgtagaaaacaatgcagaattagctgttttaagcaaacggcttgctacgattgagagaaatgttcctattgatattgatttgaatgaatacgcggttaaaaattacgatgtcaataagcttacagagctatttgaaaaattggaattttcaagcctcatctcagatttaaaagatgatagtcgtgatacaaaggatattaaagaatggcctgtaagagattttacatacgttaaaaatgttttaggaaagtttgatgttttgtcattgtatccattcatatatgatggaaagataaaagcagtatcatttgcttgcggtgacggatcgttttttgtagagattgatgattatgacaattttaaattgcttaataatgataagcttacgttgataggacacgatctgaaagattttttagtaaacatttcatactgcggtattgaacttaattgtaagattttagatacggccataatgacttatcttttaaatccgtctgagtcgaattacgacataagtcgcgtattgaaaaaatacttgaaagaggatttgcaaaacatagatgatatagtaggcaagggcaggaataaaaagagctacgatgacattgacaaaaagcttttagtcgattatatgtgttcagccgcatcaaacttatctaagttaaaagataagctcatgtcatttataaaagagatggagatggaagatcttttaaaaaatgtggaaattccgcttattgaagtgctaaaatctatggaggtgtacggctttacattagataaagatgtacttagaagtatttctaaagaaatagatgaaaagacagataagattgtaaaagatatttacgatgctgctggatacgaatttaatattaactctacaaagcagttatcagaatttttgtttgataaactgaatttgccagcaataaaaaagactaaaacagggtattcgactgacatggaagtccttgcagaacttataccgtacaatgacatagtaggagaaataatagaatatagacagcttatgaagcttaaatctacgtacatagatggcttcattcccatcatggatgaaaataatagggtccactctacgtttaaacaaacagttgctgctacagggagaattagctcaacagagcctaatctgcagaacatacctgtaagagaagaatttggcaggaggataagaaaggcatttgtatcaagttatgaagatgggcttataatatctgctgattattctcagattgagctaagggttcttgcacatctttcagaggatgaaaaacttattgagtcatttttgaacaacgaagatatacatttaaggacggcatcggaggtttttaaggtttcgaaagaagaagtgacaagtgaaatgagagttcgggcgaaagctgtcaactttggtattgtatatggtataagcgattacggcttatctaaagacttaaagatttcgcgaaaagaagcgaaagaatacatagacaattattttgacaggtacaagggcgtcaaaaattacatcgactcaattgtcaaatttgcaaaggaaaatgggtatgttacgactatcttaaataggagaagatacataccggaaatcaattcaaaaaattttaaccaaagatcttttggcgagagaatggcaatgaatacacctattcaaggtagcgctgcggatataataaagatgtcgatggttaaagtatacaatgaattaaaggaaagaggattgaaatcaagacttattcttcaggtgcacgatgagcttataattgacacacatcctgatgaagttgaaatagtcaaggagcttctaaaatcaataatggaaaatatcataaagttgaaagttcctttagttgtagatatagggcaagggaaaaactggtatgatgcaaaataaaaggatcc

SEQ ID NO: 1015 - DNA, 2678 bp, Artificial Sequence
  Description of Artificial Sequence: Synthetic Clostridium thermosulfurogenes DNA Polymerase R716W
atgaaatacctgctgccgaccgctgctgctggtctgctgctcctcgctgcccagccggcgatggccatggcgaaatttttgatcatagatggtaatagcttgatgtacagggcgtattttgccctgcctgatttgatgaacagcgaaggaatgcatacaaatgccatatacggtttttcaatgatgcttcttaaattgctggaggaggagaaaccagactacatagcaatagctttcgataaaaaggcttctacatttaggcacaaggagtacagtgcttataaaggaacccgccagtcgatgccagaagagctgatagaacaggtggatattttaaaagatgtgataaatgcatttaacataaagaccatcgagatagagggatttgaagcagatgatatcattggtacagtatcaaaaattgcttccgaaagtgggatggatgtgcttatcgtcacaggcgacagagatgcgcttcagcttgtgtcggcaaatgtaaaagtaaaaatatgtaaaaaaggcataacgcagatggatgagtacgatgaaaaggcggtctttgaaaagtatgaagtgacgccgcttcaattcatagacttgaaagggcttatgggagacaaatcagacaacattccaggagtgcccaatataggggagaagacggccataaagcttgttaaagaatttggatcaattgaaaatttactgatgaatacagataagttaaaagggaaaataaaagaaaatgtagaaaacaatgcagaattagctgttttaagcaaacggcttgctacgattgagagaaatgttcctattgatattgatttgaatgaatacgcggttaaaaattacgatgtcaataagcttacagagctatttgaaaaattggaattttcaagcctcatctcagatttaaaagatgatagtcgtgatacaaaggatattaaagaatggcctgtaagagattttacatacgttaaaaatgttttaggaaagtttgatgttttgtcattgtatccattcatatatgatggaaagataaaagcagtatcatttgcttgcggtgacggatcgttttttgtagagattgatgattatgacaattttaaattgcttaataatgataagcttacgttgataggacacgatctgaaagattttttagtaaacatttcatactgcggtattgaacttaattgtaagattttagatacggccataatgacttatcttttaaatccgtctgagtcgaattacgacataagtcgcgtattgaaaaaatacttgaaagaggatttgcaaaacatagatgatatagtaggcaagggcaggaataaaaagagctacgatgacattgacaaaaagcttttagtcgattatatgtgttcagccgcatcaaacttatctaagttaaaagataagctcatgtcatttataaaagagatggagatggaagatcttttaaaaaatgtggaaattccgcttattgaagtgctaaaatctatggaggtgtacggctttacattagataaagatgtacttagaagtatttctaaagaaatagatgaaaagacagataagattgtaaaagatatttacgatgctgctggatacgaatttaatattaactctacaaagcagttatcagaatttttgtttgataaactgaatttgccagcaataaaaaagactaaaacagggtattcgactgacatggaagtccttgcagaacttataccgtacaatgacatagtaggagaaataatagaatatagacagcttatgaagcttaaatctacgtacatagatggcttcattcccatcatggatgaaaataatagggtccactctacgtttaaacaaacagttgctgctacagggagaattagctcaacagagcctaatctgcagaacatacctgtaagagaagaatttggcaggaggataagaaaggcatttgtatcaagttatgaagatgggcttataatatctgctgattattctcagattgagctaagggttcttgcacatctttcagaggatgaaaaacttattgagtcatttttgaacaacgaagatatacatttaaggacggcatcggaggtttttaaggtttcgaaagaagaagtgacaagtgaaatgagatggcgggcgaaagctgtcaactttggtattgtatatggtataagcgattacggcttatctaaagacttaaagatttcgcgaaaagaagcgaaagaatacatagacaattattttgacaggtacaagggcgtcaaaaattacatcgactcaattgtcaaatttgcaaaggaaaatgggtatgttacgactatcttaaataggagaagatacataccggaaatcaattcaaaaaattttaaccaaagatcttttggcgagagaatggcaatgaatacacctattcaaggtagcgctgcggatataataaagatgtcgatggttaaagtatacaatgaattaaaggaaagaggattgaaatcaagacttattcttcaggtgcacgatgagcttataattgacacacatcctgatgaagttgaaatagtcaaggagcttctaaaatcaataatggaaaatatcataaagttgaaagttcctttagttgtagatatagggcaagggaaaaactggtatgatgcaaaataaaaggatcc

SEQ ID NO: 1016 - DNA, 2678 bp, Artificial Sequence
  Description of Artificial Sequence: Synthetic Clostridium thermosulfurogenes DNA Polymerase R716Y
atgaaatacctgctgccgaccgctgctgctggtctgctgctcctcgctgcccagccggcgatggccatggcgaaatttttgatcatagatggtaatagcttgatgtacagggcgtattttgccctgcctgatttgatgaacagcgaaggaatgcatacaaatgccatatacggtttttcaatgatgcttcttaaattgctggaggaggagaaaccagactacatagcaatagctttcgataaaaaggcttctacatttaggcacaaggagtacagtgcttataaaggaacccgccagtcgatgccagaagagctgatagaacaggtggatattttaaaagatgtgataaatgcatttaacataaagaccatcgagatagagggatttgaagcagatgatatcattggtacagtatcaaaaattgcttccgaaagtgggatggatgtgcttatcgtcacaggcgacagagatgcgcttcagcttgtgtcggcaaatgtaaaagtaaaaatatgtaaaaaaggcataacgcagatggatgagtacgatgaaaaggcggtctttgaaaagtatgaagtgacgccgcttcaattcatagacttgaaagggcttatgggagacaaatcagacaacattccaggagtgcccaatataggggagaagacggccataaagcttgttaaagaatttggatcaattgaaaatttactgatgaatacagataagttaaaagggaaaataaaagaaaatgtagaaaacaatgcagaattagctgttttaagcaaacggcttgctacgattgagagaaatgttcctattgatattgatttgaatgaatacgcggttaaaaattacgatgtcaataagcttacagagctatttgaaaaattggaattttcaagcctcatctcagatttaaaagatgatagtcgtgatacaaaggatattaaagaatggcctgtaagagattttacatacgttaaaaatgttttaggaaagtttgatgttttgtcattgtatccattcatatatgatggaaagataaaagcagtatcatttgcttgcggtgacggatcgttttttgtagagattgatgattatgacaattttaaattgcttaataatgataagcttacgttgataggacacgatctgaaagattttttagtaaacatttcatactgcggtattgaacttaattgtaagattttagatacggccataatgacttatcttttaaatccgtctgagtcgaattacgacataagtcgcgtattgaaaaaatacttgaaagaggatttgcaaaacatagatgatatagtaggcaagggcaggaataaaaagagctacgatgacattgacaaaaagcttttagtcgattatatgtgttcagccgcatcaaacttatctaagttaaaagataagctcatgtcatttataaaagagatggagatggaagatcttttaaaaaatgtggaaattccgcttattgaagtgctaaaatctatggaggtgtacggctttacattagataaagatgtacttagaagtatttctaaagaaatagatgaaaagacagataagattgtaaaagatatttacgatgctgctggatacgaatttaatattaactctacaaagcagttatcagaatttttgtttgataaactgaatttgccagcaataaaaaagactaaaacagggtattcgactgacatggaagtccttgcagaacttataccgtacaatgacatagtaggagaaataatagaatatagacagcttatgaagcttaaatctacgtacatagatggcttcattcccatcatggatgaaaataatagggtccactctacgtttaaacaaacagttgctgctacagggagaattagctcaacagagcctaatctgcagaacatacctgtaagagaagaatttggcaggaggataagaaaggcatttgtatcaagttatgaagatgggcttataatatctgctgattattctcagattgagctaagggttcttgcacatctttcagaggatgaaaaacttattgagtcatttttgaacaacgaagatatacatttaaggacggcatcggaggtttttaaggtttcgaaagaagaagtgacaagtgaaatgagatatcgggcgaaagctgtcaactttggtattgtatatggtataagcgattacggcttatctaaagacttaaagatttcgcgaaaagaagcgaaagaatacatagacaattattttgacaggtacaagggcgtcaaaaattacatcgactcaattgtcaaatttgcaaaggaaaatgggtatgttacgactatcttaaataggagaagatacataccggaaatcaattcaaaaaattttaaccaaagatcttttggcgagagaatggcaatgaatacacctattcaaggtagcgctgcggatataataaagatgtcgatggttaaagtatacaatgaattaaaggaaagaggattgaaatcaagacttattcttcaggtgcacgatgagcttataattgacacacatcctgatgaagttgaaatagtcaaggagcttctaaaatcaataatggaaaatatcataaagttgaaagttcctttagttgtagatatagggcaagggaaaaactggtatgatgcaaaataaaaggatcc

SEQ ID NO: 1017 - DNA, 2792 bp, Artificial Sequence
  Description of Artificial Sequence: Synthetic Caldibacillus cellulovorans CompA.2 DNA Polymerase R820A
atgaaatacctgctgccgaccgctgctgctggtctgctgctcctcgctgcccagccggcgatggccatgggcaaactgattctggtcgacggaaacagcgtcgccaaccgggcgttttacgccgtccggctgctcagcacgcgcggcggcctgcacacaaacgcggtgtacggattcgccaacatgttgctcaagctgatcgaggaggaacggccgacgcattttctcgtcgcgttcgacgcgggcaaggcgacgttccgtcatcgcgaatacgaggcctacaaggcgggtcgcctgcagacgccgcccgagctgtccgagcagtttccgtacatccgggagctcgtccgggcgttcggcgtcgcgtccggcgagctggaggaatacgaggcggacgacatgatcggtacgctggcgaaacgggcggaggccgagggcgtcgacacgctggtcgtcaccggcgaccgcgatttgctccagctcgtatcggaccgcgtgaccgtcgcgctgacgcgcaagggcatcacggaaacggagcggtacgacccggcgcgcatccgcgaggaatacggcttcgatcccgaccgcatccgcgacctcaaagggctgatgggcgacgcgtctgacaatcttcccggcgttcccggcgtcggtgagaaaaccgcactgaaactgctcaggcagtacggttcgctggagagcgtcctggaacacgcgtcggaaatcgccggaaagctcggtgaaaatctgcgggcgcacgccgacgccgcccgattgagcaagcggctggcgacgatcgactgcgcggtaccgttgcagtcgggatgggactggctgcgcctcggcgaaccggaccgcgccgcgctcgcctcgctgttgcggcagctcgaattcaagtcgctgttgaaacggctcggactcgacggcacgtccgccgatgccgacgtcgacggcgtccgttcctccgcgcggccggcggacgagaaacggccgagggccgtcgccgtcgctgaggagggcgtcgacgtccgctgtccggatcgcccggaagaagtcgaagaagcgctgtcgcggctggaagccgcccagtcggtcgtcgtcgaggtgacgggcgacaacccgcacgacggcgaagtgcgcggcgtcgcatggtgggacggacatacggcgtatttcattccgtttgaacggctggtgcagtccgacatgcggccgctggccgactggctcgccgacgcgcgtcggccgaagcgtacgcacgactcccatcgcgctgaagtggcgctgttctggcacggccttgcgtttcgcggcacgtcgttctgcacgcatatcgccgcctatttgctcgaccccacggaatcgcgccatacgctggcggacctgtcgcgccgctacggtctgccgccggtaccggaagccgaggacgtttacggcaagggcgcgaagttcaaggttcccgatcgcgacacgctggcgcgttacgtcggccgcaaggccgccctagtcgcgcggctcgttccgctgctcgaggcggatttggcggcctgcggcatgcgttcgcttttttacgacctggagctgccgctttcatccgaactcgccgtcatggagacggtcggcgtccgcgtcgacgcggcggcgctcgccgcctacggcgaggaattgcgcgaggcggcggcgaaagtcgagcgggagatttacgagctggccgggacgacgttcaacatcggatcgacgaaacagctcggcgaaattttgttcgataagctggggctgcccgtcgtcaagaaaacgaaaaccggctattccaccgacgcagacgtgctggaggaactggcgccgtaccatccgatcgtcgaaaagattttgcattaccgccaactgacgaaattgcagtcgacctacatcgaggggcttttgaaagaaatccgtccgcaaaccggtaaaatccatacgtattatcagcagacgatcgcggcgacggggcggctgagcagtcagtttcccaatcttcagaacattccgatccgtctcgaagaggggcggaaaatccgcaaggcgttcgttccgtcagaaccgggatggctgatgctcgccgccgactattcgcagatcgaactgcgcgtgctcgcgcacgtttccggcgacgaacggctgaaggaagcgtttcggacaggcatggacatccacacgaagaccgcgatggacgtgttcggcgtttccgaagaccgcgtcgacgcgcgcatgcggcggcaggcgaaggcggtcaatttcggcatcatctacggcatcagcgatttcggactggcgcaaaacctgaacatttcccgcaaggaggcggcggagttcatccggcaatatttcgccgtcttttcgggcgtcaaggcgtaccgcgagcggatcgtcgagcaggcgcgccgcgacggttacgtgacgaccctgctcggtcgcagggcttatttgccggacatcaacgcgtcgaattacaacctccgctcgttcgcggagcggacggcgatgaatacgccgatccagggcacggccgccgacatcatcaagaccgcgatggtgcgtctgacgcggcggatgcgcgacgtcggactgaagagccgcatgctgctgcaggttcacgacgagctcgtgtttgaagtgccgccggacgagctcgacgcgatgcgggagcttgtgacggacgtcatggagtcggcggtcccgctcgacgtgccgctgaaggtcgacgtcagctggggcgccgactggtacgcggcgaagtgagggaagcgggatcc

SEQ ID NO: 1018 - DNA, 2792 bp, Artificial Sequence
  Description of Artificial Sequence: Synthetic Caldibacillus cellulovorans CompA.2 DNA Polymerase R820N
atgaaatacctgctgccgaccgctgctgctggtctgctgctcctcgctgcccagccggcgatggccatgggcaaactgattctggtcgacggaaacagcgtcgccaaccgggcgttttacgccgtccggctgctcagcacgcgcggcggcctgcacacaaacgcggtgtacggattcgccaacatgttgctcaagctgatcgaggaggaacggccgacgcattttctcgtcgcgttcgacgcgggcaaggcgacgttccgtcatcgcgaatacgaggcctacaaggcgggtcgcctgcagacgccgcccgagctgtccgagcagtttccgtacatccgggagctcgtccgggcgttcggcgtcgcgtccggcgagctggaggaatacgaggcggacgacatgatcggtacgctggcgaaacgggcggaggccgagggcgtcgacacgctggtcgtcaccggcgaccgcgatttgctccagctcgtatcggaccgcgtgaccgtcgcgctgacgcgcaagggcatcacggaaacggagcggtacgacccggcgcgcatccgcgaggaatacggcttcgatcccgaccgcatccgcgacctcaaagggctgatgggcgacgcgtctgacaatcttcccggcgttcccggcgtcggtgagaaaaccgcactgaaactgctcaggcagtacggttcgctggagagcgtcctggaacacgcgtcggaaatcgccggaaagctcggtgaaaatctgcgggcgcacgccgacgccgcccgattgagcaagcggctggcgacgatcgactgcgcggtaccgttgcagtcgggatgggactggctgcgcctcggcgaaccggaccgcgccgcgctcgcctcgctgttgcggcagctcgaattcaagtcgctgttgaaacggctcggactcgacggcacgtccgccgatgccgacgtcgacggcgtccgttcctccgcgcggccggcggacgagaaacggccgagggccgtcgccgtcgctgaggagggcgtcgacgtccgctgtccggatcgcccggaagaagtcgaagaagcgctgtcgcggctggaagccgcccagtcggtcgtcgtcgaggtgacgggcgacaacccgcacgacggcgaagtgcgcggcgtcgcatggtgggacggacatacggcgtatttcattccgtttgaacggctggtgcagtccgacatgcggccgctggccgactggctcgccgacgcgcgtcggccgaagcgtacgcacgactcccatcgcgctgaagtggcgctgttctggcacggccttgcgtttcgcggcacgtcgttctgcacgcatatcgccgcctatttgctcgaccccacggaatcgcgccatacgctggcggacctgtcgcgccgctacggtctgccgccggtaccggaagccgaggacgtttacggcaagggcgcgaagttcaaggttcccgatcgcgacacgctggcgcgttacgtcggccgcaaggccgccctagtcgcgcggctcgttccgctgctcgaggcggatttggcggcctgcggcatgcgttcgcttttttacgacctggagctgccgctttcatccgaactcgccgtcatggagacggtcggcgtccgcgtcgacgcggcggcgctcgccgcctacggcgaggaattgcgcgaggcggcggcgaaagtcgagcgggagatttacgagctggccgggacgacgttcaacatcggatcgacgaaacagctcggcgaaattttgttcgataagctggggctgcccgtcgtcaagaaaacgaaaaccggctattccaccgacgcagacgtgctggaggaactggcgccgtaccatccgatcgtcgaaaagattttgcattaccgccaactgacgaaattgcagtcgacctacatcgaggggcttttgaaagaaatccgtccgcaaaccggtaaaatccatacgtattatcagcagacgatcgcggcgacggggcggctgagcagtcagtttcccaatcttcagaacattccgatccgtctcgaagaggggcggaaaatccgcaaggcgttcgttccgtcagaaccgggatggctgatgctcgccgccgactattcgcagatcgaactgcgcgtgctcgcgcacgtttccggcgacgaacggctgaaggaagcgtttcggacaggcatggacatccacacgaagaccgcgatggacgtgttcggcgtttccgaagaccgcgtcgacgcgcgcatgcggcggcaggcgaaggcggtcaatttcggcatcatctacggcatcagcgatttcggactggcgcaaaacctgaacatttcccgcaaggaggcggcggagttcatccggcaatatttcgccgtcttttcgggcgtcaaggcgtaccgcgagcggatcgtcgagcaggcgcgccgcgacggttacgtgacgaccctgctcggtcgcaggaattatttgccggacatcaacgcgtcgaattacaacctccgctcgttcgcggagcggacggcgatgaatacgccgatccagggcacggccgccgacatcatcaagaccgcgatggtgcgtctgacgcggcggatgcgcgacgtcggactgaagagccgcatgctgctgcaggttcacgacgagctcgtgtttgaagtgccgccggacgagctcgacgcgatgcgggagcttgtgacggacgtcatggagtcggcggtcccgctcgacgtgccgctgaaggtcgacgtcagctggggcgccgactggtacgcggcgaagtgagggaagcgggatcc

SEQ ID NO: 1019 - DNA, 2792 bp, Artificial Sequence
  Description of Artificial Sequence: Synthetic Caldibacillus cellulovorans CompA.2 DNA Polymerase R820D
atgaaatacctgctgccgaccgctgctgctggtctgctgctcctcgctgcccagccggcgatggccatgggcaaactgattctggtcgacggaaacagcgtcgccaaccgggcgttttacgccgtccggctgctcagcacgcgcggcggcctgcacacaaacgcggtgtacggattcgccaacatgttgctcaagctgatcgaggaggaacggccgacgcattttctcgtcgcgttcgacgcgggcaaggcgacgttccgtcatcgcgaatacgaggcctacaaggcgggtcgcctgcagacgccgcccgagctgtccgagcagtttccgtacatccgggagctcgtccgggcgttcggcgtcgcgtccggcgagctggaggaatacgaggcggacgacatgatcggtacgctggcgaaacgggcggaggccgagggcgtcgacacgctggtcgtcaccggcgaccgcgatttgctccagctcgtatcggaccgcgtgaccgtcgcgctgacgcgcaagggcatcacggaaacggagcggtacgacccggcgcgcatccgcgaggaatacggcttcgatcccgaccgcatccgcgacctcaaagggctgatgggcgacgcgtctgacaatcttcccggcgttcccggcgtcggtgagaaaaccgcactgaaactgctcaggcagtacggttcgctggagagcgtcctggaacacgcgtcggaaatcgccggaaagctcggtgaaaatctgcgggcgcacgccgacgccgcccgattgagcaagcggctggcgacgatcgactgcgcggtaccgttgcagtcgggatgggactggctgcgcctcggcgaaccggaccgcgccgcgctcgcctcgctgttgcggcagctcgaattcaagtcgctgttgaaacggctcggactcgacggcacgtccgccgatgccgacgtcgacggcgtccgttcctccgcgcggccggcggacgagaaacggccgagggccgtcgccgtcgctgaggagggcgtcgacgtccgctgtccggatcgcccggaagaagtcgaagaagcgctgtcgcggctggaagccgcccagtcggtcgtcgtcgaggtgacgggcgacaacccgcacgacggcgaagtgcgcggcgtcgcatggtgggacggacatacggcgtatttcattccgtttgaacggctggtgcagtccgacatgcggccgctggccgactggctcgccgacgcgcgtcggccgaagcgtacgcacgactcccatcgcgctgaagtggcgctgttctggcacggccttgcgtttcgcggcacgtcgttctgcacgcatatcgccgcctatttgctcgaccccacggaatcgcgccatacgctggcggacctgtcgcgccgctacggtctgccgccggtaccggaagccgaggacgtttacggcaagggcgcgaagttcaaggttcccgatcgcgacacgctggcgcgttacgtcggccgcaaggccgccctagtcgcgcggctcgttccgctgctcgaggcggatttggcggcctgcggcatgcgttcgcttttttacgacctggagctgccgctttcatccgaactcgccgtcatggagacggtcggcgtccgcgtcgacgcggcggcgctcgccgcctacggcgaggaattgcgcgaggcggcggcgaaagtcgagcgggagatttacgagctggccgggacgacgttcaacatcggatcgacgaaacagctcggcgaaattttgttcgataagctggggctgcccgtcgtcaagaaaacgaaaaccggctattccaccgacgcagacgtgctggaggaactggcgccgtaccatccgatcgtcgaaaagattttgcattaccgccaactgacgaaattgcagtcgacctacatcgaggggcttttgaaagaaatccgtccgcaaaccggtaaaatccatacgtattatcagcagacgatcgcggcgacggggcggctgagcagtcagtttcccaatcttcagaacattccgatccgtctcgaagaggggcggaaaatccgcaaggcgttcgttccgtcagaaccgggatggctgatgctcgccgccgactattcgcagatcgaactgcgcgtgctcgcgcacgtttccggcgacgaacggctgaaggaagcgtttcggacaggcatggacatccacacgaagaccgcgatggacgtgttcggcgtttccgaagaccgcgtcgacgcgcgcatgcggcggcaggcgaaggcggtcaatttcggcatcatctacggcatcagcgatttcggactggcgcaaaacctgaacatttcccgcaaggaggcggcggagttcatccggcaatatttcgccgtcttttcgggcgtcaaggcgtaccgcgagcggatcgtcgagcaggcgcgccgcgacggttacgtgacgaccctgctcggtcgcagggattatttgccggacatcaacgcgtcgaattacaacctccgctcgttcgcggagcggacggcgatgaatacgccgatccagggcacggccgccgacatcatcaagaccgcgatggtgcgtctgacgcggcggatgcgcgacgtcggactgaagagccgcatgctgctgcaggttcacgacgagctcgtgtttgaagtgccgccggacgagctcgacgcgatgcgggagcttgtgacggacgtcatggagtcggcggtcccgctcgacgtgccgctgaaggtcgacgtcagctggggcgccgactggtacgcggcgaagtgagggaagcgggatcc

SEQ ID NO: 1020 - DNA, 2792 bp, Artificial Sequence
  Description of Artificial Sequence: Synthetic Caldibacillus cellulovorans CompA.2 DNA Polymerase R820C
atgaaatacctgctgccgaccgctgctgctggtctgctgctcctcgctgcccagccggcgatggccatgggcaaactgattctggtcgacggaaacagcgtcgccaaccgggcgttttacgccgtccggctgctcagcacgcgcggcggcctgcacacaaacgcggtgtacggattcgccaacatgttgctcaagctgatcgaggaggaacggccgacgcattttctcgtcgcgttcgacgcgggcaaggcgacgttccgtcatcgcgaatacgaggcctacaaggcgggtcgcctgcagacgccgcccgagctgtccgagcagtttccgtacatccgggagctcgtccgggcgttcggcgtcgcgtccggcgagctggaggaatacgaggcggacgacatgatcggtacgctggcgaaacgggcggaggccgagggcgtcgacacgctggtcgtcaccggcgaccgcgatttgctccagctcgtatcggaccgcgtgaccgtcgcgctgacgcgcaagggcatcacggaaacggagcggtacgacccggcgcgcatccgcgaggaatacggcttcgatcccgaccgcatccgcgacctcaaagggctgatgggcgacgcgtctgacaatcttcccggcgttcccggcgtcggtgagaaaaccgcactgaaactgctcaggcagtacggttcgctggagagcgtcctggaacacgcgtcggaaatcgccggaaagctcggtgaaaatctgcgggcgcacgccgacgccgcccgattgagcaagcggctggcgacgatcgactgcgcggtaccgttgcagtcgggatgggactggctgcgcctcggcgaaccggaccgcgccgcgctcgcctcgctgttgcggcagctcgaattcaagtcgctgttgaaacggctcggactcgacggcacgtccgccgatgccgacgtcgacggcgtccgttcctccgcgcggccggcggacgagaaacggccgagggccgtcgccgtcgctgaggagggcgtcgacgtccgctgtccggatcgcccggaagaagtcgaagaagcgctgtcgcggctggaagccgcccagtcggtcgtcgtcgaggtgacgggcgacaacccgcacgacggcgaagtgcgcggcgtcgcatggtgggacggacatacggcgtatttcattccgtttgaacggctggtgcagtccgacatgcggccgctggccgactggctcgccgacgcgcgtcggccgaagcgtacgcacgactcccatcgcgctgaagtggcgctgttctggcacggccttgcgtttcgcggcacgtcgttctgcacgcatatcgccgcctatttgctcgaccccacggaatcgcgccatacgctggcggacctgtcgcgccgctacggtctgccgccggtaccggaagccgaggacgtttacggcaagggcgcgaagttcaaggttcccgatcgcgacacgctggcgcgttacgtcggccgcaaggccgccctagtcgcgcggctcgttccgctgctcgaggcggatttggcggcctgcggcatgcgttcgcttttttacgacctggagctgccgctttcatccgaactcgccgtcatggagacggtcggcgtccgcgtcgacgcggcggcgctcgccgcctacggcgaggaattgcgcgaggcggcggcgaaagtcgagcgggagatttacgagctggccgggacgacgttcaacatcggatcgacgaaacagctcggcgaaattttgttcgataagctggggctgcccgtcgtcaagaaaacgaaaaccggctattccaccgacgcagacgtgctggaggaactggcgccgtaccatccgatcgtcgaaaagattttgcattaccgccaactgacgaaattgcagtcgacctacatcgaggggcttttgaaagaaatccgtccgcaaaccggtaaaatccatacgtattatcagcagacgatcgcggcgacggggcggctgagcagtcagtttcccaatcttcagaacattccgatccgtctcgaagaggggcggaaaatccgcaaggcgttcgttccgtcagaaccgggatggctgatgctcgccgccgactattcgcagatcgaactgcgcgtgctcgcgcacgtttccggcgacgaacggctgaaggaagcgtttcggacaggcatggacatccacacgaagaccgcgatggacgtgttcggcgtttccgaagaccgcgtcgacgcgcgcatgcggcggcaggcgaaggcggtcaatttcggcatcatctacggcatcagcgatttcggactggcgcaaaacctgaacatttcccgcaaggaggcggcggagttcatccggcaatatttcgccgtcttttcgggcgtcaaggcgtaccgcgagcggatcgtcgagcaggcgcgccgcgacggttacgtgacgaccctgctcggtcgcaggtgttatttgccggacatcaacgcgtcgaattacaacctccgctcgttcgcggagcggacggcgatgaatacgccgatccagggcacggccgccgacatcatcaagaccgcgatggtgcgtctgacgcggcggatgcgcgacgtcggactgaagagccgcatgctgctgcaggttcacgacgagctcgtgtttgaagtgccgccggacgagctcgacgcgatgcgggagcttgtgacggacgtcatggagtcggcggtcccgctcgacgtgccgctgaaggtcgacgtcagctggggcgccgactggtacgcggcgaagtgagggaagcgggatcc

SEQ ID NO: 1021 - DNA, 2792 bp, Artificial Sequence
  Description of Artificial Sequence: Synthetic Caldibacillus cellulovorans CompA.2 DNA Polymerase R820E
atgaaatacctgctgccgaccgctgctgctggtctgctgctcctcgctgcccagccggcgatggccatgggcaaactgattctggtcgacggaaacagcgtcgccaaccgggcgttttacgccgtccggctgctcagcacgcgcggcggcctgcacacaaacgcggtgtacggattcgccaacatgttgctcaagctgatcgaggaggaacggccgacgcattttctcgtcgcgttcgacgcgggcaaggcgacgttccgtcatcgcgaatacgaggcctacaaggcgggtcgcctgcagacgccgcccgagctgtccgagcagtttccgtacatccgggagctcgtccgggcgttcggcgtcgcgtccggcgagctggaggaatacgaggcggacgacatgatcggtacgctggcgaaacgggcggaggccgagggcgtcgacacgctggtcgtcaccggcgaccgcgatttgctccagctcgtatcggaccgcgtgaccgtcgcgctgacgcgcaagggcatcacggaaacggagcggtacgacccggcgcgcatccgcgaggaatacggcttcgatcccgaccgcatccgcgacctcaaagggctgatgggcgacgcgtctgacaatcttcccggcgttcccggcgtcggtgagaaaaccgcactgaaactgctcaggcagtacggttcgctggagagcgtcctggaacacgcgtcggaaatcgccggaaagctcggtgaaaatctgcgggcgcacgccgacgccgcccgattgagcaagcggctggcgacgatcgactgcgcggtaccgttgcagtcgggatgggactggctgcgcctcggcgaaccggaccgcgccgcgctcgcctcgctgttgcggcagctcgaattcaagtcgctgttgaaacggctcggactcgacggcacgtccgccgatgccgacgtcgacggcgtccgttcctccgcgcggccggcggacgagaaacggccgagggccgtcgccgtcgctgaggagggcgtcgacgtccgctgtccggatcgcccggaagaagtcgaagaagcgctgtcgcggctggaagccgcccagtcggtcgtcgtcgaggtgacgggcgacaacccgcacgacggcgaagtgcgcggcgtcgcatggtgggacggacatacggcgtatttcattccgtttgaacggctggtgcagtccgacatgcggccgctggccgactggctcgccgacgcgcgtcggccgaagcgtacgcacgactcccatcgcgctgaagtggcgctgttctggcacggccttgcgtttcgcggcacgtcgttctgcacgcatatcgccgcctatttgctcgaccccacggaatcgcgccatacgctggcggacctgtcgcgccgctacggtctgccgccggtaccggaagccgaggacgtttacggcaagggcgcgaagttcaaggttcccgatcgcgacacgctggcgcgttacgtcggccgcaaggccgccctagtcgcgcggctcgttccgctgctcgaggcggatttggcggcctgcggcatgcgttcgcttttttacgacctggagctgccgctttcatccgaactcgccgtcatggagacggtcggcgtccgcgtcgacgcggcggcgctcgccgcctacggcgaggaattgcgcgaggcggcggcgaaagtcgagcgggagatttacgagctggccgggacgacgttcaacatcggatcgacgaaacagctcggcgaaattttgttcgataagctggggctgcccgtcgtcaagaaaacgaaaaccggctattccaccgacgcagacgtgctggaggaactggcgccgtaccatccgatcgtcgaaaagattttgcattaccgccaactgacgaaattgcagtcgacctacatcgaggggcttttgaaagaaatccgtccgcaaaccggtaaaatccatacgtattatcagcagacgatcgcggcgacggggcggctgagcagtcagtttcccaatcttcagaacattccgatccgtctcgaagaggggcggaaaatccgcaaggcgttcgttccgtcagaaccgggatggctgatgctcgccgccgactattcgcagatcgaactgcgcgtgctcgcgcacgtttccggcgacgaacggctgaaggaagcgtttcggacaggcatggacatccacacgaagaccgcgatggacgtgttcggcgtttccgaagaccgcgtcgacgcgcgcatgcggcggcaggcgaaggcggtcaatttcggcatcatctacggcatcagcgatttcggactggcgcaaaacctgaacatttcccgcaaggaggcggcggagttcatccggcaatatttcgccgtcttttcgggcgtcaaggcgtaccgcgagcggatcgtcgagcaggcgcgccgcgacggttacgtgacgaccctgctcggtcgcagggaatatttgccggacatcaacgcgtcgaattacaacctccgctcgttcgcggagcggacggcgatgaatacgccgatccagggcacggccgccgacatcatcaagaccgcgatggtgcgtctgacgcggcggatgcgcgacgtcggactgaagagccgcatgctgctgcaggttcacgacgagctcgtgtttgaagtgccgccggacgagctcgacgcgatgcgggagcttgtgacggacgtcatggagtcggcggtcccgctcgacgtgccgctgaaggtcgacgtcagctggggcgccgactggtacgcggcgaagtgagggaagcgggatcc

SEQ ID NO: 1022 - DNA, 2792 bp, Artificial Sequence
  Description of Artificial Sequence: Synthetic Caldibacillus cellulovorans CompA.2 DNA Polymerase R820Q
atgaaatacctgctgccgaccgctgctgctggtctgctgctcctcgctgcccagccggcgatggccatgggcaaactgattctggtcgacggaaacagcgtcgccaaccgggcgttttacgccgtccggctgctcagcacgcgcggcggcctgcacacaaacgcggtgtacggattcgccaacatgttgctcaagctgatcgaggaggaacggccgacgcattttctcgtcgcgttcgacgcgggcaaggcgacgttccgtcatcgcgaatacgaggcctacaaggcgggtcgcctgcagacgccgcccgagctgtccgagcagtttccgtacatccgggagctcgtccgggcgttcggcgtcgcgtccggcgagctggaggaatacgaggcggacgacatgatcggtacgctggcgaaacgggcggaggccgagggcgtcgacacgctggtcgtcaccggcgaccgcgatttgctccagctcgtatcggaccgcgtgaccgtcgcgctgacgcgcaagggcatcacggaaacggagcggtacgacccggcgcgcatccgcgaggaatacggcttcgatcccgaccgcatccgcgacctcaaagggctgatgggcgacgcgtctgacaatcttcccggcgttcccggcgtcggtgagaaaaccgcactgaaactgctcaggcagtacggttcgctggagagcgtcctggaacacgcgtcggaaatcgccggaaagctcggtgaaaatctgcgggcgcacgccgacgccgcccgattgagcaagcggctggcgacgatcgactgcgcggtaccgttgcagtcgggatgggactggctgcgcctcggcgaaccggaccgcgccgcgctcgcctcgctgttgcggcagctcgaattcaagtcgctgttgaaacggctcggactcgacggcacgtccgccgatgccgacgtcgacggcgtccgttcctccgcgcggccggcggacgagaaacggccgagggccgtcgccgtcgctgaggagggcgtcgacgtccgctgtccggatcgcccggaagaagtcgaagaagcgctgtcgcggctggaagccgcccagtcggtcgtcgtcgaggtgacgggcgacaacccgcacgacggcgaagtgcgcggcgtcgcatggtgggacggacatacggcgtatttcattccgtttgaacggctggtgcagtccgacatgcggccgctggccgactggctcgccgacgcgcgtcggccgaagcgtacgcacgactcccatcgcgctgaagtggcgctgttctggcacggccttgcgtttcgcggcacgtcgttctgcacgcatatcgccgcctatttgctcgaccccacggaatcgcgccatacgctggcggacctgtcgcgccgctacggtctgccgccggtaccggaagccgaggacgtttacggcaagggcgcgaagttcaaggttcccgatcgcgacacgctggcgcgttacgtcggccgcaaggccgccctagtcgcgcggctcgttccgctgctcgaggcggatttggcggcctgcggcatgcgttcgcttttttacgacctggagctgccgctttcatccgaactcgccgtcatggagacggtcggcgtccgcgtcgacgcggcggcgctcgccgcctacggcgaggaattgcgcgaggcggcggcgaaagtcgagcgggagatttacgagctggccgggacgacgttcaacatcggatcgacgaaacagctcggcgaaattttgttcgataagctggggctgcccgtcgtcaagaaaacgaaaaccggctattccaccgacgcagacgtgctggaggaactggcgccgtaccatccgatcgtcgaaaagattttgcattaccgccaactgacgaaattgcagtcgacctacatcgaggggcttttgaaagaaatccgtccgcaaaccggtaaaatccatacgtattatcagcagacgatcgcggcgacggggcggctgagcagtcagtttcccaatcttcagaacattccgatccgtctcgaagaggggcggaaaatccgcaaggcgttcgttccgtcagaaccgggatggctgatgctcgccgccgactattcgcagatcgaactgcgcgtgctcgcgcacgtttccggcgacgaacggctgaaggaagcgtttcggacaggcatggacatccacacgaagaccgcgatggacgtgttcggcgtttccgaagaccgcgtcgacgcgcgcatgcggcggcaggcgaaggcggtcaatttcggcatcatctacggcatcagcgatttcggactggcgcaaaacctgaacatttcccgcaaggaggcggcggagttcatccggcaatatttcgccgtcttttcgggcgtcaaggcgtaccgcgagcggatcgtcgagcaggcgcgccgcgacggttacgtgacgaccctgctcggtcgcaggcaatatttgccggacatcaacgcgtcgaattacaacctccgctcgttcgcggagcggacggcgatgaatacgccgatccagggcacggccgccgacatcatcaagaccgcgatggtgcgtctgacgcggcggatgcgcgacgtcggactgaagagccgcatgctgctgcaggttcacgacgagctcgtgtttgaagtgccgccggacgagctcgacgcgatgcgggagcttgtgacggacgtcatggagtcggcggtcccgctcgacgtgccgctgaaggtcgacgtcagctggggcgccgactggtacgcggcgaagtgagggaagcgggatcc

SEQ ID NO: 1023 - DNA, 2792 bp, Artificial Sequence
  Description of Artificial Sequence: Synthetic Caldibacillus cellulovorans CompA.2 DNA Polymerase R820G
atgaaatacctgctgccgaccgctgctgctggtctgctgctcctcgctgcccagccggcgatggccatgggcaaactgattctggtcgacggaaacagcgtcgccaaccgggcgttttacgccgtccggctgctcagcacgcgcggcggcctgcacacaaacgcggtgtacggattcgccaacatgttgctcaagctgatcgaggaggaacggccgacgcattttctcgtcgcgttcgacgcgggcaaggcgacgttccgtcatcgcgaatacgaggcctacaaggcgggtcgcctgcagacgccgcccgagctgtccgagcagtttccgtacatccgggagctcgtccgggcgttcggcgtcgcgtccggcgagctggaggaatacgaggcggacgacatgatcggtacgctggcgaaacgggcggaggccgagggcgtcgacacgctggtcgtcaccggcgaccgcgatttgctccagctcgtatcggaccgcgtgaccgtcgcgctgacgcgcaagggcatcacggaaacggagcggtacgacccggcgcgcatccgcgaggaatacggcttcgatcccgaccgcatccgcgacctcaaagggctgatgggcgacgcgtctgacaatcttcccggcgttcccggcgtcggtgagaaaaccgcactgaaactgctcaggcagtacggttcgctggagagcgtcctggaacacgcgtcggaaatcgccggaaagctcggtgaaaatctgcgggcgcacgccgacgccgcccgattgagcaagcggctggcgacgatcgactgcgcggtaccgttgcagtcgggatgggactggctgcgcctcggcgaaccggaccgcgccgcgctcgcctcgctgttgcggcagctcgaattcaagtcgctgttgaaacggctcggactcgacggcacgtccgccgatgccgacgtcgacggcgtccgttcctccgcgcggccggcggacgagaaacggccgagggccgtcgccgtcgctgaggagggcgtcgacgtccgctgtccggatcgcccggaagaagtcgaagaagcgctgtcgcggctggaagccgcccagtcggtcgtcgtcgaggtgacgggcgacaacccgcacgacggcgaagtgcgcggcgtcgcatggtgggacggacatacggcgtatttcattccgtttgaacggctggtgcagtccgacatgcggccgctggccgactggctcgccgacgcgcgtcggccgaagcgtacgcacgactcccatcgcgctgaagtggcgctgttctggcacggccttgcgtttcgcggcacgtcgttctgcacgcatatcgccgcctatttgctcgaccccacggaatcgcgccatacgctggcggacctgtcgcgccgctacggtctgccgccggtaccggaagccgaggacgtttacggcaagggcgcgaagttcaaggttcccgatcgcgacacgctggcgcgttacgtcggccgcaaggccgccctagtcgcgcggctcgttccgctgctcgaggcggatttggcggcctgcggcatgcgttcgcttttttacgacctggagctgccgctttcatccgaactcgccgtcatggagacggtcggcgtccgcgtcgacgcggcggcgctcgccgcctacggcgaggaattgcgcgaggcggcggcgaaagtcgagcgggagatttacgagctggccgggacgacgttcaacatcggatcgacgaaacagctcggcgaaattttgttcgataagctggggctgcccgtcgtcaagaaaacgaaaaccggctattccaccgacgcagacgtgctggaggaactggcgccgtaccatccgatcgtcgaaaagattttgcattaccgccaactgacgaaattgcagtcgacctacatcgaggggcttttgaaagaaatccgtccgcaaaccggtaaaatccatacgtattatcagcagacgatcgcggcgacggggcggctgagcagtcagtttcccaatcttcagaacattccgatccgtctcgaagaggggcggaaaatccgcaaggcgttcgttccgtcagaaccgggatggctgatgctcgccgccgactattcgcagatcgaactgcgcgtgctcgcgcacgtttccggcgacgaacggctgaaggaagcgtttcggacaggcatggacatccacacgaagaccgcgatggacgtgttcggcgtttccgaagaccgcgtcgacgcgcgcatgcggcggcaggcgaaggcggtcaatttcggcatcatctacggcatcagcgatttcggactggcgcaaaacctgaacatttcccgcaaggaggcggcggagttcatccggcaatatttcgccgtcttttcgggcgtcaaggcgtaccgcgagcggatcgtcgagcaggcgcgccgcgacggttacgtgacgaccctgctcggtcgcaggggttatttgccggacatcaacgcgtcgaattacaacctccgctcgttcgcggagcggacggcgatgaatacgccgatccagggcacggccgccgacatcatcaagaccgcgatggtgcgtctgacgcggcggatgcgcgacgtcggactgaagagccgcatgctgctgcaggttcacgacgagctcgtgtttgaagtgccgccggacgagctcgacgcgatgcgggagcttgtgacggacgtcatggagtcggcggtcccgctcgacgtgccgctgaaggtcgacgtcagctggggcgccgactggtacgcggcgaagtgagggaagcgggatcc

SEQ ID NO: 1024 - DNA, 2792 bp, Artificial Sequence
  Description of Artificial Sequence: Synthetic Caldibacillus cellulovorans CompA.2 DNA Polymerase R820H
atgaaatacctgctgccgaccgctgctgctggtctgctgctcctcgctgcccagccggcgatggccatgggcaaactgattctggtcgacggaaacagcgtcgccaaccgggcgttttacgccgtccggctgctcagcacgcgcggcggcctgcacacaaacgcggtgtacggattcgccaacatgttgctcaagctgatcgaggaggaacggccgacgcattttctcgtcgcgttcgacgcgggcaaggcgacgttccgtcatcgcgaatacgaggcctacaaggcgggtcgcctgcagacgccgcccgagctgtccgagcagtttccgtacatccgggagctcgtccgggcgttcggcgtcgcgtccggcgagctggaggaatacgaggcggacgacatgatcggtacgctggcgaaacgggcggaggccgagggcgtcgacacgctggtcgtcaccggcgaccgcgatttgctccagctcgtatcggaccgcgtgaccgtcgcgctgacgcgcaagggcatcacggaaacggagcggtacgacccggcgcgcatccgcgaggaatacggcttcgatcccgaccgcatccgcgacctcaaagggctgatgggcgacgcgtctgacaatcttcccggcgttcccggcgtcggtgagaaaaccgcactgaaactgctcaggcagtacggttcgctggagagcgtcctggaacacgcgtcggaaatcgccggaaagctcggtgaaaatctgcgggcgcacgccgacgccgcccgattgagcaagcggctggcgacgatcgactgcgcggtaccgttgcagtcgggatgggactggctgcgcctcggcgaaccggaccgcgccgcgctcgcctcgctgttgcggcagctcgaattcaagtcgctgttgaaacggctcggactcgacggcacgtccgccgatgccgacgtcgacggcgtccgttcctccgcgcggccggcggacgagaaacggccgagggccgtcgccgtcgctgaggagggcgtcgacgtccgctgtccggatcgcccggaagaagtcgaagaagcgctgtcgcggctggaagccgcccagtcggtcgtcgtcgaggtgacgggcgacaacccgcacgacggcgaagtgcgcggcgtcgcatggtgggacggacatacggcgtatttcattccgtttgaacggctggtgcagtccgacatgcggccgctggccgactggctcgccgacgcgcgtcggccgaagcgtacgcacgactcccatcgcgctgaagtggcgctgttctggcacggccttgcgtttcgcggcacgtcgttctgcacgcatatcgccgcctatttgctcgaccccacggaatcgcgccatacgctggcggacctgtcgcgccgctacggtctgccgccggtaccggaagccgaggacgtttacggcaagggcgcgaagttcaaggttcccgatcgcgacacgctggcgcgttacgtcggccgcaaggccgccctagtcgcgcggctcgttccgctgctcgaggcggatttggcggcctgcggcatgcgttcgcttttttacgacctggagctgccgctttcatccgaactcgccgtcatggagacggtcggcgtccgcgtcgacgcggcggcgctcgccgcctacggcgaggaattgcgcgaggcggcggcgaaagtcgagcgggagatttacgagctggccgggacgacgttcaacatcggatcgacgaaacagctcggcgaaattttgttcgataagctggggctgcccgtcgtcaagaaaacgaaaaccggctattccaccgacgcagacgtgctggaggaactggcgccgtaccatccgatcgtcgaaaagattttgcattaccgccaactgacgaaattgcagtcgacctacatcgaggggcttttgaaagaaatccgtccgcaaaccggtaaaatccatacgtattatcagcagacgatcgcggcgacggggcggctgagcagtcagtttcccaatcttcagaacattccgatccgtctcgaagaggggcggaaaatccgcaaggcgttcgttccgtcagaaccgggatggctgatgctcgccgccgactattcgcagatcgaactgcgcgtgctcgcgcacgtttccggcgacgaacggctgaaggaagcgtttcggacaggcatggacatccacacgaagaccgcgatggacgtgttcggcgtttccgaagaccgcgtcgacgcgcgcatgcggcggcaggcgaaggcggtcaatttcggcatcatctacggcatcagcgatttcggactggcgcaaaacctgaacatttcccgcaaggaggcggcggagttcatccggcaatatttcgccgtcttttcgggcgtcaaggcgtaccgcgagcggatcgtcgagcaggcgcgccgcgacggttacgtgacgaccctgctcggtcgcaggcattatttgccggacatcaacgcgtcgaattacaacctccgctcgttcgcggagcggacggcgatgaatacgccgatccagggcacggccgccgacatcatcaagaccgcgatggtgcgtctgacgcggcggatgcgcgacgtcggactgaagagccgcatgctgctgcaggttcacgacgagctcgtgtttgaagtgccgccggacgagctcgacgcgatgcgggagcttgtgacggacgtcatggagtcggcggtcccgctcgacgtgccgctgaaggtcgacgtcagctggggcgccgactggtacgcggcgaagtgagggaagcgggatcc

SEQ ID NO: 1025 - DNA, 2792 bp, Artificial Sequence
  Description of Artificial Sequence: Synthetic Caldibacillus cellulovorans CompA.2 DNA Polymerase R820I
atgaaatacctgctgccgaccgctgctgctggtctgctgctcctcgctgcccagccggcgatggccatgggcaaactgattctggtcgacggaaacagcgtcgccaaccgggcgttttacgccgtccggctgctcagcacgcgcggcggcctgcacacaaacgcggtgtacggattcgccaacatgttgctcaagctgatcgaggaggaacggccgacgcattttctcgtcgcgttcgacgcgggcaaggcgacgttccgtcatcgcgaatacgaggcctacaaggcgggtcgcctgcagacgccgcccgagctgtccgagcagtttccgtacatccgggagctcgtccgggcgttcggcgtcgcgtccggcgagctggaggaatacgaggcggacgacatgatcggtacgctggcgaaacgggcggaggccgagggcgtcgacacgctggtcgtcaccggcgaccgcgatttgctccagctcgtatcggaccgcgtgaccgtcgcgctgacgcgcaagggcatcacggaaacggagcggtacgacccggcgcgcatccgcgaggaatacggcttcgatcccgaccgcatccgcgacctcaaagggctgatgggcgacgcgtctgacaatcttcccggcgttcccggcgtcggtgagaaaaccgcactgaaactgctcaggcagtacggttcgctggagagcgtcctggaacacgcgtcggaaatcgccggaaagctcggtgaaaatctgcgggcgcacgccgacgccgcccgattgagcaagcggctggcgacgatcgactgcgcggtaccgttgcagtcgggatgggactggctgcgcctcggcgaaccggaccgcgccgcgctcgcctcgctgttgcggcagctcgaattcaagtcgctgttgaaacggctcggactcgacggcacgtccgccgatgccgacgtcgacggcgtccgttcctccgcgcggccggcggacgagaaacggccgagggccgtcgccgtcgctgaggagggcgtcgacgtccgctgtccggatcgcccggaagaagtcgaagaagcgctgtcgcggctggaagccgcccagtcggtcgtcgtcgaggtgacgggcgacaacccgcacgacggcgaagtgcgcggcgtcgcatggtgggacggacatacggcgtatttcattccgtttgaacggctggtgcagtccgacatgcggccgctggccgactggctcgccgacgcgcgtcggccgaagcgtacgcacgactcccatcgcgctgaagtggcgctgttctggcacggccttgcgtttcgcggcacgtcgttctgcacgcatatcgccgcctatttgctcgaccccacggaatcgcgccatacgctggcggacctgtcgcgccgctacggtctgccgccggtaccggaagccgaggacgtttacggcaagggcgcgaagttcaaggttcccgatcgcgacacgctggcgcgttacgtcggccgcaaggccgccctagtcgcgcggctcgttccgctgctcgaggcggatttggcggcctgcggcatgcgttcgcttttttacgacctggagctgccgctttcatccgaactcgccgtcatggagacggtcggcgtccgcgtcgacgcggcggcgctcgccgcctacggcgaggaattgcgcgaggcggcggcgaaagtcgagcgggagatttacgagctggccgggacgacgttcaacatcggatcgacgaaacagctcggcgaaattttgttcgataagctggggctgcccgtcgtcaagaaaacgaaaaccggctattccaccgacgcagacgtgctggaggaactggcgccgtaccatccgatcgtcgaaaagattttgcattaccgccaactgacgaaattgcagtcgacctacatcgaggggcttttgaaagaaatccgtccgcaaaccggtaaaatccatacgtattatcagcagacgatcgcggcgacggggcggctgagcagtcagtttcccaatcttcagaacattccgatccgtctcgaagaggggcggaaaatccgcaaggcgttcgttccgtcagaaccgggatggctgatgctcgccgccgactattcgcagatcgaactgcgcgtgctcgcgcacgtttccggcgacgaacggctgaaggaagcgtttcggacaggcatggacatccacacgaagaccgcgatggacgtgttcggcgtttccgaagaccgcgtcgacgcgcgcatgcggcggcaggcgaaggcggtcaatttcggcatcatctacggcatcagcgatttcggactggcgcaaaacctgaacatttcccgcaaggaggcggcggagttcatccggcaatatttcgccgtcttttcgggcgtcaaggcgtaccgcgagcggatcgtcgagcaggcgcgccgcgacggttacgtgacgaccctgctcggtcgcaggatttatttgccggacatcaacgcgtcgaattacaacctccgctcgttcgcggagcggacggcgatgaatacgccgatccagggcacggccgccgacatcatcaagaccgcgatggtgcgtctgacgcggcggatgcgcgacgtcggactgaagagccgcatgctgctgcaggttcacgacgagctcgtgtttgaagtgccgccggacgagctcgacgcgatgcgggagcttgtgacggacgtcatggagtcggcggtcccgctcgacgtgccgctgaaggtcgacgtcagctggggcgccgactggtacgcggcgaagtgagggaagcgggatcc

SEQ ID NO: 1026 - DNA, 2792 bp, Artificial Sequence
  Description of Artificial Sequence: Synthetic Caldibacillus cellulovorans CompA.2 DNA Polymerase R820L
atgaaatacctgctgccgaccgctgctgctggtctgctgctcctcgctgcccagccggcgatggccatgggcaaactgattctggtcgacggaaacagcgtcgccaaccgggcgttttacgccgtccggctgctcagcacgcgcggcggcctgcacacaaacgcggtgtacggattcgccaacatgttgctcaagctgatcgaggaggaacggccgacgcattttctcgtcgcgttcgacgcgggcaaggcgacgttccgtcatcgcgaatacgaggcctacaaggcgggtcgcctgcagacgccgcccgagctgtccgagcagtttccgtacatccgggagctcgtccgggcgttcggcgtcgcgtccggcgagctggaggaatacgaggcggacgacatgatcggtacgctggcgaaacgggcggaggccgagggcgtcgacacgctggtcgtcaccggcgaccgcgatttgctccagctcgtatcggaccgcgtgaccgtcgcgctgacgcgcaagggcatcacggaaacggagcggtacgacccggcgcgcatccgcgaggaatacggcttcgatcccgaccgcatccgcgacctcaaagggctgatgggcgacgcgtctgacaatcttcccggcgttcccggcgtcggtgagaaaaccgcactgaaactgctcaggcagtacggttcgctggagagcgtcctggaacacgcgtcggaaatcgccggaaagctcggtgaaaatctgcgggcgcacgccgacgccgcccgattgagcaagcggctggcgacgatcgactgcgcggtaccgttgcagtcgggatgggactggctgcgcctcggcgaaccggaccgcgccgcgctcgcctcgctgttgcggcagctcgaattcaagtcgctgttgaaacggctcggactcgacggcacgtccgccgatgccgacgtcgacggcgtccgttcctccgcgcggccggcggacgagaaacggccgagggccgtcgccgtcgctgaggagggcgtcgacgtccgctgtccggatcgcccggaagaagtcgaagaagcgctgtcgcggctggaagccgcccagtcggtcgtcgtcgaggtgacgggcgacaacccgcacgacggcgaagtgcgcggcgtcgcatggtgggacggacatacggcgtatttcattccgtttgaacggctggtgcagtccgacatgcggccgctggccgactggctcgccgacgcgcgtcggccgaagcgtacgcacgactcccatcgcgctgaagtggcgctgttctggcacggccttgcgtttcgcggcacgtcgttctgcacgcatatcgccgcctatttgctcgaccccacggaatcgcgccatacgctggcggacctgtcgcgccgctacggtctgccgccggtaccggaagccgaggacgtttacggcaagggcgcgaagttcaaggttcccgatcgcgacacgctggcgcgttacgtcggccgcaaggccgccctagtcgcgcggctcgttccgctgctcgaggcggatttggcggcctgcggcatgcgttcgcttttttacgacctggagctgccgctttcatccgaactcgccgtcatggagacggtcggcgtccgcgtcgacgcggcggcgctcgccgcctacggcgaggaattgcgcgaggcggcggcgaaagtcgagcgggagatttacgagctggccgggacgacgttcaacatcggatcgacgaaacagctcggcgaaattttgttcgataagctggggctgcccgtcgtcaagaaaacgaaaaccggctattccaccgacgcagacgtgctggaggaactggcgccgtaccatccgatcgtcgaaaagattttgcattaccgccaactgacgaaattgcagtcgacctacatcgaggggcttttgaaagaaatccgtccgcaaaccggtaaaatccatacgtattatcagcagacgatcgcggcgacggggcggctgagcagtcagtttcccaatcttcagaacattccgatccgtctcgaagaggggcggaaaatccgcaaggcgttcgttccgtcagaaccgggatggctgatgctcgccgccgactattcgcagatcgaactgcgcgtgctcgcgcacgtttccggcgacgaacggctgaaggaagcgtttcggacaggcatggacatccacacgaagaccgcgatggacgtgttcggcgtttccgaagaccgcgtcgacgcgcgcatgcggcggcaggcgaaggcggtcaatttcggcatcatctacggcatcagcgatttcggactggcgcaaaacctgaacatttcccgcaaggaggcggcggagttcatccggcaatatttcgccgtcttttcgggcgtcaaggcgtaccgcgagcggatcgtcgagcaggcgcgccgcgacggttacgtgacgaccctgctcggtcgcaggctttatttgccggacatcaacgcgtcgaattacaacctccgctcgttcgcggagcggacggcgatgaatacgccgatccagggcacggccgccgacatcatcaagaccgcgatggtgcgtctgacgcggcggatgcgcgacgtcggactgaagagccgcatgctgctgcaggttcacgacgagctcgtgtttgaagtgccgccggacgagctcgacgcgatgcgggagcttgtgacggacgtcatggagtcggcggtcccgctcgacgtgccgctgaaggtcgacgtcagctggggcgccgactggtacgcggcgaagtgagggaagcgggatcc

SEQ ID NO: 1027 - DNA, 2792 bp, Artificial Sequence
  Description of Artificial Sequence: Synthetic Caldibacillus cellulovorans CompA.2 DNA Polymerase R820K
atgaaatacctgctgccgaccgctgctgctggtctgctgctcctcgctgcccagccggcgatggccatgggcaaactgattctggtcgacggaaacagcgtcgccaaccgggcgttttacgccgtccggctgctcagcacgcgcggcggcctgcacacaaacgcggtgtacggattcgccaacatgttgctcaagctgatcgaggaggaacggccgacgcattttctcgtcgcgttcgacgcgggcaaggcgacgttccgtcatcgcgaatacgaggcctacaaggcgggtcgcctgcagacgccgcccgagctgtccgagcagtttccgtacatccgggagctcgtccgggcgttcggcgtcgcgtccggcgagctggaggaatacgaggcggacgacatgatcggtacgctggcgaaacgggcggaggccgagggcgtcgacacgctggtcgtcaccggcgaccgcgatttgctccagctcgtatcggaccgcgtgaccgtcgcgctgacgcgcaagggcatcacggaaacggagcggtacgacccggcgcgcatccgcgaggaatacggcttcgatcccgaccgcatccgcgacctcaaagggctgatgggcgacgcgtctgacaatcttcccggcgttcccggcgtcggtgagaaaaccgcactgaaactgctcaggcagtacggttcgctggagagcgtcctggaacacgcgtcggaaatcgccggaaagctcggtgaaaatctgcgggcgcacgccgacgccgcccgattgagcaagcggctggcgacgatcgactgcgcggtaccgttgcagtcgggatgggactggctgcgcctcggcgaaccggaccgcgccgcgctcgcctcgctgttgcggcagctcgaattcaagtcgctgttgaaacggctcggactcgacggcacgtccgccgatgccgacgtcgacggcgtccgttcctccgcgcggccggcggacgagaaacggccgagggccgtcgccgtcgctgaggagggcgtcgacgtccgctgtccggatcgcccggaagaagtcgaagaagcgctgtcgcggctggaagccgcccagtcggtcgtcgtcgaggtgacgggcgacaacccgcacgacggcgaagtgcgcggcgtcgcatggtgggacggacatacggcgtatttcattccgtttgaacggctggtgcagtccgacatgcggccgctggccgactggctcgccgacgcgcgtcggccgaagcgtacgcacgactcccatcgcgctgaagtggcgctgttctggcacggccttgcgtttcgcggcacgtcgttctgcacgcatatcgccgcctatttgctcgaccccacggaatcgcgccatacgctggcggacctgtcgcgccgctacggtctgccgccggtaccggaagccgaggacgtttacggcaagggcgcgaagttcaaggttcccgatcgcgacacgctggcgcgttacgtcggccgcaaggccgccctagtcgcgcggctcgttccgctgctcgaggcggatttggcggcctgcggcatgcgttcgcttttttacgacctggagctgccgctttcatccgaactcgccgtcatggagacggtcggcgtccgcgtcgacgcggcggcgctcgccgcctacggcgaggaattgcgcgaggcggcggcgaaagtcgagcgggagatttacgagctggccgggacgacgttcaacatcggatcgacgaaacagctcggcgaaattttgttcgataagctggggctgcccgtcgtcaagaaaacgaaaaccggctattccaccgacgcagacgtgctggaggaactggcgccgtaccatccgatcgtcgaaaagattttgcattaccgccaactgacgaaattgcagtcgacctacatcgaggggcttttgaaagaaatccgtccgcaaaccggtaaaatccatacgtattatcagcagacgatcgcggcgacggggcggctgagcagtcagtttcccaatcttcagaacattccgatccgtctcgaagaggggcggaaaatccgcaaggcgttcgttccgtcagaaccgggatggctgatgctcgccgccgactattcgcagatcgaactgcgcgtgctcgcgcacgtttccggcgacgaacggctgaaggaagcgtttcggacaggcatggacatccacacgaagaccgcgatggacgtgttcggcgtttccgaagaccgcgtcgacgcgcgcatgcggcggcaggcgaaggcggtcaatttcggcatcatctacggcatcagcgatttcggactggcgcaaaacctgaacatttcccgcaaggaggcggcggagttcatccggcaatatttcgccgtcttttcgggcgtcaaggcgtaccgcgagcggatcgtcgagcaggcgcgccgcgacggttacgtgacgaccctgctcggtcgcaggaaatatttgccggacatcaacgcgtcgaattacaacctccgctcgttcgcggagcggacggcgatgaatacgccgatccagggcacggccgccgacatcatcaagaccgcgatggtgcgtctgacgcggcggatgcgcgacgtcggactgaagagccgcatgctgctgcaggttcacgacgagctcgtgtttgaagtgccgccggacgagctcgacgcgatgcgggagcttgtgacggacgtcatggagtcggcggtcccgctcgacgtgccgctgaaggtcgacgtcagctggggcgccgactggtacgcggcgaagtgagggaagcgggatcc

SEQ ID NO: 1028 - DNA, 2792 bp, Artificial Sequence
  Description of Artificial Sequence: Synthetic Caldibacillus cellulovorans CompA.2 DNA Polymerase R820M
atgaaatacctgctgccgaccgctgctgctggtctgctgctcctcgctgcccagccggcgatggccatgggcaaactgattctggtcgacggaaacagcgtcgccaaccgggcgttttacgccgtccggctgctcagcacgcgcggcggcctgcacacaaacgcggtgtacggattcgccaacatgttgctcaagctgatcgaggaggaacggccgacgcattttctcgtcgcgttcgacgcgggcaaggcgacgttccgtcatcgcgaatacgaggcctacaaggcgggtcgcctgcagacgccgcccgagctgtccgagcagtttccgtacatccgggagctcgtccgggcgttcggcgtcgcgtccggcgagctggaggaatacgaggcggacgacatgatcggtacgctggcgaaacgggcggaggccgagggcgtcgacacgctggtcgtcaccggcgaccgcgatttgctccagctcgtatcggaccgcgtgaccgtcgcgctgacgcgcaagggcatcacggaaacggagcggtacgacccggcgcgcatccgcgaggaatacggcttcgatcccgaccgcatccgcgacctcaaagggctgatgggcgacgcgtctgacaatcttcccggcgttcccggcgtcggtgagaaaaccgcactgaaactgctcaggcagtacggttcgctggagagcgtcctggaacacgcgtcggaaatcgccggaaagctcggtgaaaatctgcgggcgcacgccgacgccgcccgattgagcaagcggctggcgacgatcgactgcgcggtaccgttgcagtcgggatgggactggctgcgcctcggcgaaccggaccgcgccgcgctcgcctcgctgttgcggcagctcgaattcaagtcgctgttgaaacggctcggactcgacggcacgtccgccgatgccgacgtcgacggcgtccgttcctccgcgcggccggcggacgagaaacggccgagggccgtcgccgtcgctgaggagggcgtcgacgtccgctgtccggatcgcccggaagaagtcgaagaagcgctgtcgcggctggaagccgcccagtcggtcgtcgtcgaggtgacgggcgacaacccgcacgacggcgaagtgcgcggcgtcgcatggtgggacggacatacggcgtatttcattccgtttgaacggctggtgcagtccgacatgcggccgctggccgactggctcgccgacgcgcgtcggccgaagcgtacgcacgactcccatcgcgctgaagtggcgctgttctggcacggccttgcgtttcgcggcacgtcgttctgcacgcatatcgccgcctatttgctcgaccccacggaatcgcgccatacgctggcggacctgtcgcgccgctacggtctgccgccggtaccggaagccgaggacgtttacggcaagggcgcgaagttcaaggttcccgatcgcgacacgctggcgcgttacgtcggccgcaaggccgccctagtcgcgcggctcgttccgctgctcgaggcggatttggcggcctgcggcatgcgttcgcttttttacgacctggagctgccgctttcatccgaactcgccgtcatggagacggtcggcgtccgcgtcgacgcggcggcgctcgccgcctacggcgaggaattgcgcgaggcggcggcgaaagtcgagcgggagatttacgagctggccgggacgacgttcaacatcggatcgacgaaacagctcggcgaaattttgttcgataagctggggctgcccgtcgtcaagaaaacgaaaaccggctattccaccgacgcagacgtgctggaggaactggcgccgtaccatccgatcgtcgaaaagattttgcattaccgccaactgacgaaattgcagtcgacctacatcgaggggcttttgaaagaaatccgtccgcaaaccggtaaaatccatacgtattatcagcagacgatcgcggcgacggggcggctgagcagtcagtttcccaatcttcagaacattccgatccgtctcgaagaggggcggaaaatccgcaaggcgttcgttccgtcagaaccgggatggctgatgctcgccgccgactattcgcagatcgaactgcgcgtgctcgcgcacgtttccggcgacgaacggctgaaggaagcgtttcggacaggcatggacatccacacgaagaccgcgatggacgtgttcggcgtttccgaagaccgcgtcgacgcgcgcatgcggcggcaggcgaaggcggtcaatttcggcatcatctacggcatcagcgatttcggactggcgcaaaacctgaacatttcccgcaaggaggcggcggagttcatccggcaatatttcgccgtcttttcgggcgtcaaggcgtaccgcgagcggatcgtcgagcaggcgcgccgcgacggttacgtgacgaccctgctcggtcgcaggatgtatttgccggacatcaacgcgtcgaattacaacctccgctcgttcgcggagcggacggcgatgaatacgccgatccagggcacggccgccgacatcatcaagaccgcgatggtgcgtctgacgcggcggatgcgcgacgtcggactgaagagccgcatgctgctgcaggttcacgacgagctcgtgtttgaagtgccgccggacgagctcgacgcgatgcgggagcttgtgacggacgtcatggagtcggcggtcccgctcgacgtgccgctgaaggtcgacgtcagctggggcgccgactggtacgcggcgaagtgagggaagcgggatcc

SEQ ID NO: 1029 - DNA, 2792 bp, Artificial Sequence
  Description of Artificial Sequence: Synthetic Caldibacillus cellulovorans CompA.2 DNA Polymerase R820F
atgaaatacctgctgccgaccgctgctgctggtctgctgctcctcgctgcccagccggcgatggccatgggcaaactgattctggtcgacggaaacagcgtcgccaaccgggcgttttacgccgtccggctgctcagcacgcgcggcggcctgcacacaaacgcggtgtacggattcgccaacatgttgctcaagctgatcgaggaggaacggccgacgcattttctcgtcgcgttcgacgcgggcaaggcgacgttccgtcatcgcgaatacgaggcctacaaggcgggtcgcctgcagacgccgcccgagctgtccgagcagtttccgtacatccgggagctcgtccgggcgttcggcgtcgcgtccggcgagctggaggaatacgaggcggacgacatgatcggtacgctggcgaaacgggcggaggccgagggcgtcgacacgctggtcgtcaccggcgaccgcgatttgctccagctcgtatcggaccgcgtgaccgtcgcgctgacgcgcaagggcatcacggaaacggagcggtacgacccggcgcgcatccgcgaggaatacggcttcgatcccgaccgcatccgcgacctcaaagggctgatgggcgacgcgtctgacaatcttcccggcgttcccggcgtcggtgagaaaaccgcactgaaactgctcaggcagtacggttcgctggagagcgtcctggaacacgcgtcggaaatcgccggaaagctcggtgaaaatctgcgggcgcacgccgacgccgcccgattgagcaagcggctggcgacgatcgactgcgcggtaccgttgcagtcgggatgggactggctgcgcctcggcgaaccggaccgcgccgcgctcgcctcgctgttgcggcagctcgaattcaagtcgctgttgaaacggctcggactcgacggcacgtccgccgatgccgacgtcgacggcgtccgttcctccgcgcggccggcggacgagaaacggccgagggccgtcgccgtcgctgaggagggcgtcgacgtccgctgtccggatcgcccggaagaagtcgaagaagcgctgtcgcggctggaagccgcccagtcggtcgtcgtcgaggtgacgggcgacaacccgcacgacggcgaagtgcgcggcgtcgcatggtgggacggacatacggcgtatttcattccgtttgaacggctggtgcagtccgacatgcggccgctggccgactggctcgccgacgcgcgtcggccgaagcgtacgcacgactcccatcgcgctgaagtggcgctgttctggcacggccttgcgtttcgcggcacgtcgttctgcacgcatatcgccgcctatttgctcgaccccacggaatcgcgccatacgctggcggacctgtcgcgccgctacggtctgccgccggtaccggaagccgaggacgtttacggcaagggcgcgaagttcaaggttcccgatcgcgacacgctggcgcgttacgtcggccgcaaggccgccctagtcgcgcggctcgttccgctgctcgaggcggatttggcggcctgcggcatgcgttcgcttttttacgacctggagctgccgctttcatccgaactcgccgtcatggagacggtcggcgtccgcgtcgacgcggcggcgctcgccgcctacggcgaggaattgcgcgaggcggcggcgaaagtcgagcgggagatttacgagctggccgggacgacgttcaacatcggatcgacgaaacagctcggcgaaattttgttcgataagctggggctgcccgtcgtcaagaaaacgaaaaccggctattccaccgacgcagacgtgctggaggaactggcgccgtaccatccgatcgtcgaaaagattttgcattaccgccaactgacgaaattgcagtcgacctacatcgaggggcttttgaaagaaatccgtccgcaaaccggtaaaatccatacgtattatcagcagacgatcgcggcgacggggcggctgagcagtcagtttcccaatcttcagaacattccgatccgtctcgaagaggggcggaaaatccgcaaggcgttcgttccgtcagaaccgggatggctgatgctcgccgccgactattcgcagatcgaactgcgcgtgctcgcgcacgtttccggcgacgaacggctgaaggaagcgtttcggacaggcatggacatccacacgaagaccgcgatggacgtgttcggcgtttccgaagaccgcgtcgacgcgcgcatgcggcggcaggcgaaggcggtcaatttcggcatcatctacggcatcagcgatttcggactggcgcaaaacctgaacatttcccgcaaggaggcggcggagttcatccggcaatatttcgccgtcttttcgggcgtcaaggcgtaccgcgagcggatcgtcgagcaggcgcgccgcgacggttacgtgacgaccctgctcggtcgcaggttttatttgccggacatcaacgcgtcgaattacaacctccgctcgttcgcggagcggacggcgatgaatacgccgatccagggcacggccgccgacatcatcaagaccgcgatggtgcgtctgacgcggcggatgcgcgacgtcggactgaagagccgcatgctgctgcaggttcacgacgagctcgtgtttgaagtgccgccggacgagctcgacgcgatgcgggagcttgtgacggacgtcatggagtcggcggtcccgctcgacgtgccgctgaaggtcgacgtcagctggggcgccgactggtacgcggcgaagtgagggaagcgggatcc

SEQ ID NO: 1030 - DNA, 2792 bp, Artificial Sequence
  Description of Artificial Sequence: Synthetic Caldibacillus cellulovorans CompA.2 DNA Polymerase R820P
atgaaatacctgctgccgaccgctgctgctggtctgctgctcctcgctgcccagccggcgatggccatgggcaaactgattctggtcgacggaaacagcgtcgccaaccgggcgttttacgccgtccggctgctcagcacgcgcggcggcctgcacacaaacgcggtgtacggattcgccaacatgttgctcaagctgatcgaggaggaacggccgacgcattttctcgtcgcgttcgacgcgggcaaggcgacgttccgtcatcgcgaatacgaggcctacaaggcgggtcgcctgcagacgccgcccgagctgtccgagcagtttccgtacatccgggagctcgtccgggcgttcggcgtcgcgtccggcgagctggaggaatacgaggcggacgacatgatcggtacgctggcgaaacgggcggaggccgagggcgtcgacacgctggtcgtcaccggcgaccgcgatttgctccagctcgtatcggaccgcgtgaccgtcgcgctgacgcgcaagggcatcacggaaacggagcggtacgacccggcgcgcatccgcgaggaatacggcttcgatcccgaccgcatccgcgacctcaaagggctgatgggcgacgcgtctgacaatcttcccggcgttcccggcgtcggtgagaaaaccgcactgaaactgctcaggcagtacggttcgctggagagcgtcctggaacacgcgtcggaaatcgccggaaagctcggtgaaaatctgcgggcgcacgccgacgccgcccgattgagcaagcggctggcgacgatcgactgcgcggtaccgttgcagtcgggatgggactggctgcgcctcggcgaaccggaccgcgccgcgctcgcctcgctgttgcggcagctcgaattcaagtcgctgttgaaacggctcggactcgacggcacgtccgccgatgccgacgtcgacggcgtccgttcctccgcgcggccggcggacgagaaacggccgagggccgtcgccgtcgctgaggagggcgtcgacgtccgctgtccggatcgcccggaagaagtcgaagaagcgctgtcgcggctggaagccgcccagtcggtcgtcgtcgaggtgacgggcgacaacccgcacgacggcgaagtgcgcggcgtcgcatggtgggacggacatacggcgtatttcattccgtttgaacggctggtgcagtccgacatgcggccgctggccgactggctcgccgacgcgcgtcggccgaagcgtacgcacgactcccatcgcgctgaagtggcgctgttctggcacggccttgcgtttcgcggcacgtcgttctgcacgcatatcgccgcctatttgctcgaccccacggaatcgcgccatacgctggcggacctgtcgcgccgctacggtctgccgccggtaccggaagccgaggacgtttacggcaagggcgcgaagttcaaggttcccgatcgcgacacgctggcgcgttacgtcggccgcaaggccgccctagtcgcgcggctcgttccgctgctcgaggcggatttggcggcctgcggcatgcgttcgcttttttacgacctggagctgccgctttcatccgaactcgccgtcatggagacggtcggcgtccgcgtcgacgcggcggcgctcgccgcctacggcgaggaattgcgcgaggcggcggcgaaagtcgagcgggagatttacgagctggccgggacgacgttcaacatcggatcgacgaaacagctcggcgaaattttgttcgataagctggggctgcccgtcgtcaagaaaacgaaaaccggctattccaccgacgcagacgtgctggaggaactggcgccgtaccatccgatcgtcgaaaagattttgcattaccgccaactgacgaaattgcagtcgacctacatcgaggggcttttgaaagaaatccgtccgcaaaccggtaaaatccatacgtattatcagcagacgatcgcggcgacggggcggctgagcagtcagtttcccaatcttcagaacattccgatccgtctcgaagaggggcggaaaatccgcaaggcgttcgttccgtcagaaccgggatggctgatgctcgccgccgactattcgcagatcgaactgcgcgtgctcgcgcacgtttccggcgacgaacggctgaaggaagcgtttcggacaggcatggacatccacacgaagaccgcgatggacgtgttcggcgtttccgaagaccgcgtcgacgcgcgcatgcggcggcaggcgaaggcggtcaatttcggcatcatctacggcatcagcgatttcggactggcgcaaaacctgaacatttcccgcaaggaggcggcggagttcatccggcaatatttcgccgtcttttcgggcgtcaaggcgtaccgcgagcggatcgtcgagcaggcgcgccgcgacggttacgtgacgaccctgctcggtcgcaggccttatttgccggacatcaacgcgtcgaattacaacctccgctcgttcgcggagcggacggcgatgaatacgccgatccagggcacggccgccgacatcatcaagaccgcgatggtgcgtctgacgcggcggatgcgcgacgtcggactgaagagccgcatgctgctgcaggttcacgacgagctcgtgtttgaagtgccgccggacgagctcgacgcgatgcgggagcttgtgacggacgtcatggagtcggcggtcccgctcgacgtgccgctgaaggtcgacgtcagctggggcgccgactggtacgcggcgaagtgagggaagcgggatcc

SEQ ID NO: 1031 - DNA, 2792 bp, Artificial Sequence
  Description of Artificial Sequence: Synthetic Caldibacillus cellulovorans CompA.2 DNA Polymerase R820S
atgaaatacctgctgccgaccgctgctgctggtctgctgctcctcgctgcccagccggcgatggccatgggcaaactgattctggtcgacggaaacagcgtcgccaaccgggcgttttacgccgtccggctgctcagcacgcgcggcggcctgcacacaaacgcggtgtacggattcgccaacatgttgctcaagctgatcgaggaggaacggccgacgcattttctcgtcgcgttcgacgcgggcaaggcgacgttccgtcatcgcgaatacgaggcctacaaggcgggtcgcctgcagacgccgcccgagctgtccgagcagtttccgtacatccgggagctcgtccgggcgttcggcgtcgcgtccggcgagctggaggaatacgaggcggacgacatgatcggtacgctggcgaaacgggcggaggccgagggcgtcgacacgctggtcgtcaccggcgaccgcgatttgctccagctcgtatcggaccgcgtgaccgtcgcgctgacgcgcaagggcatcacggaaacggagcggtacgacccggcgcgcatccgcgaggaatacggcttcgatcccgaccgcatccgcgacctcaaagggctgatgggcgacgcgtctgacaatcttcccggcgttcccggcgtcggtgagaaaaccgcactgaaactgctcaggcagtacggttcgctggagagcgtcctggaacacgcgtcggaaatcgccggaaagctcggtgaaaatctgcgggcgcacgccgacgccgcccgattgagcaagcggctggcgacgatcgactgcgcggtaccgttgcagtcgggatgggactggctgcgcctcggcgaaccggaccgcgccgcgctcgcctcgctgttgcggcagctcgaattcaagtcgctgttgaaacggctcggactcgacggcacgtccgccgatgccgacgtcgacggcgtccgttcctccgcgcggccggcggacgagaaacggccgagggccgtcgccgtcgctgaggagggcgtcgacgtccgctgtccggatcgcccggaagaagtcgaagaagcgctgtcgcggctggaagccgcccagtcggtcgtcgtcgaggtgacgggcgacaacccgcacgacggcgaagtgcgcggcgtcgcatggtgggacggacatacggcgtatttcattccgtttgaacggctggtgcagtccgacatgcggccgctggccgactggctcgccgacgcgcgtcggccgaagcgtacgcacgactcccatcgcgctgaagtggcgctgttctggcacggccttgcgtttcgcggcacgtcgttctgcacgcatatcgccgcctatttgctcgaccccacggaatcgcgccatacgctggcggacctgtcgcgccgctacggtctgccgccggtaccggaagccgaggacgtttacggcaagggcgcgaagttcaaggttcccgatcgcgacacgctggcgcgttacgtcggccgcaaggccgccctagtcgcgcggctcgttccgctgctcgaggcggatttggcggcctgcggcatgcgttcgcttttttacgacctggagctgccgctttcatccgaactcgccgtcatggagacggtcggcgtccgcgtcgacgcggcggcgctcgccgcctacggcgaggaattgcgcgaggcggcggcgaaagtcgagcgggagatttacgagctggccgggacgacgttcaacatcggatcgacgaaacagctcggcgaaattttgttcgataagctggggctgcccgtcgtcaagaaaacgaaaaccggctattccaccgacgcagacgtgctggaggaactggcgccgtaccatccgatcgtcgaaaagattttgcattaccgccaactgacgaaattgcagtcgacctacatcgaggggcttttgaaagaaatccgtccgcaaaccggtaaaatccatacgtattatcagcagacgatcgcggcgacggggcggctgagcagtcagtttcccaatcttcagaacattccgatccgtctcgaagaggggcggaaaatccgcaaggcgttcgttccgtcagaaccgggatggctgatgctcgccgccgactattcgcagatcgaactgcgcgtgctcgcgcacgtttccggcgacgaacggctgaaggaagcgtttcggacaggcatggacatccacacgaagaccgcgatggacgtgttcggcgtttccgaagaccgcgtcgacgcgcgcatgcggcggcaggcgaaggcggtcaatttcggcatcatctacggcatcagcgatttcggactggcgcaaaacctgaacatttcccgcaaggaggcggcggagttcatccggcaatatttcgccgtcttttcgggcgtcaaggcgtaccgcgagcggatcgtcgagcaggcgcgccgcgacggttacgtgacgaccctgctcggtcgcaggtcttatttgccggacatcaacgcgtcgaattacaacctccgctcgttcgcggagcggacggcgatgaatacgccgatccagggcacggccgccgacatcatcaagaccgcgatggtgcgtctgacgcggcggatgcgcgacgtcggactgaagagccgcatgctgctgcaggttcacgacgagctcgtgtttgaagtgccgccggacgagctcgacgcgatgcgggagcttgtgacggacgtcatggagtcggcggtcccgctcgacgtgccgctgaaggtcgacgtcagctggggcgccgactggtacgcggcgaagtgagggaagcgggatcc

SEQ ID NO: 1032 - DNA, 2792 bp, Artificial Sequence
  Description of Artificial Sequence: Synthetic Caldibacillus cellulovorans CompA.2 DNA Polymerase R820T
atgaaatacctgctgccgaccgctgctgctggtctgctgctcctcgctgcccagccggcgatggccatgggcaaactgattctggtcgacggaaacagcgtcgccaaccgggcgttttacgccgtccggctgctcagcacgcgcggcggcctgcacacaaacgcggtgtacggattcgccaacatgttgctcaagctgatcgaggaggaacggccgacgcattttctcgtcgcgttcgacgcgggcaaggcgacgttccgtcatcgcgaatacgaggcctacaaggcgggtcgcctgcagacgccgcccgagctgtccgagcagtttccgtacatccgggagctcgtccgggcgttcggcgtcgcgtccggcgagctggaggaatacgaggcggacgacatgatcggtacgctggcgaaacgggcggaggccgagggcgtcgacacgctggtcgtcaccggcgaccgcgatttgctccagctcgtatcggaccgcgtgaccgtcgcgctgacgcgcaagggcatcacggaaacggagcggtacgacccggcgcgcatccgcgaggaatacggcttcgatcccgaccgcatccgcgacctcaaagggctgatgggcgacgcgtctgacaatcttcccggcgttcccggcgtcggtgagaaaaccgcactgaaactgctcaggcagtacggttcgctggagagcgtcctggaacacgcgtcggaaatcgccggaaagctcggtgaaaatctgcgggcgcacgccgacgccgcccgattgagcaagcggctggcgacgatcgactgcgcggtaccgttgcagtcgggatgggactggctgcgcctcggcgaaccggaccgcgccgcgctcgcctcgctgttgcggcagctcgaattcaagtcgctgttgaaacggctcggactcgacggcacgtccgccgatgccgacgtcgacggcgtccgttcctccgcgcggccggcggacgagaaacggccgagggccgtcgccgtcgctgaggagggcgtcgacgtccgctgtccggatcgcccggaagaagtcgaagaagcgctgtcgcggctggaagccgcccagtcggtcgtcgtcgaggtgacgggcgacaacccgcacgacggcgaagtgcgcggcgtcgcatggtgggacggacatacggcgtatttcattccgtttgaacggctggtgcagtccgacatgcggccgctggccgactggctcgccgacgcgcgtcggccgaagcgtacgcacgactcccatcgcgctgaagtggcgctgttctggcacggccttgcgtttcgcggcacgtcgttctgcacgcatatcgccgcctatttgctcgaccccacggaatcgcgccatacgctggcggacctgtcgcgccgctacggtctgccgccggtaccggaagccgaggacgtttacggcaagggcgcgaagttcaaggttcccgatcgcgacacgctggcgcgttacgtcggccgcaaggccgccctagtcgcgcggctcgttccgctgctcgaggcggatttggcggcctgcggcatgcgttcgcttttttacgacctggagctgccgctttcatccgaactcgccgtcatggagacggtcggcgtccgcgtcgacgcggcggcgctcgccgcctacggcgaggaattgcgcgaggcggcggcgaaagtcgagcgggagatttacgagctggccgggacgacgttcaacatcggatcgacgaaacagctcggcgaaattttgttcgataagctggggctgcccgtcgtcaagaaaacgaaaaccggctattccaccgacgcagacgtgctggaggaactggcgccgtaccatccgatcgtcgaaaagattttgcattaccgccaactgacgaaattgcagtcgacctacatcgaggggcttttgaaagaaatccgtccgcaaaccggtaaaatccatacgtattatcagcagacgatcgcggcgacggggcggctgagcagtcagtttcccaatcttcagaacattccgatccgtctcgaagaggggcggaaaatccgcaaggcgttcgttccgtcagaaccgggatggctgatgctcgccgccgactattcgcagatcgaactgcgcgtgctcgcgcacgtttccggcgacgaacggctgaaggaagcgtttcggacaggcatggacatccacacgaagaccgcgatggacgtgttcggcgtttccgaagaccgcgtcgacgcgcgcatgcggcggcaggcgaaggcggtcaatttcggcatcatctacggcatcagcgatttcggactggcgcaaaacctgaacatttcccgcaaggaggcggcggagttcatccggcaatatttcgccgtcttttcgggcgtcaaggcgtaccgcgagcggatcgtcgagcaggcgcgccgcgacggttacgtgacgaccctgctcggtcgcaggacttatttgccggacatcaacgcgtcgaattacaacctccgctcgttcgcggagcggacggcgatgaatacgccgatccagggcacggccgccgacatcatcaagaccgcgatggtgcgtctgacgcggcggatgcgcgacgtcggactgaagagccgcatgctgctgcaggttcacgacgagctcgtgtttgaagtgccgccggacgagctcgacgcgatgcgggagcttgtgacggacgtcatggagtcggcggtcccgctcgacgtgccgctgaaggtcgacgtcagctggggcgccgactggtacgcggcgaagtgagggaagcgggatcc

SEQ ID NO: 1033 - DNA, 2792 bp, Artificial Sequence
  Description of Artificial Sequence: Synthetic Caldibacillus cellulovorans CompA.2 DNA Polymerase R820W
atgaaatacctgctgccgaccgctgctgctggtctgctgctcctcgctgcccagccggcgatggccatgggcaaactgattctggtcgacggaaacagcgtcgccaaccgggcgttttacgccgtccggctgctcagcacgcgcggcggcctgcacacaaacgcggtgtacggattcgccaacatgttgctcaagctgatcgaggaggaacggccgacgcattttctcgtcgcgttcgacgcgggcaaggcgacgttccgtcatcgcgaatacgaggcctacaaggcgggtcgcctgcagacgccgcccgagctgtccgagcagtttccgtacatccgggagctcgtccgggcgttcggcgtcgcgtccggcgagctggaggaatacgaggcggacgacatgatcggtacgctggcgaaacgggcggaggccgagggcgtcgacacgctggtcgtcaccggcgaccgcgatttgctccagctcgtatcggaccgcgtgaccgtcgcgctgacgcgcaagggcatcacggaaacggagcggtacgacccggcgcgcatccgcgaggaatacggcttcgatcccgaccgcatccgcgacctcaaagggctgatgggcgacgcgtctgacaatcttcccggcgttcccggcgtcggtgagaaaaccgcactgaaactgctcaggcagtacggttcgctggagagcgtcctggaacacgcgtcggaaatcgccggaaagctcggtgaaaatctgcgggcgcacgccgacgccgcccgattgagcaagcggctggcgacgatcgactgcgcggtaccgttgcagtcgggatgggactggctgcgcctcggcgaaccggaccgcgccgcgctcgcctcgctgttgcggcagctcgaattcaagtcgctgttgaaacggctcggactcgacggcacgtccgccgatgccgacgtcgacggcgtccgttcctccgcgcggccggcggacgagaaacggccgagggccgtcgccgtcgctgaggagggcgtcgacgtccgctgtccggatcgcccggaagaagtcgaagaagcgctgtcgcggctggaagccgcccagtcggtcgtcgtcgaggtgacgggcgacaacccgcacgacggcgaagtgcgcggcgtcgcatggtgggacggacatacggcgtatttcattccgtttgaacggctggtgcagtccgacatgcggccgctggccgactggctcgccgacgcgcgtcggccgaagcgtacgcacgactcccatcgcgctgaagtggcgctgttctggcacggccttgcgtttcgcggcacgtcgttctgcacgcatatcgccgcctatttgctcgaccccacggaatcgcgccatacgctggcggacctgtcgcgccgctacggtctgccgccggtaccggaagccgaggacgtttacggcaagggcgcgaagttcaaggttcccgatcgcgacacgctggcgcgttacgtcggccgcaaggccgccctagtcgcgcggctcgttccgctgctcgaggcggatttggcggcctgcggcatgcgttcgcttttttacgacctggagctgccgctttcatccgaactcgccgtcatggagacggtcggcgtccgcgtcgacgcggcggcgctcgccgcctacggcgaggaattgcgcgaggcggcggcgaaagtcgagcgggagatttacgagctggccgggacgacgttcaacatcggatcgacgaaacagctcggcgaaattttgttcgataagctggggctgcccgtcgtcaagaaaacgaaaaccggctattccaccgacgcagacgtgctggaggaactggcgccgtaccatccgatcgtcgaaaagattttgcattaccgccaactgacgaaattgcagtcgacctacatcgaggggcttttgaaagaaatccgtccgcaaaccggtaaaatccatacgtattatcagcagacgatcgcggcgacggggcggctgagcagtcagtttcccaatcttcagaacattccgatccgtctcgaagaggggcggaaaatccgcaaggcgttcgttccgtcagaaccgggatggctgatgctcgccgccgactattcgcagatcgaactgcgcgtgctcgcgcacgtttccggcgacgaacggctgaaggaagcgtttcggacaggcatggacatccacacgaagaccgcgatggacgtgttcggcgtttccgaagaccgcgtcgacgcgcgcatgcggcggcaggcgaaggcggtcaatttcggcatcatctacggcatcagcgatttcggactggcgcaaaacctgaacatttcccgcaaggaggcggcggagttcatccggcaatatttcgccgtcttttcgggcgtcaaggcgtaccgcgagcggatcgtcgagcaggcgcgccgcgacggttacgtgacgaccctgctcggtcgcaggtggtatttgccggacatcaacgcgtcgaattacaacctccgctcgttcgcggagcggacggcgatgaatacgccgatccagggcacggccgccgacatcatcaagaccgcgatggtgcgtctgacgcggcggatgcgcgacgtcggactgaagagccgcatgctgctgcaggttcacgacgagctcgtgtttgaagtgccgccggacgagctcgacgcgatgcgggagcttgtgacggacgtcatggagtcggcggtcccgctcgacgtgccgctgaaggtcgacgtcagctggggcgccgactggtacgcggcgaagtgagggaagcgggatcc

SEQ ID NO: 1034 - DNA, 2792 bp, Artificial Sequence
  Description of Artificial Sequence: Synthetic Caldibacillus cellulovorans CompA.2 DNA Polymerase R820Y
atgaaatacctgctgccgaccgctgctgctggtctgctgctcctcgctgcccagccggcgatggccatgggcaaactgattctggtcgacggaaacagcgtcgccaaccgggcgttttacgccgtccggctgctcagcacgcgcggcggcctgcacacaaacgcggtgtacggattcgccaacatgttgctcaagctgatcgaggaggaacggccgacgcattttctcgtcgcgttcgacgcgggcaaggcgacgttccgtcatcgcgaatacgaggcctacaaggcgggtcgcctgcagacgccgcccgagctgtccgagcagtttccgtacatccgggagctcgtccgggcgttcggcgtcgcgtccggcgagctggaggaatacgaggcggacgacatgatcggtacgctggcgaaacgggcggaggccgagggcgtcgacacgctggtcgtcaccggcgaccgcgatttgctccagctcgtatcggaccgcgtgaccgtcgcgctgacgcgcaagggcatcacggaaacggagcggtacgacccggcgcgcatccgcgaggaatacggcttcgatcccgaccgcatccgcgacctcaaagggctgatgggcgacgcgtctgacaatcttcccggcgttcccggcgtcggtgagaaaaccgcactgaaactgctcaggcagtacggttcgctggagagcgtcctggaacacgcgtcggaaatcgccggaaagctcggtgaaaatctgcgggcgcacgccgacgccgcccgattgagcaagcggctggcgacgatcgactgcgcggtaccgttgcagtcgggatgggactggctgcgcctcggcgaaccggaccgcgccgcgctcgcctcgctgttgcggcagctcgaattcaagtcgctgttgaaacggctcggactcgacggcacgtccgccgatgccgacgtcgacggcgtccgttcctccgcgcggccggcggacgagaaacggccgagggccgtcgccgtcgctgaggagggcgtcgacgtccgctgtccggatcgcccggaagaagtcgaagaagcgctgtcgcggctggaagccgcccagtcggtcgtcgtcgaggtgacgggcgacaacccgcacgacggcgaagtgcgcggcgtcgcatggtgggacggacatacggcgtatttcattccgtttgaacggctggtgcagtccgacatgcggccgctggccgactggctcgccgacgcgcgtcggccgaagcgtacgcacgactcccatcgcgctgaagtggcgctgttctggcacggccttgcgtttcgcggcacgtcgttctgcacgcatatcgccgcctatttgctcgaccccacggaatcgcgccatacgctggcggacctgtcgcgccgctacggtctgccgccggtaccggaagccgaggacgtttacggcaagggcgcgaagttcaaggttcccgatcgcgacacgctggcgcgttacgtcggccgcaaggccgccctagtcgcgcggctcgttccgctgctcgaggcggatttggcggcctgcggcatgcgttcgcttttttacgacctggagctgccgctttcatccgaactcgccgtcatggagacggtcggcgtccgcgtcgacgcggcggcgctcgccgcctacggcgaggaattgcgcgaggcggcggcgaaagtcgagcgggagatttacgagctggccgggacgacgttcaacatcggatcgacgaaacagctcggcgaaattttgttcgataagctggggctgcccgtcgtcaagaaaacgaaaaccggctattccaccgacgcagacgtgctggaggaactggcgccgtaccatccgatcgtcgaaaagattttgcattaccgccaactgacgaaattgcagtcgacctacatcgaggggcttttgaaagaaatccgtccgcaaaccggtaaaatccatacgtattatcagcagacgatcgcggcgacggggcggctgagcagtcagtttcccaatcttcagaacattccgatccgtctcgaagaggggcggaaaatccgcaaggcgttcgttccgtcagaaccgggatggctgatgctcgccgccgactattcgcagatcgaactgcgcgtgctcgcgcacgtttccggcgacgaacggctgaaggaagcgtttcggacaggcatggacatccacacgaagaccgcgatggacgtgttcggcgtttccgaagaccgcgtcgacgcgcgcatgcggcggcaggcgaaggcggtcaatttcggcatcatctacggcatcagcgatttcggactggcgcaaaacctgaacatttcccgcaaggaggcggcggagttcatccggcaatatttcgccgtcttttcgggcgtcaaggcgtaccgcgagcggatcgtcgagcaggcgcgccgcgacggttacgtgacgaccctgctcggtcgcaggtattatttgccggacatcaacgcgtcgaattacaacctccgctcgttcgcggagcggacggcgatgaatacgccgatccagggcacggccgccgacatcatcaagaccgcgatggtgcgtctgacgcggcggatgcgcgacgtcggactgaagagccgcatgctgctgcaggttcacgacgagctcgtgtttgaagtgccgccggacgagctcgacgcgatgcgggagcttgtgacggacgtcatggagtcggcggtcccgctcgacgtgccgctgaaggtcgacgtcagctggggcgccgactggtacgcggcgaagtgagggaagcgggatcc

SEQ ID NO: 1035 - DNA, 2792 bp, Artificial Sequence
  Description of Artificial Sequence: Synthetic Caldibacillus cellulovorans CompA.2 DNA Polymerase R820V
atgaaatacctgctgccgaccgctgctgctggtctgctgctcctcgctgcccagccggcgatggccatgggcaaactgattctggtcgacggaaacagcgtcgccaaccgggcgttttacgccgtccggctgctcagcacgcgcggcggcctgcacacaaacgcggtgtacggattcgccaacatgttgctcaagctgatcgaggaggaacggccgacgcattttctcgtcgcgttcgacgcgggcaaggcgacgttccgtcatcgcgaatacgaggcctacaaggcgggtcgcctgcagacgccgcccgagctgtccgagcagtttccgtacatccgggagctcgtccgggcgttcggcgtcgcgtccggcgagctggaggaatacgaggcggacgacatgatcggtacgctggcgaaacgggcggaggccgagggcgtcgacacgctggtcgtcaccggcgaccgcgatttgctccagctcgtatcggaccgcgtgaccgtcgcgctgacgcgcaagggcatcacggaaacggagcggtacgacccggcgcgcatccgcgaggaatacggcttcgatcccgaccgcatccgcgacctcaaagggctgatgggcgacgcgtctgacaatcttcccggcgttcccggcgtcggtgagaaaaccgcactgaaactgctcaggcagtacggttcgctggagagcgtcctggaacacgcgtcggaaatcgccggaaagctcggtgaaaatctgcgggcgcacgccgacgccgcccgattgagcaagcggctggcgacgatcgactgcgcggtaccgttgcagtcgggatgggactggctgcgcctcggcgaaccggaccgcgccgcgctcgcctcgctgttgcggcagctcgaattcaagtcgctgttgaaacggctcggactcgacggcacgtccgccgatgccgacgtcgacggcgtccgttcctccgcgcggccggcggacgagaaacggccgagggccgtcgccgtcgctgaggagggcgtcgacgtccgctgtccggatcgcccggaagaagtcgaagaagcgctgtcgcggctggaagccgcccagtcggtcgtcgtcgaggtgacgggcgacaacccgcacgacggcgaagtgcgcggcgtcgcatggtgggacggacatacggcgtatttcattccgtttgaacggctggtgcagtccgacatgcggccgctggccgactggctcgccgacgcgcgtcggccgaagcgtacgcacgactcccatcgcgctgaagtggcgctgttctggcacggccttgcgtttcgcggcacgtcgttctgcacgcatatcgccgcctatttgctcgaccccacggaatcgcgccatacgctggcggacctgtcgcgccgctacggtctgccgccggtaccggaagccgaggacgtttacggcaagggcgcgaagttcaaggttcccgatcgcgacacgctggcgcgttacgtcggccgcaaggccgccctagtcgcgcggctcgttccgctgctcgaggcggatttggcggcctgcggcatgcgttcgcttttttacgacctggagctgccgctttcatccgaactcgccgtcatggagacggtcggcgtccgcgtcgacgcggcggcgctcgccgcctacggcgaggaattgcgcgaggcggcggcgaaagtcgagcgggagatttacgagctggccgggacgacgttcaacatcggatcgacgaaacagctcggcgaaattttgttcgataagctggggctgcccgtcgtcaagaaaacgaaaaccggctattccaccgacgcagacgtgctggaggaactggcgccgtaccatccgatcgtcgaaaagattttgcattaccgccaactgacgaaattgcagtcgacctacatcgaggggcttttgaaagaaatccgtccgcaaaccggtaaaatccatacgtattatcagcagacgatcgcggcgacggggcggctgagcagtcagtttcccaatcttcagaacattccgatccgtctcgaagaggggcggaaaatccgcaaggcgttcgttccgtcagaaccgggatggctgatgctcgccgccgactattcgcagatcgaactgcgcgtgctcgcgcacgtttccggcgacgaacggctgaaggaagcgtttcggacaggcatggacatccacacgaagaccgcgatggacgtgttcggcgtttccgaagaccgcgtcgacgcgcgcatgcggcggcaggcgaaggcggtcaatttcggcatcatctacggcatcagcgatttcggactggcgcaaaacctgaacatttcccgcaaggaggcggcggagttcatccggcaatatttcgccgtcttttcgggcgtcaaggcgtaccgcgagcggatcgtcgagcaggcgcgccgcgacggttacgtgacgaccctgctcggtcgcagggtttatttgccggacatcaacgcgtcgaattacaacctccgctcgttcgcggagcggacggcgatgaatacgccgatccagggcacggccgccgacatcatcaagaccgcgatggtgcgtctgacgcggcggatgcgcgacgtcggactgaagagccgcatgctgctgcaggttcacgacgagctcgtgtttgaagtgccgccggacgagctcgacgcgatgcgggagcttgtgacggacgtcatggagtcggcggtcccgctcgacgtgccgctgaaggtcgacgtcagctggggcgccgactggtacgcggcgaagtgagggaagcgggatcc

SEQ ID NO: 1036 - DNA, 2792 bp, Artificial Sequence
  Description of Artificial Sequence: Synthetic Caldibacillus cellulovorans CompA.2 DNA Polymerase Y821A
atgaaatacctgctgccgaccgctgctgctggtctgctgctcctcgctgcccagccggcgatggccatgggcaaactgattctggtcgacggaaacagcgtcgccaaccgggcgttttacgccgtccggctgctcagcacgcgcggcggcctgcacacaaacgcggtgtacggattcgccaacatgttgctcaagctgatcgaggaggaacggccgacgcattttctcgtcgcgttcgacgcgggcaaggcgacgttccgtcatcgcgaatacgaggcctacaaggcgggtcgcctgcagacgccgcccgagctgtccgagcagtttccgtacatccgggagctcgtccgggcgttcggcgtcgcgtccggcgagctggaggaatacgaggcggacgacatgatcggtacgctggcgaaacgggcggaggccgagggcgtcgacacgctggtcgtcaccggcgaccgcgatttgctccagctcgtatcggaccgcgtgaccgtcgcgctgacgcgcaagggcatcacggaaacggagcggtacgacccggcgcgcatccgcgaggaatacggcttcgatcccgaccgcatccgcgacctcaaagggctgatgggcgacgcgtctgacaatcttcccggcgttcccggcgtcggtgagaaaaccgcactgaaactgctcaggcagtacggttcgctggagagcgtcctggaacacgcgtcggaaatcgccggaaagctcggtgaaaatctgcgggcgcacgccgacgccgcccgattgagcaagcggctggcgacgatcgactgcgcggtaccgttgcagtcgggatgggactggctgcgcctcggcgaaccggaccgcgccgcgctcgcctcgctgttgcggcagctcgaattcaagtcgctgttgaaacggctcggactcgacggcacgtccgccgatgccgacgtcgacggcgtccgttcctccgcgcggccggcggacgagaaacggccgagggccgtcgccgtcgctgaggagggcgtcgacgtccgctgtccggatcgcccggaagaagtcgaagaagcgctgtcgcggctggaagccgcccagtcggtcgtcgtcgaggtgacgggcgacaacccgcacgacggcgaagtgcgcggcgtcgcatggtgggacggacatacggcgtatttcattccgtttgaacggctggtgcagtccgacatgcggccgctggccgactggctcgccgacgcgcgtcggccgaagcgtacgcacgactcccatcgcgctgaagtggcgctgttctggcacggccttgcgtttcgcggcacgtcgttctgcacgcatatcgccgcctatttgctcgaccccacggaatcgcgccatacgctggcggacctgtcgcgccgctacggtctgccgccggtaccggaagccgaggacgtttacggcaagggcgcgaagttcaaggttcccgatcgcgacacgctggcgcgttacgtcggccgcaaggccgccctagtcgcgcggctcgttccgctgctcgaggcggatttggcggcctgcggcatgcgttcgcttttttacgacctggagctgccgctttcatccgaactcgccgtcatggagacggtcggcgtccgcgtcgacgcggcggcgctcgccgcctacggcgaggaattgcgcgaggcggcggcgaaagtcgagcgggagatttacgagctggccgggacgacgttcaacatcggatcgacgaaacagctcggcgaaattttgttcgataagctggggctgcccgtcgtcaagaaaacgaaaaccggctattccaccgacgcagacgtgctggaggaactggcgccgtaccatccgatcgtcgaaaagattttgcattaccgccaactgacgaaattgcagtcgacctacatcgaggggcttttgaaagaaatccgtccgcaaaccggtaaaatccatacgtattatcagcagacgatcgcggcgacggggcggctgagcagtcagtttcccaatcttcagaacattccgatccgtctcgaagaggggcggaaaatccgcaaggcgttcgttccgtcagaaccgggatggctgatgctcgccgccgactattcgcagatcgaactgcgcgtgctcgcgcacgtttccggcgacgaacggctgaaggaagcgtttcggacaggcatggacatccacacgaagaccgcgatggacgtgttcggcgtttccgaagaccgcgtcgacgcgcgcatgcggcggcaggcgaaggcggtcaatttcggcatcatctacggcatcagcgatttcggactggcgcaaaacctgaacatttcccgcaaggaggcggcggagttcatccggcaatatttcgccgtcttttcgggcgtcaaggcgtaccgcgagcggatcgtcgagcaggcgcgccgcgacggttacgtgacgaccctgctcggtcgcaggcgcgctttgccggacatcaacgcgtcgaattacaacctccgctcgttcgcggagcggacggcgatgaatacgccgatccagggcacggccgccgacatcatcaagaccgcgatggtgcgtctgacgcggcggatgcgcgacgtcggactgaagagccgcatgctgctgcaggttcacgacgagctcgtgtttgaagtgccgccggacgagctcgacgcgatgcgggagcttgtgacggacgtcatggagtcggcggtcccgctcgacgtgccgctgaaggtcgacgtcagctggggcgccgactggtacgcggcgaagtgagggaagcgggatcc

SEQ ID NO: 1037 - DNA, 2792 bp, Artificial Sequence
  Description of Artificial Sequence: Synthetic Caldibacillus cellulovorans CompA.2 DNA Polymerase Y821R
atgaaatacctgctgccgaccgctgctgctggtctgctgctcctcgctgcccagccggcgatggccatgggcaaactgattctggtcgacggaaacagcgtcgccaaccgggcgttttacgccgtccggctgctcagcacgcgcggcggcctgcacacaaacgcggtgtacggattcgccaacatgttgctcaagctgatcgaggaggaacggccgacgcattttctcgtcgcgttcgacgcgggcaaggcgacgttccgtcatcgcgaatacgaggcctacaaggcgggtcgcctgcagacgccgcccgagctgtccgagcagtttccgtacatccgggagctcgtccgggcgttcggcgtcgcgtccggcgagctggaggaatacgaggcggacgacatgatcggtacgctggcgaaacgggcggaggccgagggcgtcgacacgctggtcgtcaccggcgaccgcgatttgctccagctcgtatcggaccgcgtgaccgtcgcgctgacgcgcaagggcatcacggaaacggagcggtacgacccggcgcgcatccgcgaggaatacggcttcgatcccgaccgcatccgcgacctcaaagggctgatgggcgacgcgtctgacaatcttcccggcgttcccggcgtcggtgagaaaaccgcactgaaactgctcaggcagtacggttcgctggagagcgtcctggaacacgcgtcggaaatcgccggaaagctcggtgaaaatctgcgggcgcacgccgacgccgcccgattgagcaagcggctggcgacgatcgactgcgcggtaccgttgcagtcgggatgggactggctgcgcctcggcgaaccggaccgcgccgcgctcgcctcgctgttgcggcagctcgaattcaagtcgctgttgaaacggctcggactcgacggcacgtccgccgatgccgacgtcgacggcgtccgttcctccgcgcggccggcggacgagaaacggccgagggccgtcgccgtcgctgaggagggcgtcgacgtccgctgtccggatcgcccggaagaagtcgaagaagcgctgtcgcggctggaagccgcccagtcggtcgtcgtcgaggtgacgggcgacaacccgcacgacggcgaagtgcgcggcgtcgcatggtgggacggacatacggcgtatttcattccgtttgaacggctggtgcagtccgacatgcggccgctggccgactggctcgccgacgcgcgtcggccgaagcgtacgcacgactcccatcgcgctgaagtggcgctgttctggcacggccttgcgtttcgcggcacgtcgttctgcacgcatatcgccgcctatttgctcgaccccacggaatcgcgccatacgctggcggacctgtcgcgccgctacggtctgccgccggtaccggaagccgaggacgtttacggcaagggcgcgaagttcaaggttcccgatcgcgacacgctggcgcgttacgtcggccgcaaggccgccctagtcgcgcggctcgttccgctgctcgaggcggatttggcggcctgcggcatgcgttcgcttttttacgacctggagctgccgctttcatccgaactcgccgtcatggagacggtcggcgtccgcgtcgacgcggcggcgctcgccgcctacggcgaggaattgcgcgaggcggcggcgaaagtcgagcgggagatttacgagctggccgggacgacgttcaacatcggatcgacgaaacagctcggcgaaattttgttcgataagctggggctgcccgtcgtcaagaaaacgaaaaccggctattccaccgacgcagacgtgctggaggaactggcgccgtaccatccgatcgtcgaaaagattttgcattaccgccaactgacgaaattgcagtcgacctacatcgaggggcttttgaaagaaatccgtccgcaaaccggtaaaatccatacgtattatcagcagacgatcgcggcgacggggcggctgagcagtcagtttcccaatcttcagaacattccgatccgtctcgaagaggggcggaaaatccgcaaggcgttcgttccgtcagaaccgggatggctgatgctcgccgccgactattcgcagatcgaactgcgcgtgctcgcgcacgtttccggcgacgaacggctgaaggaagcgtttcggacaggcatggacatccacacgaagaccgcgatggacgtgttcggcgtttccgaagaccgcgtcgacgcgcgcatgcggcggcaggcgaaggcggtcaatttcggcatcatctacggcatcagcgatttcggactggcgcaaaacctgaacatttcccgcaaggaggcggcggagttcatccggcaatatttcgccgtcttttcgggcgtcaaggcgtaccgcgagcggatcgtcgagcaggcgcgccgcgacggttacgtgacgaccctgctcggtcgcaggcgccgtttgccggacatcaacgcgtcgaattacaacctccgctcgttcgcggagcggacggcgatgaatacgccgatccagggcacggccgccgacatcatcaagaccgcgatggtgcgtctgacgcggcggatgcgcgacgtcggactgaagagccgcatgctgctgcaggttcacgacgagctcgtgtttgaagtgccgccggacgagctcgacgcgatgcgggagcttgtgacggacgtcatggagtcggcggtcccgctcgacgtgccgctgaaggtcgacgtcagctggggcgccgactggtacgcggcgaagtgagggaagcgggatcc

SEQ ID NO: 1038 - DNA, 2792 bp, Artificial Sequence
  Description of Artificial Sequence: Synthetic Caldibacillus cellulovorans CompA.2 DNA Polymerase Y821N
atgaaatacctgctgccgaccgctgctgctggtctgctgctcctcgctgcccagccggcgatggccatgggcaaactgattctggtcgacggaaacagcgtcgccaaccgggcgttttacgccgtccggctgctcagcacgcgcggcggcctgcacacaaacgcggtgtacggattcgccaacatgttgctcaagctgatcgaggaggaacggccgacgcattttctcgtcgcgttcgacgcgggcaaggcgacgttccgtcatcgcgaatacgaggcctacaaggcgggtcgcctgcagacgccgcccgagctgtccgagcagtttccgtacatccgggagctcgtccgggcgttcggcgtcgcgtccggcgagctggaggaatacgaggcggacgacatgatcggtacgctggcgaaacgggcggaggccgagggcgtcgacacgctggtcgtcaccggcgaccgcgatttgctccagctcgtatcggaccgcgtgaccgtcgcgctgacgcgcaagggcatcacggaaacggagcggtacgacccggcgcgcatccgcgaggaatacggcttcgatcccgaccgcatccgcgacctcaaagggctgatgggcgacgcgtctgacaatcttcccggcgttcccggcgtcggtgagaaaaccgcactgaaactgctcaggcagtacggttcgctggagagcgtcctggaacacgcgtcggaaatcgccggaaagctcggtgaaaatctgcgggcgcacgccgacgccgcccgattgagcaagcggctggcgacgatcgactgcgcggtaccgttgcagtcgggatgggactggctgcgcctcggcgaaccggaccgcgccgcgctcgcctcgctgttgcggcagctcgaattcaagtcgctgttgaaacggctcggactcgacggcacgtccgccgatgccgacgtcgacggcgtccgttcctccgcgcggccggcggacgagaaacggccgagggccgtcgccgtcgctgaggagggcgtcgacgtccgctgtccggatcgcccggaagaagtcgaagaagcgctgtcgcggctggaagccgcccagtcggtcgtcgtcgaggtgacgggcgacaacccgcacgacggcgaagtgcgcggcgtcgcatggtgggacggacatacggcgtatttcattccgtttgaacggctggtgcagtccgacatgcggccgctggccgactggctcgccgacgcgcgtcggccgaagcgtacgcacgactcccatcgcgctgaagtggcgctgttctggcacggccttgcgtttcgcggcacgtcgttctgcacgcatatcgccgcctatttgctcgaccccacggaatcgcgccatacgctggcggacctgtcgcgccgctacggtctgccgccggtaccggaagccgaggacgtttacggcaagggcgcgaagttcaaggttcccgatcgcgacacgctggcgcgttacgtcggccgcaaggccgccctagtcgcgcggctcgttccgctgctcgaggcggatttggcggcctgcggcatgcgttcgcttttttacgacctggagctgccgctttcatccgaactcgccgtcatggagacggtcggcgtccgcgtcgacgcggcggcgctcgccgcctacggcgaggaattgcgcgaggcggcggcgaaagtcgagcgggagatttacgagctggccgggacgacgttcaacatcggatcgacgaaacagctcggcgaaattttgttcgataagctggggctgcccgtcgtcaagaaaacgaaaaccggctattccaccgacgcagacgtgctggaggaactggcgccgtaccatccgatcgtcgaaaagattttgcattaccgccaactgacgaaattgcagtcgacctacatcgaggggcttttgaaagaaatccgtccgcaaaccggtaaaatccatacgtattatcagcagacgatcgcggcgacggggcggctgagcagtcagtttcccaatcttcagaacattccgatccgtctcgaagaggggcggaaaatccgcaaggcgttcgttccgtcagaaccgggatggctgatgctcgccgccgactattcgcagatcgaactgcgcgtgctcgcgcacgtttccggcgacgaacggctgaaggaagcgtttcggacaggcatggacatccacacgaagaccgcgatggacgtgttcggcgtttccgaagaccgcgtcgacgcgcgcatgcggcggcaggcgaaggcggtcaatttcggcatcatctacggcatcagcgatttcggactggcgcaaaacctgaacatttcccgcaaggaggcggcggagttcatccggcaatatttcgccgtcttttcgggcgtcaaggcgtaccgcgagcggatcgtcgagcaggcgcgccgcgacggttacgtgacgaccctgctcggtcgcaggcgcaatttgccggacatcaacgcgtcgaattacaacctccgctcgttcgcggagcggacggcgatgaatacgccgatccagggcacggccgccgacatcatcaagaccgcgatggtgcgtctgacgcggcggatgcgcgacgtcggactgaagagccgcatgctgctgcaggttcacgacgagctcgtgtttgaagtgccgccggacgagctcgacgcgatgcgggagcttgtgacggacgtcatggagtcggcggtcccgctcgacgtgccgctgaaggtcgacgtcagctggggcgccgactggtacgcggcgaagtgagggaagcgggatcc

SEQ ID NO: 1039 - DNA, 2792 bp, Artificial Sequence
  Description of Artificial Sequence: Synthetic Caldibacillus cellulovorans CompA.2 DNA Polymerase Y821D
atgaaatacctgctgccgaccgctgctgctggtctgctgctcctcgctgcccagccggcgatggccatgggcaaactgattctggtcgacggaaacagcgtcgccaaccgggcgttttacgccgtccggctgctcagcacgcgcggcggcctgcacacaaacgcggtgtacggattcgccaacatgttgctcaagctgatcgaggaggaacggccgacgcattttctcgtcgcgttcgacgcgggcaaggcgacgttccgtcatcgcgaatacgaggcctacaaggcgggtcgcctgcagacgccgcccgagctgtccgagcagtttccgtacatccgggagctcgtccgggcgttcggcgtcgcgtccggcgagctggaggaatacgaggcggacgacatgatcggtacgctggcgaaacgggcggaggccgagggcgtcgacacgctggtcgtcaccggcgaccgcgatttgctccagctcgtatcggaccgcgtgaccgtcgcgctgacgcgcaagggcatcacggaaacggagcggtacgacccggcgcgcatccgcgaggaatacggcttcgatcccgaccgcatccgcgacctcaaagggctgatgggcgacgcgtctgacaatcttcccggcgttcccggcgtcggtgagaaaaccgcactgaaactgctcaggcagtacggttcgctggagagcgtcctggaacacgcgtcggaaatcgccggaaagctcggtgaaaatctgcgggcgcacgccgacgccgcccgattgagcaagcggctggcgacgatcgactgcgcggtaccgttgcagtcgggatgggactggctgcgcctcggcgaaccggaccgcgccgcgctcgcctcgctgttgcggcagctcgaattcaagtcgctgttgaaacggctcggactcgacggcacgtccgccgatgccgacgtcgacggcgtccgttcctccgcgcggccggcggacgagaaacggccgagggccgtcgccgtcgctgaggagggcgtcgacgtccgctgtccggatcgcccggaagaagtcgaagaagcgctgtcgcggctggaagccgcccagtcggtcgtcgtcgaggtgacgggcgacaacccgcacgacggcgaagtgcgcggcgtcgcatggtgggacggacatacggcgtatttcattccgtttgaacggctggtgcagtccgacatgcggccgctggccgactggctcgccgacgcgcgtcggccgaagcgtacgcacgactcccatcgcgctgaagtggcgctgttctggcacggccttgcgtttcgcggcacgtcgttctgcacgcatatcgccgcctatttgctcgaccccacggaatcgcgccatacgctggcggacctgtcgcgccgctacggtctgccgccggtaccggaagccgaggacgtttacggcaagggcgcgaagttcaaggttcccgatcgcgacacgctggcgcgttacgtcggccgcaaggccgccctagtcgcgcggctcgttccgctgctcgaggcggatttggcggcctgcggcatgcgttcgcttttttacgacctggagctgccgctttcatccgaactcgccgtcatggagacggtcggcgtccgcgtcgacgcggcggcgctcgccgcctacggcgaggaattgcgcgaggcggcggcgaaagtcgagcgggagatttacgagctggccgggacgacgttcaacatcggatcgacgaaacagctcggcgaaattttgttcgataagctggggctgcccgtcgtcaagaaaacgaaaaccggctattccaccgacgcagacgtgctggaggaactggcgccgtaccatccgatcgtcgaaaagattttgcattaccgccaactgacgaaattgcagtcgacctacatcgaggggcttttgaaagaaatccgtccgcaaaccggtaaaatccatacgtattatcagcagacgatcgcggcgacggggcggctgagcagtcagtttcccaatcttcagaacattccgatccgtctcgaagaggggcggaaaatccgcaaggcgttcgttccgtcagaaccgggatggctgatgctcgccgccgactattcgcagatcgaactgcgcgtgctcgcgcacgtttccggcgacgaacggctgaaggaagcgtttcggacaggcatggacatccacacgaagaccgcgatggacgtgttcggcgtttccgaagaccgcgtcgacgcgcgcatgcggcggcaggcgaaggcggtcaatttcggcatcatctacggcatcagcgatttcggactggcgcaaaacctgaacatttcccgcaaggaggcggcggagttcatccggcaatatttcgccgtcttttcgggcgtcaaggcgtaccgcgagcggatcgtcgagcaggcgcgccgcgacggttacgtgacgaccctgctcggtcgcaggcgcgatttgccggacatcaacgcgtcgaattacaacctccgctcgttcgcggagcggacggcgatgaatacgccgatccagggcacggccgccgacatcatcaagaccgcgatggtgcgtctgacgcggcggatgcgcgacgtcggactgaagagccgcatgctgctgcaggttcacgacgagctcgtgtttgaagtgccgccggacgagctcgacgcgatgcgggagcttgtgacggacgtcatggagtcggcggtcccgctcgacgtgccgctgaaggtcgacgtcagctggggcgccgactggtacgcggcgaagtgagggaagcgggatcc

SEQ ID NO: 1040 - DNA, 2792 bp, Artificial Sequence
  Description of Artificial Sequence: Synthetic Caldibacillus cellulovorans CompA.2 DNA Polymerase Y821C
atgaaatacctgctgccgaccgctgctgctggtctgctgctcctcgctgcccagccggcgatggccatgggcaaactgattctggtcgacggaaacagcgtcgccaaccgggcgttttacgccgtccggctgctcagcacgcgcggcggcctgcacacaaacgcggtgtacggattcgccaacatgttgctcaagctgatcgaggaggaacggccgacgcattttctcgtcgcgttcgacgcgggcaaggcgacgttccgtcatcgcgaatacgaggcctacaaggcgggtcgcctgcagacgccgcccgagctgtccgagcagtttccgtacatccgggagctcgtccgggcgttcggcgtcgcgtccggcgagctggaggaatacgaggcggacgacatgatcggtacgctggcgaaacgggcggaggccgagggcgtcgacacgctggtcgtcaccggcgaccgcgatttgctccagctcgtatcggaccgcgtgaccgtcgcgctgacgcgcaagggcatcacggaaacggagcggtacgacccggcgcgcatccgcgaggaatacggcttcgatcccgaccgcatccgcgacctcaaagggctgatgggcgacgcgtctgacaatcttcccggcgttcccggcgtcggtgagaaaaccgcactgaaactgctcaggcagtacggttcgctggagagcgtcctggaacacgcgtcggaaatcgccggaaagctcggtgaaaatctgcgggcgcacgccgacgccgcccgattgagcaagcggctggcgacgatcgactgcgcggtaccgttgcagtcgggatgggactggctgcgcctcggcgaaccggaccgcgccgcgctcgcctcgctgttgcggcagctcgaattcaagtcgctgttgaaacggctcggactcgacggcacgtccgccgatgccgacgtcgacggcgtccgttcctccgcgcggccggcggacgagaaacggccgagggccgtcgccgtcgctgaggagggcgtcgacgtccgctgtccggatcgcccggaagaagtcgaagaagcgctgtcgcggctggaagccgcccagtcggtcgtcgtcgaggtgacgggcgacaacccgcacgacggcgaagtgcgcggcgtcgcatggtgggacggacatacggcgtatttcattccgtttgaacggctggtgcagtccgacatgcggccgctggccgactggctcgccgacgcgcgtcggccgaagcgtacgcacgactcccatcgcgctgaagtggcgctgttctggcacggccttgcgtttcgcggcacgtcgttctgcacgcatatcgccgcctatttgctcgaccccacggaatcgcgccatacgctggcggacctgtcgcgccgctacggtctgccgccggtaccggaagccgaggacgtttacggcaagggcgcgaagttcaaggttcccgatcgcgacacgctggcgcgttacgtcggccgcaaggccgccctagtcgcgcggctcgttccgctgctcgaggcggatttggcggcctgcggcatgcgttcgcttttttacgacctggagctgccgctttcatccgaactcgccgtcatggagacggtcggcgtccgcgtcgacgcggcggcgctcgccgcctacggcgaggaattgcgcgaggcggcggcgaaagtcgagcgggagatttacgagctggccgggacgacgttcaacatcggatcgacgaaacagctcggcgaaattttgttcgataagctggggctgcccgtcgtcaagaaaacgaaaaccggctattccaccgacgcagacgtgctggaggaactggcgccgtaccatccgatcgtcgaaaagattttgcattaccgccaactgacgaaattgcagtcgacctacatcgaggggcttttgaaagaaatccgtccgcaaaccggtaaaatccatacgtattatcagcagacgatcgcggcgacggggcggctgagcagtcagtttcccaatcttcagaacattccgatccgtctcgaagaggggcggaaaatccgcaaggcgttcgttccgtcagaaccgggatggctgatgctcgccgccgactattcgcagatcgaactgcgcgtgctcgcgcacgtttccggcgacgaacggctgaaggaagcgtttcggacaggcatggacatccacacgaagaccgcgatggacgtgttcggcgtttccgaagaccgcgtcgacgcgcgcatgcggcggcaggcgaaggcggtcaatttcggcatcatctacggcatcagcgatttcggactggcgcaaaacctgaacatttcccgcaaggaggcggcggagttcatccggcaatatttcgccgtcttttcgggcgtcaaggcgtaccgcgagcggatcgtcgagcaggcgcgccgcgacggttacgtgacgaccctgctcggtcgcaggcgctgtttgccggacatcaacgcgtcgaattacaacctccgctcgttcgcggagcggacggcgatgaatacgccgatccagggcacggccgccgacatcatcaagaccgcgatggtgcgtctgacgcggcggatgcgcgacgtcggactgaagagccgcatgctgctgcaggttcacgacgagctcgtgtttgaagtgccgccggacgagctcgacgcgatgcgggagcttgtgacggacgtcatggagtcggcggtcccgctcgacgtgccgctgaaggtcgacgtcagctggggcgccgactggtacgcggcgaagtgagggaagcgggatcc

SEQ ID NO: 1041 - DNA, 2792 bp, Artificial Sequence
  Description of Artificial Sequence: Synthetic Caldibacillus cellulovorans CompA.2 DNA Polymerase Y821E
atgaaatacctgctgccgaccgctgctgctggtctgctgctcctcgctgcccagccggcgatggccatgggcaaactgattctggtcgacggaaacagcgtcgccaaccgggcgttttacgccgtccggctgctcagcacgcgcggcggcctgcacacaaacgcggtgtacggattcgccaacatgttgctcaagctgatcgaggaggaacggccgacgcattttctcgtcgcgttcgacgcgggcaaggcgacgttccgtcatcgcgaatacgaggcctacaaggcgggtcgcctgcagacgccgcccgagctgtccgagcagtttccgtacatccgggagctcgtccgggcgttcggcgtcgcgtccggcgagctggaggaatacgaggcggacgacatgatcggtacgctggcgaaacgggcggaggccgagggcgtcgacacgctggtcgtcaccggcgaccgcgatttgctccagctcgtatcggaccgcgtgaccgtcgcgctgacgcgcaagggcatcacggaaacggagcggtacgacccggcgcgcatccgcgaggaatacggcttcgatcccgaccgcatccgcgacctcaaagggctgatgggcgacgcgtctgacaatcttcccggcgttcccggcgtcggtgagaaaaccgcactgaaactgctcaggcagtacggttcgctggagagcgtcctggaacacgcgtcggaaatcgccggaaagctcggtgaaaatctgcgggcgcacgccgacgccgcccgattgagcaagcggctggcgacgatcgactgcgcggtaccgttgcagtcgggatgggactggctgcgcctcggcgaaccggaccgcgccgcgctcgcctcgctgttgcggcagctcgaattcaagtcgctgttgaaacggctcggactcgacggcacgtccgccgatgccgacgtcgacggcgtccgttcctccgcgcggccggcggacgagaaacggccgagggccgtcgccgtcgctgaggagggcgtcgacgtccgctgtccggatcgcccggaagaagtcgaagaagcgctgtcgcggctggaagccgcccagtcggtcgtcgtcgaggtgacgggcgacaacccgcacgacggcgaagtgcgcggcgtcgcatggtgggacggacatacggcgtatttcattccgtttgaacggctggtgcagtccgacatgcggccgctggccgactggctcgccgacgcgcgtcggccgaagcgtacgcacgactcccatcgcgctgaagtggcgctgttctggcacggccttgcgtttcgcggcacgtcgttctgcacgcatatcgccgcctatttgctcgaccccacggaatcgcgccatacgctggcggacctgtcgcgccgctacggtctgccgccggtaccggaagccgaggacgtttacggcaagggcgcgaagttcaaggttcccgatcgcgacacgctggcgcgttacgtcggccgcaaggccgccctagtcgcgcggctcgttccgctgctcgaggcggatttggcggcctgcggcatgcgttcgcttttttacgacctggagctgccgctttcatccgaactcgccgtcatggagacggtcggcgtccgcgtcgacgcggcggcgctcgccgcctacggcgaggaattgcgcgaggcggcggcgaaagtcgagcgggagatttacgagctggccgggacgacgttcaacatcggatcgacgaaacagctcggcgaaattttgttcgataagctggggctgcccgtcgtcaagaaaacgaaaaccggctattccaccgacgcagacgtgctggaggaactggcgccgtaccatccgatcgtcgaaaagattttgcattaccgccaactgacgaaattgcagtcgacctacatcgaggggcttttgaaagaaatccgtccgcaaaccggtaaaatccatacgtattatcagcagacgatcgcggcgacggggcggctgagcagtcagtttcccaatcttcagaacattccgatccgtctcgaagaggggcggaaaatccgcaaggcgttcgttccgtcagaaccgggatggctgatgctcgccgccgactattcgcagatcgaactgcgcgtgctcgcgcacgtttccggcgacgaacggctgaaggaagcgtttcggacaggcatggacatccacacgaagaccgcgatggacgtgttcggcgtttccgaagaccgcgtcgacgcgcgcatgcggcggcaggcgaaggcggtcaatttcggcatcatctacggcatcagcgatttcggactggcgcaaaacctgaacatttcccgcaaggaggcggcggagttcatccggcaatatttcgccgtcttttcgggcgtcaaggcgtaccgcgagcggatcgtcgagcaggcgcgccgcgacggttacgtgacgaccctgctcggtcgcaggcgcgaattgccggacatcaacgcgtcgaattacaacctccgctcgttcgcggagcggacggcgatgaatacgccgatccagggcacggccgccgacatcatcaagaccgcgatggtgcgtctgacgcggcggatgcgcgacgtcggactgaagagccgcatgctgctgcaggttcacgacgagctcgtgtttgaagtgccgccggacgagctcgacgcgatgcgggagcttgtgacggacgtcatggagtcggcggtcccgctcgacgtgccgctgaaggtcgacgtcagctggggcgccgactggtacgcggcgaagtgagggaagcgggatcc

SEQ ID NO: 1042 - DNA, 2792 bp, Artificial Sequence
  Description of Artificial Sequence: Synthetic Caldibacillus cellulovorans CompA.2 DNA Polymerase Y821Q
atgaaatacctgctgccgaccgctgctgctggtctgctgctcctcgctgcccagccggcgatggccatgggcaaactgattctggtcgacggaaacagcgtcgccaaccgggcgttttacgccgtccggctgctcagcacgcgcggcggcctgcacacaaacgcggtgtacggattcgccaacatgttgctcaagctgatcgaggaggaacggccgacgcattttctcgtcgcgttcgacgcgggcaaggcgacgttccgtcatcgcgaatacgaggcctacaaggcgggtcgcctgcagacgccgcccgagctgtccgagcagtttccgtacatccgggagctcgtccgggcgttcggcgtcgcgtccggcgagctggaggaatacgaggcggacgacatgatcggtacgctggcgaaacgggcggaggccgagggcgtcgacacgctggtcgtcaccggcgaccgcgatttgctccagctcgtatcggaccgcgtgaccgtcgcgctgacgcgcaagggcatcacggaaacggagcggtacgacccggcgcgcatccgcgaggaatacggcttcgatcccgaccgcatccgcgacctcaaagggctgatgggcgacgcgtctgacaatcttcccggcgttcccggcgtcggtgagaaaaccgcactgaaactgctcaggcagtacggttcgctggagagcgtcctggaacacgcgtcggaaatcgccggaaagctcggtgaaaatctgcgggcgcacgccgacgccgcccgattgagcaagcggctggcgacgatcgactgcgcggtaccgttgcagtcgggatgggactggctgcgcctcggcgaaccggaccgcgccgcgctcgcctcgctgttgcggcagctcgaattcaagtcgctgttgaaacggctcggactcgacggcacgtccgccgatgccgacgtcgacggcgtccgttcctccgcgcggccggcggacgagaaacggccgagggccgtcgccgtcgctgaggagggcgtcgacgtccgctgtccggatcgcccggaagaagtcgaagaagcgctgtcgcggctggaagccgcccagtcggtcgtcgtcgaggtgacgggcgacaacccgcacgacggcgaagtgcgcggcgtcgcatggtgggacggacatacggcgtatttcattccgtttgaacggctggtgcagtccgacatgcggccgctggccgactggctcgccgacgcgcgtcggccgaagcgtacgcacgactcccatcgcgctgaagtggcgctgttctggcacggccttgcgtttcgcggcacgtcgttctgcacgcatatcgccgcctatttgctcgaccccacggaatcgcgccatacgctggcggacctgtcgcgccgctacggtctgccgccggtaccggaagccgaggacgtttacggcaagggcgcgaagttcaaggttcccgatcgcgacacgctggcgcgttacgtcggccgcaaggccgccctagtcgcgcggctcgttccgctgctcgaggcggatttggcggcctgcggcatgcgttcgcttttttacgacctggagctgccgctttcatccgaactcgccgtcatggagacggtcggcgtccgcgtcgacgcggcggcgctcgccgcctacggcgaggaattgcgcgaggcggcggcgaaagtcgagcgggagatttacgagctggccgggacgacgttcaacatcggatcgacgaaacagctcggcgaaattttgttcgataagctggggctgcccgtcgtcaagaaaacgaaaaccggctattccaccgacgcagacgtgctggaggaactggcgccgtaccatccgatcgtcgaaaagattttgcattaccgccaactgacgaaattgcagtcgacctacatcgaggggcttttgaaagaaatccgtccgcaaaccggtaaaatccatacgtattatcagcagacgatcgcggcgacggggcggctgagcagtcagtttcccaatcttcagaacattccgatccgtctcgaagaggggcggaaaatccgcaaggcgttcgttccgtcagaaccgggatggctgatgctcgccgccgactattcgcagatcgaactgcgcgtgctcgcgcacgtttccggcgacgaacggctgaaggaagcgtttcggacaggcatggacatccacacgaagaccgcgatggacgtgttcggcgtttccgaagaccgcgtcgacgcgcgcatgcggcggcaggcgaaggcggtcaatttcggcatcatctacggcatcagcgatttcggactggcgcaaaacctgaacatttcccgcaaggaggcggcggagttcatccggcaatatttcgccgtcttttcgggcgtcaaggcgtaccgcgagcggatcgtcgagcaggcgcgccgcgacggttacgtgacgaccctgctcggtcgcaggcgccaattgccggacatcaacgcgtcgaattacaacctccgctcgttcgcggagcggacggcgatgaatacgccgatccagggcacggccgccgacatcatcaagaccgcgatggtgcgtctgacgcggcggatgcgcgacgtcggactgaagagccgcatgctgctgcaggttcacgacgagctcgtgtttgaagtgccgccggacgagctcgacgcgatgcgggagcttgtgacggacgtcatggagtcggcggtcccgctcgacgtgccgctgaaggtcgacgtcagctggggcgccgactggtacgcggcgaagtgagggaagcgggatcc

SEQ ID NO: 1043 - DNA, 2792 bp, Artificial Sequence
  Description of Artificial Sequence: Synthetic Caldibacillus cellulovorans CompA.2 DNA Polymerase Y821G
atgaaatacctgctgccgaccgctgctgctggtctgctgctcctcgctgcccagccggcgatggccatgggcaaactgattctggtcgacggaaacagcgtcgccaaccgggcgttttacgccgtccggctgctcagcacgcgcggcggcctgcacacaaacgcggtgtacggattcgccaacatgttgctcaagctgatcgaggaggaacggccgacgcattttctcgtcgcgttcgacgcgggcaaggcgacgttccgtcatcgcgaatacgaggcctacaaggcgggtcgcctgcagacgccgcccgagctgtccgagcagtttccgtacatccgggagctcgtccgggcgttcggcgtcgcgtccggcgagctggaggaatacgaggcggacgacatgatcggtacgctggcgaaacgggcggaggccgagggcgtcgacacgctggtcgtcaccggcgaccgcgatttgctccagctcgtatcggaccgcgtgaccgtcgcgctgacgcgcaagggcatcacggaaacggagcggtacgacccggcgcgcatccgcgaggaatacggcttcgatcccgaccgcatccgcgacctcaaagggctgatgggcgacgcgtctgacaatcttcccggcgttcccggcgtcggtgagaaaaccgcactgaaactgctcaggcagtacggttcgctggagagcgtcctggaacacgcgtcggaaatcgccggaaagctcggtgaaaatctgcgggcgcacgccgacgccgcccgattgagcaagcggctggcgacgatcgactgcgcggtaccgttgcagtcgggatgggactggctgcgcctcggcgaaccggaccgcgccgcgctcgcctcgctgttgcggcagctcgaattcaagtcgctgttgaaacggctcggactcgacggcacgtccgccgatgccgacgtcgacggcgtccgttcctccgcgcggccggcggacgagaaacggccgagggccgtcgccgtcgctgaggagggcgtcgacgtccgctgtccggatcgcccggaagaagtcgaagaagcgctgtcgcggctggaagccgcccagtcggtcgtcgtcgaggtgacgggcgacaacccgcacgacggcgaagtgcgcggcgtcgcatggtgggacggacatacggcgtatttcattccgtttgaacggctggtgcagtccgacatgcggccgctggccgactggctcgccgacgcgcgtcggccgaagcgtacgcacgactcccatcgcgctgaagtggcgctgttctggcacggccttgcgtttcgcggcacgtcgttctgcacgcatatcgccgcctatttgctcgaccccacggaatcgcgccatacgctggcggacctgtcgcgccgctacggtctgccgccggtaccggaagccgaggacgtttacggcaagggcgcgaagttcaaggttcccgatcgcgacacgctggcgcgttacgtcggccgcaaggccgccctagtcgcgcggctcgttccgctgctcgaggcggatttggcggcctgcggcatgcgttcgcttttttacgacctggagctgccgctttcatccgaactcgccgtcatggagacggtcggcgtccgcgtcgacgcggcggcgctcgccgcctacggcgaggaattgcgcgaggcggcggcgaaagtcgagcgggagatttacgagctggccgggacgacgttcaacatcggatcgacgaaacagctcggcgaaattttgttcgataagctggggctgcccgtcgtcaagaaaacgaaaaccggctattccaccgacgcagacgtgctggaggaactggcgccgtaccatccgatcgtcgaaaagattttgcattaccgccaactgacgaaattgcagtcgacctacatcgaggggcttttgaaagaaatccgtccgcaaaccggtaaaatccatacgtattatcagcagacgatcgcggcgacggggcggctgagcagtcagtttcccaatcttcagaacattccgatccgtctcgaagaggggcggaaaatccgcaaggcgttcgttccgtcagaaccgggatggctgatgctcgccgccgactattcgcagatcgaactgcgcgtgctcgcgcacgtttccggcgacgaacggctgaaggaagcgtttcggacaggcatggacatccacacgaagaccgcgatggacgtgttcggcgtttccgaagaccgcgtcgacgcgcgcatgcggcggcaggcgaaggcggtcaatttcggcatcatctacggcatcagcgatttcggactggcgcaaaacctgaacatttcccgcaaggaggcggcggagttcatccggcaatatttcgccgtcttttcgggcgtcaaggcgtaccgcgagcggatcgtcgagcaggcgcgccgcgacggttacgtgacgaccctgctcggtcgcaggcgcggtttgccggacatcaacgcgtcgaattacaacctccgctcgttcgcggagcggacggcgatgaatacgccgatccagggcacggccgccgacatcatcaagaccgcgatggtgcgtctgacgcggcggatgcgcgacgtcggactgaagagccgcatgctgctgcaggttcacgacgagctcgtgtttgaagtgccgccggacgagctcgacgcgatgcgggagcttgtgacggacgtcatggagtcggcggtcccgctcgacgtgccgctgaaggtcgacgtcagctggggcgccgactggtacgcggcgaagtgagggaagcgggatcc

SEQ ID NO: 1044 - DNA, 2792 bp, Artificial Sequence
  Description of Artificial Sequence: Synthetic Caldibacillus cellulovorans CompA.2 DNA Polymerase Y821H
atgaaatacctgctgccgaccgctgctgctggtctgctgctcctcgctgcccagccggcgatggccatgggcaaactgattctggtcgacggaaacagcgtcgccaaccgggcgttttacgccgtccggctgctcagcacgcgcggcggcctgcacacaaacgcggtgtacggattcgccaacatgttgctcaagctgatcgaggaggaacggccgacgcattttctcgtcgcgttcgacgcgggcaaggcgacgttccgtcatcgcgaatacgaggcctacaaggcgggtcgcctgcagacgccgcccgagctgtccgagcagtttccgtacatccgggagctcgtccgggcgttcggcgtcgcgtccggcgagctggaggaatacgaggcggacgacatgatcggtacgctggcgaaacgggcggaggccgagggcgtcgacacgctggtcgtcaccggcgaccgcgatttgctccagctcgtatcggaccgcgtgaccgtcgcgctgacgcgcaagggcatcacggaaacggagcggtacgacccggcgcgcatccgcgaggaatacggcttcgatcccgaccgcatccgcgacctcaaagggctgatgggcgacgcgtctgacaatcttcccggcgttcccggcgtcggtgagaaaaccgcactgaaactgctcaggcagtacggttcgctggagagcgtcctggaacacgcgtcggaaatcgccggaaagctcggtgaaaatctgcgggcgcacgccgacgccgcccgattgagcaagcggctggcgacgatcgactgcgcggtaccgttgcagtcgggatgggactggctgcgcctcggcgaaccggaccgcgccgcgctcgcctcgctgttgcggcagctcgaattcaagtcgctgttgaaacggctcggactcgacggcacgtccgccgatgccgacgtcgacggcgtccgttcctccgcgcggccggcggacgagaaacggccgagggccgtcgccgtcgctgaggagggcgtcgacgtccgctgtccggatcgcccggaagaagtcgaagaagcgctgtcgcggctggaagccgcccagtcggtcgtcgtcgaggtgacgggcgacaacccgcacgacggcgaagtgcgcggcgtcgcatggtgggacggacatacggcgtatttcattccgtttgaacggctggtgcagtccgacatgcggccgctggccgactggctcgccgacgcgcgtcggccgaagcgtacgcacgactcccatcgcgctgaagtggcgctgttctggcacggccttgcgtttcgcggcacgtcgttctgcacgcatatcgccgcctatttgctcgaccccacggaatcgcgccatacgctggcggacctgtcgcgccgctacggtctgccgccggtaccggaagccgaggacgtttacggcaagggcgcgaagttcaaggttcccgatcgcgacacgctggcgcgttacgtcggccgcaaggccgccctagtcgcgcggctcgttccgctgctcgaggcggatttggcggcctgcggcatgcgttcgcttttttacgacctggagctgccgctttcatccgaactcgccgtcatggagacggtcggcgtccgcgtcgacgcggcggcgctcgccgcctacggcgaggaattgcgcgaggcggcggcgaaagtcgagcgggagatttacgagctggccgggacgacgttcaacatcggatcgacgaaacagctcggcgaaattttgttcgataagctggggctgcccgtcgtcaagaaaacgaaaaccggctattccaccgacgcagacgtgctggaggaactggcgccgtaccatccgatcgtcgaaaagattttgcattaccgccaactgacgaaattgcagtcgacctacatcgaggggcttttgaaagaaatccgtccgcaaaccggtaaaatccatacgtattatcagcagacgatcgcggcgacggggcggctgagcagtcagtttcccaatcttcagaacattccgatccgtctcgaagaggggcggaaaatccgcaaggcgttcgttccgtcagaaccgggatggctgatgctcgccgccgactattcgcagatcgaactgcgcgtgctcgcgcacgtttccggcgacgaacggctgaaggaagcgtttcggacaggcatggacatccacacgaagaccgcgatggacgtgttcggcgtttccgaagaccgcgtcgacgcgcgcatgcggcggcaggcgaaggcggtcaatttcggcatcatctacggcatcagcgatttcggactggcgcaaaacctgaacatttcccgcaaggaggcggcggagttcatccggcaatatttcgccgtcttttcgggcgtcaaggcgtaccgcgagcggatcgtcgagcaggcgcgccgcgacggttacgtgacgaccctgctcggtcgcaggcgccatttgccggacatcaacgcgtcgaattacaacctccgctcgttcgcggagcggacggcgatgaatacgccgatccagggcacggccgccgacatcatcaagaccgcgatggtgcgtctgacgcggcggatgcgcgacgtcggactgaagagccgcatgctgctgcaggttcacgacgagctcgtgtttgaagtgccgccggacgagctcgacgcgatgcgggagcttgtgacggacgtcatggagtcggcggtcccgctcgacgtgccgctgaaggtcgacgtcagctggggcgccgactggtacgcggcgaagtgagggaagcgggatcc

SEQ ID NO: 1045 - DNA, 2792 bp, Artificial Sequence
  Description of Artificial Sequence: Synthetic Caldibacillus cellulovorans CompA.2 DNA Polymerase Y821I
atgaaatacctgctgccgaccgctgctgctggtctgctgctcctcgctgcccagccggcgatggccatgggcaaactgattctggtcgacggaaacagcgtcgccaaccgggcgttttacgccgtccggctgctcagcacgcgcggcggcctgcacacaaacgcggtgtacggattcgccaacatgttgctcaagctgatcgaggaggaacggccgacgcattttctcgtcgcgttcgacgcgggcaaggcgacgttccgtcatcgcgaatacgaggcctacaaggcgggtcgcctgcagacgccgcccgagctgtccgagcagtttccgtacatccgggagctcgtccgggcgttcggcgtcgcgtccggcgagctggaggaatacgaggcggacgacatgatcggtacgctggcgaaacgggcggaggccgagggcgtcgacacgctggtcgtcaccggcgaccgcgatttgctccagctcgtatcggaccgcgtgaccgtcgcgctgacgcgcaagggcatcacggaaacggagcggtacgacccggcgcgcatccgcgaggaatacggcttcgatcccgaccgcatccgcgacctcaaagggctgatgggcgacgcgtctgacaatcttcccggcgttcccggcgtcggtgagaaaaccgcactgaaactgctcaggcagtacggttcgctggagagcgtcctggaacacgcgtcggaaatcgccggaaagctcggtgaaaatctgcgggcgcacgccgacgccgcccgattgagcaagcggctggcgacgatcgactgcgcggtaccgttgcagtcgggatgggactggctgcgcctcggcgaaccggaccgcgccgcgctcgcctcgctgttgcggcagctcgaattcaagtcgctgttgaaacggctcggactcgacggcacgtccgccgatgccgacgtcgacggcgtccgttcctccgcgcggccggcggacgagaaacggccgagggccgtcgccgtcgctgaggagggcgtcgacgtccgctgtccggatcgcccggaagaagtcgaagaagcgctgtcgcggctggaagccgcccagtcggtcgtcgtcgaggtgacgggcgacaacccgcacgacggcgaagtgcgcggcgtcgcatggtgggacggacatacggcgtatttcattccgtttgaacggctggtgcagtccgacatgcggccgctggccgactggctcgccgacgcgcgtcggccgaagcgtacgcacgactcccatcgcgctgaagtggcgctgttctggcacggccttgcgtttcgcggcacgtcgttctgcacgcatatcgccgcctatttgctcgaccccacggaatcgcgccatacgctggcggacctgtcgcgccgctacggtctgccgccggtaccggaagccgaggacgtttacggcaagggcgcgaagttcaaggttcccgatcgcgacacgctggcgcgttacgtcggccgcaaggccgccctagtcgcgcggctcgttccgctgctcgaggcggatttggcggcctgcggcatgcgttcgcttttttacgacctggagctgccgctttcatccgaactcgccgtcatggagacggtcggcgtccgcgtcgacgcggcggcgctcgccgcctacggcgaggaattgcgcgaggcggcggcgaaagtcgagcgggagatttacgagctggccgggacgacgttcaacatcggatcgacgaaacagctcggcgaaattttgttcgataagctggggctgcccgtcgtcaagaaaacgaaaaccggctattccaccgacgcagacgtgctggaggaactggcgccgtaccatccgatcgtcgaaaagattttgcattaccgccaactgacgaaattgcagtcgacctacatcgaggggcttttgaaagaaatccgtccgcaaaccggtaaaatccatacgtattatcagcagacgatcgcggcgacggggcggctgagcagtcagtttcccaatcttcagaacattccgatccgtctcgaagaggggcggaaaatccgcaaggcgttcgttccgtcagaaccgggatggctgatgctcgccgccgactattcgcagatcgaactgcgcgtgctcgcgcacgtttccggcgacgaacggctgaaggaagcgtttcggacaggcatggacatccacacgaagaccgcgatggacgtgttcggcgtttccgaagaccgcgtcgacgcgcgcatgcggcggcaggcgaaggcggtcaatttcggcatcatctacggcatcagcgatttcggactggcgcaaaacctgaacatttcccgcaaggaggcggcggagttcatccggcaatatttcgccgtcttttcgggcgtcaaggcgtaccgcgagcggatcgtcgagcaggcgcgccgcgacggttacgtgacgaccctgctcggtcgcaggcgcattttgccggacatcaacgcgtcgaattacaacctccgctcgttcgcggagcggacggcgatgaatacgccgatccagggcacggccgccgacatcatcaagaccgcgatggtgcgtctgacgcggcggatgcgcgacgtcggactgaagagccgcatgctgctgcaggttcacgacgagctcgtgtttgaagtgccgccggacgagctcgacgcgatgcgggagcttgtgacggacgtcatggagtcggcggtcccgctcgacgtgccgctgaaggtcgacgtcagctggggcgccgactggtacgcggcgaagtgagggaagcgggatcc

SEQ ID NO: 1046 - DNA, 2792 bp, Artificial Sequence
  Description of Artificial Sequence: Synthetic Caldibacillus cellulovorans CompA.2 DNA Polymerase Y821L
atgaaatacctgctgccgaccgctgctgctggtctgctgctcctcgctgcccagccggcgatggccatgggcaaactgattctggtcgacggaaacagcgtcgccaaccgggcgttttacgccgtccggctgctcagcacgcgcggcggcctgcacacaaacgcggtgtacggattcgccaacatgttgctcaagctgatcgaggaggaacggccgacgcattttctcgtcgcgttcgacgcgggcaaggcgacgttccgtcatcgcgaatacgaggcctacaaggcgggtcgcctgcagacgccgcccgagctgtccgagcagtttccgtacatccgggagctcgtccgggcgttcggcgtcgcgtccggcgagctggaggaatacgaggcggacgacatgatcggtacgctggcgaaacgggcggaggccgagggcgtcgacacgctggtcgtcaccggcgaccgcgatttgctccagctcgtatcggaccgcgtgaccgtcgcgctgacgcgcaagggcatcacggaaacggagcggtacgacccggcgcgcatccgcgaggaatacggcttcgatcccgaccgcatccgcgacctcaaagggctgatgggcgacgcgtctgacaatcttcccggcgttcccggcgtcggtgagaaaaccgcactgaaactgctcaggcagtacggttcgctggagagcgtcctggaacacgcgtcggaaatcgccggaaagctcggtgaaaatctgcgggcgcacgccgacgccgcccgattgagcaagcggctggcgacgatcgactgcgcggtaccgttgcagtcgggatgggactggctgcgcctcggcgaaccggaccgcgccgcgctcgcctcgctgttgcggcagctcgaattcaagtcgctgttgaaacggctcggactcgacggcacgtccgccgatgccgacgtcgacggcgtccgttcctccgcgcggccggcggacgagaaacggccgagggccgtcgccgtcgctgaggagggcgtcgacgtccgctgtccggatcgcccggaagaagtcgaagaagcgctgtcgcggctggaagccgcccagtcggtcgtcgtcgaggtgacgggcgacaacccgcacgacggcgaagtgcgcggcgtcgcatggtgggacggacatacggcgtatttcattccgtttgaacggctggtgcagtccgacatgcggccgctggccgactggctcgccgacgcgcgtcggccgaagcgtacgcacgactcccatcgcgctgaagtggcgctgttctggcacggccttgcgtttcgcggcacgtcgttctgcacgcatatcgccgcctatttgctcgaccccacggaatcgcgccatacgctggcggacctgtcgcgccgctacggtctgccgccggtaccggaagccgaggacgtttacggcaagggcgcgaagttcaaggttcccgatcgcgacacgctggcgcgttacgtcggccgcaaggccgccctagtcgcgcggctcgttccgctgctcgaggcggatttggcggcctgcggcatgcgttcgcttttttacgacctggagctgccgctttcatccgaactcgccgtcatggagacggtcggcgtccgcgtcgacgcggcggcgctcgccgcctacggcgaggaattgcgcgaggcggcggcgaaagtcgagcgggagatttacgagctggccgggacgacgttcaacatcggatcgacgaaacagctcggcgaaattttgttcgataagctggggctgcccgtcgtcaagaaaacgaaaaccggctattccaccgacgcagacgtgctggaggaactggcgccgtaccatccgatcgtcgaaaagattttgcattaccgccaactgacgaaattgcagtcgacctacatcgaggggcttttgaaagaaatccgtccgcaaaccggtaaaatccatacgtattatcagcagacgatcgcggcgacggggcggctgagcagtcagtttcccaatcttcagaacattccgatccgtctcgaagaggggcggaaaatccgcaaggcgttcgttccgtcagaaccgggatggctgatgctcgccgccgactattcgcagatcgaactgcgcgtgctcgcgcacgtttccggcgacgaacggctgaaggaagcgtttcggacaggcatggacatccacacgaagaccgcgatggacgtgttcggcgtttccgaagaccgcgtcgacgcgcgcatgcggcggcaggcgaaggcggtcaatttcggcatcatctacggcatcagcgatttcggactggcgcaaaacctgaacatttcccgcaaggaggcggcggagttcatccggcaatatttcgccgtcttttcgggcgtcaaggcgtaccgcgagcggatcgtcgagcaggcgcgccgcgacggttacgtgacgaccctgctcggtcgcaggcgccttttgccggacatcaacgcgtcgaattacaacctccgctcgttcgcggagcggacggcgatgaatacgccgatccagggcacggccgccgacatcatcaagaccgcgatggtgcgtctgacgcggcggatgcgcgacgtcggactgaagagccgcatgctgctgcaggttcacgacgagctcgtgtttgaagtgccgccggacgagctcgacgcgatgcgggagcttgtgacggacgtcatggagtcggcggtcccgctcgacgtgccgctgaaggtcgacgtcagctggggcgccgactggtacgcggcgaagtgagggaagcgggatcc

SEQ ID NO: 1047 - DNA, 2792 bp, Artificial Sequence
  Description of Artificial Sequence: Synthetic Caldibacillus cellulovorans CompA.2 DNA Polymerase Y821K
atgaaatacctgctgccgaccgctgctgctggtctgctgctcctcgctgcccagccggcgatggccatgggcaaactgattctggtcgacggaaacagcgtcgccaaccgggcgttttacgccgtccggctgctcagcacgcgcggcggcctgcacacaaacgcggtgtacggattcgccaacatgttgctcaagctgatcgaggaggaacggccgacgcattttctcgtcgcgttcgacgcgggcaaggcgacgttccgtcatcgcgaatacgaggcctacaaggcgggtcgcctgcagacgccgcccgagctgtccgagcagtttccgtacatccgggagctcgtccgggcgttcggcgtcgcgtccggcgagctggaggaatacgaggcggacgacatgatcggtacgctggcgaaacgggcggaggccgagggcgtcgacacgctggtcgtcaccggcgaccgcgatttgctccagctcgtatcggaccgcgtgaccgtcgcgctgacgcgcaagggcatcacggaaacggagcggtacgacccggcgcgcatccgcgaggaatacggcttcgatcccgaccgcatccgcgacctcaaagggctgatgggcgacgcgtctgacaatcttcccggcgttcccggcgtcggtgagaaaaccgcactgaaactgctcaggcagtacggttcgctggagagcgtcctggaacacgcgtcggaaatcgccggaaagctcggtgaaaatctgcgggcgcacgccgacgccgcccgattgagcaagcggctggcgacgatcgactgcgcggtaccgttgcagtcgggatgggactggctgcgcctcggcgaaccggaccgcgccgcgctcgcctcgctgttgcggcagctcgaattcaagtcgctgttgaaacggctcggactcgacggcacgtccgccgatgccgacgtcgacggcgtccgttcctccgcgcggccggcggacgagaaacggccgagggccgtcgccgtcgctgaggagggcgtcgacgtccgctgtccggatcgcccggaagaagtcgaagaagcgctgtcgcggctggaagccgcccagtcggtcgtcgtcgaggtgacgggcgacaacccgcacgacggcgaagtgcgcggcgtcgcatggtgggacggacatacggcgtatttcattccgtttgaacggctggtgcagtccgacatgcggccgctggccgactggctcgccgacgcgcgtcggccgaagcgtacgcacgactcccatcgcgctgaagtggcgctgttctggcacggccttgcgtttcgcggcacgtcgttctgcacgcatatcgccgcctatttgctcgaccccacggaatcgcgccatacgctggcggacctgtcgcgccgctacggtctgccgccggtaccggaagccgaggacgtttacggcaagggcgcgaagttcaaggttcccgatcgcgacacgctggcgcgttacgtcggccgcaaggccgccctagtcgcgcggctcgttccgctgctcgaggcggatttggcggcctgcggcatgcgttcgcttttttacgacctggagctgccgctttcatccgaactcgccgtcatggagacggtcggcgtccgcgtcgacgcggcggcgctcgccgcctacggcgaggaattgcgcgaggcggcggcgaaagtcgagcgggagatttacgagctggccgggacgacgttcaacatcggatcgacgaaacagctcggcgaaattttgttcgataagctggggctgcccgtcgtcaagaaaacgaaaaccggctattccaccgacgcagacgtgctggaggaactggcgccgtaccatccgatcgtcgaaaagattttgcattaccgccaactgacgaaattgcagtcgacctacatcgaggggcttttgaaagaaatccgtccgcaaaccggtaaaatccatacgtattatcagcagacgatcgcggcgacggggcggctgagcagtcagtttcccaatcttcagaacattccgatccgtctcgaagaggggcggaaaatccgcaaggcgttcgttccgtcagaaccgggatggctgatgctcgccgccgactattcgcagatcgaactgcgcgtgctcgcgcacgtttccggcgacgaacggctgaaggaagcgtttcggacaggcatggacatccacacgaagaccgcgatggacgtgttcggcgtttccgaagaccgcgtcgacgcgcgcatgcggcggcaggcgaaggcggtcaatttcggcatcatctacggcatcagcgatttcggactggcgcaaaacctgaacatttcccgcaaggaggcggcggagttcatccggcaatatttcgccgtcttttcgggcgtcaaggcgtaccgcgagcggatcgtcgagcaggcgcgccgcgacggttacgtgacgaccctgctcggtcgcaggcgcaaattgccggacatcaacgcgtcgaattacaacctccgctcgttcgcggagcggacggcgatgaatacgccgatccagggcacggccgccgacatcatcaagaccgcgatggtgcgtctgacgcggcggatgcgcgacgtcggactgaagagccgcatgctgctgcaggttcacgacgagctcgtgtttgaagtgccgccggacgagctcgacgcgatgcgggagcttgtgacggacgtcatggagtcggcggtcccgctcgacgtgccgctgaaggtcgacgtcagctggggcgccgactggtacgcggcgaagtgagggaagcgggatcc

SEQ ID NO: 1048 - DNA, 2792 bp, Artificial Sequence
  Description of Artificial Sequence: Synthetic Caldibacillus cellulovorans CompA.2 DNA Polymerase Y821M
atgaaatacctgctgccgaccgctgctgctggtctgctgctcctcgctgcccagccggcgatggccatgggcaaactgattctggtcgacggaaacagcgtcgccaaccgggcgttttacgccgtccggctgctcagcacgcgcggcggcctgcacacaaacgcggtgtacggattcgccaacatgttgctcaagctgatcgaggaggaacggccgacgcattttctcgtcgcgttcgacgcgggcaaggcgacgttccgtcatcgcgaatacgaggcctacaaggcgggtcgcctgcagacgccgcccgagctgtccgagcagtttccgtacatccgggagctcgtccgggcgttcggcgtcgcgtccggcgagctggaggaatacgaggcggacgacatgatcggtacgctggcgaaacgggcggaggccgagggcgtcgacacgctggtcgtcaccggcgaccgcgatttgctccagctcgtatcggaccgcgtgaccgtcgcgctgacgcgcaagggcatcacggaaacggagcggtacgacccggcgcgcatccgcgaggaatacggcttcgatcccgaccgcatccgcgacctcaaagggctgatgggcgacgcgtctgacaatcttcccggcgttcccggcgtcggtgagaaaaccgcactgaaactgctcaggcagtacggttcgctggagagcgtcctggaacacgcgtcggaaatcgccggaaagctcggtgaaaatctgcgggcgcacgccgacgccgcccgattgagcaagcggctggcgacgatcgactgcgcggtaccgttgcagtcgggatgggactggctgcgcctcggcgaaccggaccgcgccgcgctcgcctcgctgttgcggcagctcgaattcaagtcgctgttgaaacggctcggactcgacggcacgtccgccgatgccgacgtcgacggcgtccgttcctccgcgcggccggcggacgagaaacggccgagggccgtcgccgtcgctgaggagggcgtcgacgtccgctgtccggatcgcccggaagaagtcgaagaagcgctgtcgcggctggaagccgcccagtcggtcgtcgtcgaggtgacgggcgacaacccgcacgacggcgaagtgcgcggcgtcgcatggtgggacggacatacggcgtatttcattccgtttgaacggctggtgcagtccgacatgcggccgctggccgactggctcgccgacgcgcgtcggccgaagcgtacgcacgactcccatcgcgctgaagtggcgctgttctggcacggccttgcgtttcgcggcacgtcgttctgcacgcatatcgccgcctatttgctcgaccccacggaatcgcgccatacgctggcggacctgtcgcgccgctacggtctgccgccggtaccggaagccgaggacgtttacggcaagggcgcgaagttcaaggttcccgatcgcgacacgctggcgcgttacgtcggccgcaaggccgccctagtcgcgcggctcgttccgctgctcgaggcggatttggcggcctgcggcatgcgttcgcttttttacgacctggagctgccgctttcatccgaactcgccgtcatggagacggtcggcgtccgcgtcgacgcggcggcgctcgccgcctacggcgaggaattgcgcgaggcggcggcgaaagtcgagcgggagatttacgagctggccgggacgacgttcaacatcggatcgacgaaacagctcggcgaaattttgttcgataagctggggctgcccgtcgtcaagaaaacgaaaaccggctattccaccgacgcagacgtgctggaggaactggcgccgtaccatccgatcgtcgaaaagattttgcattaccgccaactgacgaaattgcagtcgacctacatcgaggggcttttgaaagaaatccgtccgcaaaccggtaaaatccatacgtattatcagcagacgatcgcggcgacggggcggctgagcagtcagtttcccaatcttcagaacattccgatccgtctcgaagaggggcggaaaatccgcaaggcgttcgttccgtcagaaccgggatggctgatgctcgccgccgactattcgcagatcgaactgcgcgtgctcgcgcacgtttccggcgacgaacggctgaaggaagcgtttcggacaggcatggacatccacacgaagaccgcgatggacgtgttcggcgtttccgaagaccgcgtcgacgcgcgcatgcggcggcaggcgaaggcggtcaatttcggcatcatctacggcatcagcgatttcggactggcgcaaaacctgaacatttcccgcaaggaggcggcggagttcatccggcaatatttcgccgtcttttcgggcgtcaaggcgtaccgcgagcggatcgtcgagcaggcgcgccgcgacggttacgtgacgaccctgctcggtcgcaggcgcatgttgccggacatcaacgcgtcgaattacaacctccgctcgttcgcggagcggacggcgatgaatacgccgatccagggcacggccgccgacatcatcaagaccgcgatggtgcgtctgacgcggcggatgcgcgacgtcggactgaagagccgcatgctgctgcaggttcacgacgagctcgtgtttgaagtgccgccggacgagctcgacgcgatgcgggagcttgtgacggacgtcatggagtcggcggtcccgctcgacgtgccgctgaaggtcgacgtcagctggggcgccgactggtacgcggcgaagtgagggaagcgggatcc

SEQ ID NO: 1049 - DNA, 2792 bp, Artificial Sequence
  Description of Artificial Sequence: Synthetic Caldibacillus cellulovorans CompA.2 DNA Polymerase Y821F
atgaaatacctgctgccgaccgctgctgctggtctgctgctcctcgctgcccagccggcgatggccatgggcaaactgattctggtcgacggaaacagcgtcgccaaccgggcgttttacgccgtccggctgctcagcacgcgcggcggcctgcacacaaacgcggtgtacggattcgccaacatgttgctcaagctgatcgaggaggaacggccgacgcattttctcgtcgcgttcgacgcgggcaaggcgacgttccgtcatcgcgaatacgaggcctacaaggcgggtcgcctgcagacgccgcccgagctgtccgagcagtttccgtacatccgggagctcgtccgggcgttcggcgtcgcgtccggcgagctggaggaatacgaggcggacgacatgatcggtacgctggcgaaacgggcggaggccgagggcgtcgacacgctggtcgtcaccggcgaccgcgatttgctccagctcgtatcggaccgcgtgaccgtcgcgctgacgcgcaagggcatcacggaaacggagcggtacgacccggcgcgcatccgcgaggaatacggcttcgatcccgaccgcatccgcgacctcaaagggctgatgggcgacgcgtctgacaatcttcccggcgttcccggcgtcggtgagaaaaccgcactgaaactgctcaggcagtacggttcgctggagagcgtcctggaacacgcgtcggaaatcgccggaaagctcggtgaaaatctgcgggcgcacgccgacgccgcccgattgagcaagcggctggcgacgatcgactgcgcggtaccgttgcagtcgggatgggactggctgcgcctcggcgaaccggaccgcgccgcgctcgcctcgctgttgcggcagctcgaattcaagtcgctgttgaaacggctcggactcgacggcacgtccgccgatgccgacgtcgacggcgtccgttcctccgcgcggccggcggacgagaaacggccgagggccgtcgccgtcgctgaggagggcgtcgacgtccgctgtccggatcgcccggaagaagtcgaagaagcgctgtcgcggctggaagccgcccagtcggtcgtcgtcgaggtgacgggcgacaacccgcacgacggcgaagtgcgcggcgtcgcatggtgggacggacatacggcgtatttcattccgtttgaacggctggtgcagtccgacatgcggccgctggccgactggctcgccgacgcgcgtcggccgaagcgtacgcacgactcccatcgcgctgaagtggcgctgttctggcacggccttgcgtttcgcggcacgtcgttctgcacgcatatcgccgcctatttgctcgaccccacggaatcgcgccatacgctggcggacctgtcgcgccgctacggtctgccgccggtaccggaagccgaggacgtttacggcaagggcgcgaagttcaaggttcccgatcgcgacacgctggcgcgttacgtcggccgcaaggccgccctagtcgcgcggctcgttccgctgctcgaggcggatttggcggcctgcggcatgcgttcgcttttttacgacctggagctgccgctttcatccgaactcgccgtcatggagacggtcggcgtccgcgtcgacgcggcggcgctcgccgcctacggcgaggaattgcgcgaggcggcggcgaaagtcgagcgggagatttacgagctggccgggacgacgttcaacatcggatcgacgaaacagctcggcgaaattttgttcgataagctggggctgcccgtcgtcaagaaaacgaaaaccggctattccaccgacgcagacgtgctggaggaactggcgccgtaccatccgatcgtcgaaaagattttgcattaccgccaactgacgaaattgcagtcgacctacatcgaggggcttttgaaagaaatccgtccgcaaaccggtaaaatccatacgtattatcagcagacgatcgcggcgacggggcggctgagcagtcagtttcccaatcttcagaacattccgatccgtctcgaagaggggcggaaaatccgcaaggcgttcgttccgtcagaaccgggatggctgatgctcgccgccgactattcgcagatcgaactgcgcgtgctcgcgcacgtttccggcgacgaacggctgaaggaagcgtttcggacaggcatggacatccacacgaagaccgcgatggacgtgttcggcgtttccgaagaccgcgtcgacgcgcgcatgcggcggcaggcgaaggcggtcaatttcggcatcatctacggcatcagcgatttcggactggcgcaaaacctgaacatttcccgcaaggaggcggcggagttcatccggcaatatttcgccgtcttttcgggcgtcaaggcgtaccgcgagcggatcgtcgagcaggcgcgccgcgacggttacgtgacgaccctgctcggtcgcaggcgctttttgccggacatcaacgcgtcgaattacaacctccgctcgttcgcggagcggacggcgatgaatacgccgatccagggcacggccgccgacatcatcaagaccgcgatggtgcgtctgacgcggcggatgcgcgacgtcggactgaagagccgcatgctgctgcaggttcacgacgagctcgtgtttgaagtgccgccggacgagctcgacgcgatgcgggagcttgtgacggacgtcatggagtcggcggtcccgctcgacgtgccgctgaaggtcgacgtcagctggggcgccgactggtacgcggcgaagtgagggaagcgggatcc

SEQ ID NO: 1050 - DNA, 2792 bp, Artificial Sequence
  Description of Artificial Sequence: Synthetic Caldibacillus cellulovorans CompA.2 DNA Polymerase Y821P
atgaaatacctgctgccgaccgctgctgctggtctgctgctcctcgctgcccagccggcgatggccatgggcaaactgattctggtcgacggaaacagcgtcgccaaccgggcgttttacgccgtccggctgctcagcacgcgcggcggcctgcacacaaacgcggtgtacggattcgccaacatgttgctcaagctgatcgaggaggaacggccgacgcattttctcgtcgcgttcgacgcgggcaaggcgacgttccgtcatcgcgaatacgaggcctacaaggcgggtcgcctgcagacgccgcccgagctgtccgagcagtttccgtacatccgggagctcgtccgggcgttcggcgtcgcgtccggcgagctggaggaatacgaggcggacgacatgatcggtacgctggcgaaacgggcggaggccgagggcgtcgacacgctggtcgtcaccggcgaccgcgatttgctccagctcgtatcggaccgcgtgaccgtcgcgctgacgcgcaagggcatcacggaaacggagcggtacgacccggcgcgcatccgcgaggaatacggcttcgatcccgaccgcatccgcgacctcaaagggctgatgggcgacgcgtctgacaatcttcccggcgttcccggcgtcggtgagaaaaccgcactgaaactgctcaggcagtacggttcgctggagagcgtcctggaacacgcgtcggaaatcgccggaaagctcggtgaaaatctgcgggcgcacgccgacgccgcccgattgagcaagcggctggcgacgatcgactgcgcggtaccgttgcagtcgggatgggactggctgcgcctcggcgaaccggaccgcgccgcgctcgcctcgctgttgcggcagctcgaattcaagtcgctgttgaaacggctcggactcgacggcacgtccgccgatgccgacgtcgacggcgtccgttcctccgcgcggccggcggacgagaaacggccgagggccgtcgccgtcgctgaggagggcgtcgacgtccgctgtccggatcgcccggaagaagtcgaagaagcgctgtcgcggctggaagccgcccagtcggtcgtcgtcgaggtgacgggcgacaacccgcacgacggcgaagtgcgcggcgtcgcatggtgggacggacatacggcgtatttcattccgtttgaacggctggtgcagtccgacatgcggccgctggccgactggctcgccgacgcgcgtcggccgaagcgtacgcacgactcccatcgcgctgaagtggcgctgttctggcacggccttgcgtttcgcggcacgtcgttctgcacgcatatcgccgcctatttgctcgaccccacggaatcgcgccatacgctggcggacctgtcgcgccgctacggtctgccgccggtaccggaagccgaggacgtttacggcaagggcgcgaagttcaaggttcccgatcgcgacacgctggcgcgttacgtcggccgcaaggccgccctagtcgcgcggctcgttccgctgctcgaggcggatttggcggcctgcggcatgcgttcgcttttttacgacctggagctgccgctttcatccgaactcgccgtcatggagacggtcggcgtccgcgtcgacgcggcggcgctcgccgcctacggcgaggaattgcgcgaggcggcggcgaaagtcgagcgggagatttacgagctggccgggacgacgttcaacatcggatcgacgaaacagctcggcgaaattttgttcgataagctggggctgcccgtcgtcaagaaaacgaaaaccggctattccaccgacgcagacgtgctggaggaactggcgccgtaccatccgatcgtcgaaaagattttgcattaccgccaactgacgaaattgcagtcgacctacatcgaggggcttttgaaagaaatccgtccgcaaaccggtaaaatccatacgtattatcagcagacgatcgcggcgacggggcggctgagcagtcagtttcccaatcttcagaacattccgatccgtctcgaagaggggcggaaaatccgcaaggcgttcgttccgtcagaaccgggatggctgatgctcgccgccgactattcgcagatcgaactgcgcgtgctcgcgcacgtttccggcgacgaacggctgaaggaagcgtttcggacaggcatggacatccacacgaagaccgcgatggacgtgttcggcgtttccgaagaccgcgtcgacgcgcgcatgcggcggcaggcgaaggcggtcaatttcggcatcatctacggcatcagcgatttcggactggcgcaaaacctgaacatttcccgcaaggaggcggcggagttcatccggcaatatttcgccgtcttttcgggcgtcaaggcgtaccgcgagcggatcgtcgagcaggcgcgccgcgacggttacgtgacgaccctgctcggtcgcaggcgccctttgccggacatcaacgcgtcgaattacaacctccgctcgttcgcggagcggacggcgatgaatacgccgatccagggcacggccgccgacatcatcaagaccgcgatggtgcgtctgacgcggcggatgcgcgacgtcggactgaagagccgcatgctgctgcaggttcacgacgagctcgtgtttgaagtgccgccggacgagctcgacgcgatgcgggagcttgtgacggacgtcatggagtcggcggtcccgctcgacgtgccgctgaaggtcgacgtcagctggggcgccgactggtacgcggcgaagtgagggaagcgggatcc

SEQ ID NO: 1051 - DNA, 2792 bp, Artificial Sequence
  Description of Artificial Sequence: Synthetic Caldibacillus cellulovorans CompA.2 DNA Polymerase Y821S
atgaaatacctgctgccgaccgctgctgctggtctgctgctcctcgctgcccagccggcgatggccatgggcaaactgattctggtcgacggaaacagcgtcgccaaccgggcgttttacgccgtccggctgctcagcacgcgcggcggcctgcacacaaacgcggtgtacggattcgccaacatgttgctcaagctgatcgaggaggaacggccgacgcattttctcgtcgcgttcgacgcgggcaaggcgacgttccgtcatcgcgaatacgaggcctacaaggcgggtcgcctgcagacgccgcccgagctgtccgagcagtttccgtacatccgggagctcgtccgggcgttcggcgtcgcgtccggcgagctggaggaatacgaggcggacgacatgatcggtacgctggcgaaacgggcggaggccgagggcgtcgacacgctggtcgtcaccggcgaccgcgatttgctccagctcgtatcggaccgcgtgaccgtcgcgctgacgcgcaagggcatcacggaaacggagcggtacgacccggcgcgcatccgcgaggaatacggcttcgatcccgaccgcatccgcgacctcaaagggctgatgggcgacgcgtctgacaatcttcccggcgttcccggcgtcggtgagaaaaccgcactgaaactgctcaggcagtacggttcgctggagagcgtcctggaacacgcgtcggaaatcgccggaaagctcggtgaaaatctgcgggcgcacgccgacgccgcccgattgagcaagcggctggcgacgatcgactgcgcggtaccgttgcagtcgggatgggactggctgcgcctcggcgaaccggaccgcgccgcgctcgcctcgctgttgcggcagctcgaattcaagtcgctgttgaaacggctcggactcgacggcacgtccgccgatgccgacgtcgacggcgtccgttcctccgcgcggccggcggacgagaaacggccgagggccgtcgccgtcgctgaggagggcgtcgacgtccgctgtccggatcgcccggaagaagtcgaagaagcgctgtcgcggctggaagccgcccagtcggtcgtcgtcgaggtgacgggcgacaacccgcacgacggcgaagtgcgcggcgtcgcatggtgggacggacatacggcgtatttcattccgtttgaacggctggtgcagtccgacatgcggccgctggccgactggctcgccgacgcgcgtcggccgaagcgtacgcacgactcccatcgcgctgaagtggcgctgttctggcacggccttgcgtttcgcggcacgtcgttctgcacgcatatcgccgcctatttgctcgaccccacggaatcgcgccatacgctggcggacctgtcgcgccgctacggtctgccgccggtaccggaagccgaggacgtttacggcaagggcgcgaagttcaaggttcccgatcgcgacacgctggcgcgttacgtcggccgcaaggccgccctagtcgcgcggctcgttccgctgctcgaggcggatttggcggcctgcggcatgcgttcgcttttttacgacctggagctgccgctttcatccgaactcgccgtcatggagacggtcggcgtccgcgtcgacgcggcggcgctcgccgcctacggcgaggaattgcgcgaggcggcggcgaaagtcgagcgggagatttacgagctggccgggacgacgttcaacatcggatcgacgaaacagctcggcgaaattttgttcgataagctggggctgcccgtcgtcaagaaaacgaaaaccggctattccaccgacgcagacgtgctggaggaactggcgccgtaccatccgatcgtcgaaaagattttgcattaccgccaactgacgaaattgcagtcgacctacatcgaggggcttttgaaagaaatccgtccgcaaaccggtaaaatccatacgtattatcagcagacgatcgcggcgacggggcggctgagcagtcagtttcccaatcttcagaacattccgatccgtctcgaagaggggcggaaaatccgcaaggcgttcgttccgtcagaaccgggatggctgatgctcgccgccgactattcgcagatcgaactgcgcgtgctcgcgcacgtttccggcgacgaacggctgaaggaagcgtttcggacaggcatggacatccacacgaagaccgcgatggacgtgttcggcgtttccgaagaccgcgtcgacgcgcgcatgcggcggcaggcgaaggcggtcaatttcggcatcatctacggcatcagcgatttcggactggcgcaaaacctgaacatttcccgcaaggaggcggcggagttcatccggcaatatttcgccgtcttttcgggcgtcaaggcgtaccgcgagcggatcgtcgagcaggcgcgccgcgacggttacgtgacgaccctgctcggtcgcaggcgctctttgccggacatcaacgcgtcgaattacaacctccgctcgttcgcggagcggacggcgatgaatacgccgatccagggcacggccgccgacatcatcaagaccgcgatggtgcgtctgacgcggcggatgcgcgacgtcggactgaagagccgcatgctgctgcaggttcacgacgagctcgtgtttgaagtgccgccggacgagctcgacgcgatgcgggagcttgtgacggacgtcatggagtcggcggtcccgctcgacgtgccgctgaaggtcgacgtcagctggggcgccgactggtacgcggcgaagtgagggaagcgggatcc

SEQ ID NO: 1052 - DNA, 2792 bp, Artificial Sequence
  Description of Artificial Sequence: Synthetic Caldibacillus cellulovorans CompA.2 DNA Polymerase Y821T
atgaaatacctgctgccgaccgctgctgctggtctgctgctcctcgctgcccagccggcgatggccatgggcaaactgattctggtcgacggaaacagcgtcgccaaccgggcgttttacgccgtccggctgctcagcacgcgcggcggcctgcacacaaacgcggtgtacggattcgccaacatgttgctcaagctgatcgaggaggaacggccgacgcattttctcgtcgcgttcgacgcgggcaaggcgacgttccgtcatcgcgaatacgaggcctacaaggcgggtcgcctgcagacgccgcccgagctgtccgagcagtttccgtacatccgggagctcgtccgggcgttcggcgtcgcgtccggcgagctggaggaatacgaggcggacgacatgatcggtacgctggcgaaacgggcggaggccgagggcgtcgacacgctggtcgtcaccggcgaccgcgatttgctccagctcgtatcggaccgcgtgaccgtcgcgctgacgcgcaagggcatcacggaaacggagcggtacgacccggcgcgcatccgcgaggaatacggcttcgatcccgaccgcatccgcgacctcaaagggctgatgggcgacgcgtctgacaatcttcccggcgttcccggcgtcggtgagaaaaccgcactgaaactgctcaggcagtacggttcgctggagagcgtcctggaacacgcgtcggaaatcgccggaaagctcggtgaaaatctgcgggcgcacgccgacgccgcccgattgagcaagcggctggcgacgatcgactgcgcggtaccgttgcagtcgggatgggactggctgcgcctcggcgaaccggaccgcgccgcgctcgcctcgctgttgcggcagctcgaattcaagtcgctgttgaaacggctcggactcgacggcacgtccgccgatgccgacgtcgacggcgtccgttcctccgcgcggccggcggacgagaaacggccgagggccgtcgccgtcgctgaggagggcgtcgacgtccgctgtccggatcgcccggaagaagtcgaagaagcgctgtcgcggctggaagccgcccagtcggtcgtcgtcgaggtgacgggcgacaacccgcacgacggcgaagtgcgcggcgtcgcatggtgggacggacatacggcgtatttcattccgtttgaacggctggtgcagtccgacatgcggccgctggccgactggctcgccgacgcgcgtcggccgaagcgtacgcacgactcccatcgcgctgaagtggcgctgttctggcacggccttgcgtttcgcggcacgtcgttctgcacgcatatcgccgcctatttgctcgaccccacggaatcgcgccatacgctggcggacctgtcgcgccgctacggtctgccgccggtaccggaagccgaggacgtttacggcaagggcgcgaagttcaaggttcccgatcgcgacacgctggcgcgttacgtcggccgcaaggccgccctagtcgcgcggctcgttccgctgctcgaggcggatttggcggcctgcggcatgcgttcgcttttttacgacctggagctgccgctttcatccgaactcgccgtcatggagacggtcggcgtccgcgtcgacgcggcggcgctcgccgcctacggcgaggaattgcgcgaggcggcggcgaaagtcgagcgggagatttacgagctggccgggacgacgttcaacatcggatcgacgaaacagctcggcgaaattttgttcgataagctggggctgcccgtcgtcaagaaaacgaaaaccggctattccaccgacgcagacgtgctggaggaactggcgccgtaccatccgatcgtcgaaaagattttgcattaccgccaactgacgaaattgcagtcgacctacatcgaggggcttttgaaagaaatccgtccgcaaaccggtaaaatccatacgtattatcagcagacgatcgcggcgacggggcggctgagcagtcagtttcccaatcttcagaacattccgatccgtctcgaagaggggcggaaaatccgcaaggcgttcgttccgtcagaaccgggatggctgatgctcgccgccgactattcgcagatcgaactgcgcgtgctcgcgcacgtttccggcgacgaacggctgaaggaagcgtttcggacaggcatggacatccacacgaagaccgcgatggacgtgttcggcgtttccgaagaccgcgtcgacgcgcgcatgcggcggcaggcgaaggcggtcaatttcggcatcatctacggcatcagcgatttcggactggcgcaaaacctgaacatttcccgcaaggaggcggcggagttcatccggcaatatttcgccgtcttttcgggcgtcaaggcgtaccgcgagcggatcgtcgagcaggcgcgccgcgacggttacgtgacgaccctgctcggtcgcaggcgcactttgccggacatcaacgcgtcgaattacaacctccgctcgttcgcggagcggacggcgatgaatacgccgatccagggcacggccgccgacatcatcaagaccgcgatggtgcgtctgacgcggcggatgcgcgacgtcggactgaagagccgcatgctgctgcaggttcacgacgagctcgtgtttgaagtgccgccggacgagctcgacgcgatgcgggagcttgtgacggacgtcatggagtcggcggtcccgctcgacgtgccgctgaaggtcgacgtcagctggggcgccgactggtacgcggcgaagtgagggaagcgggatcc

SEQ ID NO: 1053 - DNA, 2792 bp, Artificial Sequence
  Description of Artificial Sequence: Synthetic Caldibacillus cellulovorans CompA.2 DNA Polymerase Y821W
atgaaatacctgctgccgaccgctgctgctggtctgctgctcctcgctgcccagccggcgatggccatgggcaaactgattctggtcgacggaaacagcgtcgccaaccgggcgttttacgccgtccggctgctcagcacgcgcggcggcctgcacacaaacgcggtgtacggattcgccaacatgttgctcaagctgatcgaggaggaacggccgacgcattttctcgtcgcgttcgacgcgggcaaggcgacgttccgtcatcgcgaatacgaggcctacaaggcgggtcgcctgcagacgccgcccgagctgtccgagcagtttccgtacatccgggagctcgtccgggcgttcggcgtcgcgtccggcgagctggaggaatacgaggcggacgacatgatcggtacgctggcgaaacgggcggaggccgagggcgtcgacacgctggtcgtcaccggcgaccgcgatttgctccagctcgtatcggaccgcgtgaccgtcgcgctgacgcgcaagggcatcacggaaacggagcggtacgacccggcgcgcatccgcgaggaatacggcttcgatcccgaccgcatccgcgacctcaaagggctgatgggcgacgcgtctgacaatcttcccggcgttcccggcgtcggtgagaaaaccgcactgaaactgctcaggcagtacggttcgctggagagcgtcctggaacacgcgtcggaaatcgccggaaagctcggtgaaaatctgcgggcgcacgccgacgccgcccgattgagcaagcggctggcgacgatcgactgcgcggtaccgttgcagtcgggatgggactggctgcgcctcggcgaaccggaccgcgccgcgctcgcctcgctgttgcggcagctcgaattcaagtcgctgttgaaacggctcggactcgacggcacgtccgccgatgccgacgtcgacggcgtccgttcctccgcgcggccggcggacgagaaacggccgagggccgtcgccgtcgctgaggagggcgtcgacgtccgctgtccggatcgcccggaagaagtcgaagaagcgctgtcgcggctggaagccgcccagtcggtcgtcgtcgaggtgacgggcgacaacccgcacgacggcgaagtgcgcggcgtcgcatggtgggacggacatacggcgtatttcattccgtttgaacggctggtgcagtccgacatgcggccgctggccgactggctcgccgacgcgcgtcggccgaagcgtacgcacgactcccatcgcgctgaagtggcgctgttctggcacggccttgcgtttcgcggcacgtcgttctgcacgcatatcgccgcctatttgctcgaccccacggaatcgcgccatacgctggcggacctgtcgcgccgctacggtctgccgccggtaccggaagccgaggacgtttacggcaagggcgcgaagttcaaggttcccgatcgcgacacgctggcgcgttacgtcggccgcaaggccgccctagtcgcgcggctcgttccgctgctcgaggcggatttggcggcctgcggcatgcgttcgcttttttacgacctggagctgccgctttcatccgaactcgccgtcatggagacggtcggcgtccgcgtcgacgcggcggcgctcgccgcctacggcgaggaattgcgcgaggcggcggcgaaagtcgagcgggagatttacgagctggccgggacgacgttcaacatcggatcgacgaaacagctcggcgaaattttgttcgataagctggggctgcccgtcgtcaagaaaacgaaaaccggctattccaccgacgcagacgtgctggaggaactggcgccgtaccatccgatcgtcgaaaagattttgcattaccgccaactgacgaaattgcagtcgacctacatcgaggggcttttgaaagaaatccgtccgcaaaccggtaaaatccatacgtattatcagcagacgatcgcggcgacggggcggctgagcagtcagtttcccaatcttcagaacattccgatccgtctcgaagaggggcggaaaatccgcaaggcgttcgttccgtcagaaccgggatggctgatgctcgccgccgactattcgcagatcgaactgcgcgtgctcgcgcacgtttccggcgacgaacggctgaaggaagcgtttcggacaggcatggacatccacacgaagaccgcgatggacgtgttcggcgtttccgaagaccgcgtcgacgcgcgcatgcggcggcaggcgaaggcggtcaatttcggcatcatctacggcatcagcgatttcggactggcgcaaaacctgaacatttcccgcaaggaggcggcggagttcatccggcaatatttcgccgtcttttcgggcgtcaaggcgtaccgcgagcggatcgtcgagcaggcgcgccgcgacggttacgtgacgaccctgctcggtcgcaggcgctggttgccggacatcaacgcgtcgaattacaacctccgctcgttcgcggagcggacggcgatgaatacgccgatccagggcacggccgccgacatcatcaagaccgcgatggtgcgtctgacgcggcggatgcgcgacgtcggactgaagagccgcatgctgctgcaggttcacgacgagctcgtgtttgaagtgccgccggacgagctcgacgcgatgcgggagcttgtgacggacgtcatggagtcggcggtcccgctcgacgtgccgctgaaggtcgacgtcagctggggcgccgactggtacgcggcgaagtgagggaagcgggatcc

SEQ ID NO: 1054 - DNA, 2792 bp, Artificial Sequence
  Description of Artificial Sequence: Synthetic Caldibacillus cellulovorans CompA.2 DNA Polymerase Y821V
atgaaatacctgctgccgaccgctgctgctggtctgctgctcctcgctgcccagccggcgatggccatgggcaaactgattctggtcgacggaaacagcgtcgccaaccgggcgttttacgccgtccggctgctcagcacgcgcggcggcctgcacacaaacgcggtgtacggattcgccaacatgttgctcaagctgatcgaggaggaacggccgacgcattttctcgtcgcgttcgacgcgggcaaggcgacgttccgtcatcgcgaatacgaggcctacaaggcgggtcgcctgcagacgccgcccgagctgtccgagcagtttccgtacatccgggagctcgtccgggcgttcggcgtcgcgtccggcgagctggaggaatacgaggcggacgacatgatcggtacgctggcgaaacgggcggaggccgagggcgtcgacacgctggtcgtcaccggcgaccgcgatttgctccagctcgtatcggaccgcgtgaccgtcgcgctgacgcgcaagggcatcacggaaacggagcggtacgacccggcgcgcatccgcgaggaatacggcttcgatcccgaccgcatccgcgacctcaaagggctgatgggcgacgcgtctgacaatcttcccggcgttcccggcgtcggtgagaaaaccgcactgaaactgctcaggcagtacggttcgctggagagcgtcctggaacacgcgtcggaaatcgccggaaagctcggtgaaaatctgcgggcgcacgccgacgccgcccgattgagcaagcggctggcgacgatcgactgcgcggtaccgttgcagtcgggatgggactggctgcgcctcggcgaaccggaccgcgccgcgctcgcctcgctgttgcggcagctcgaattcaagtcgctgttgaaacggctcggactcgacggcacgtccgccgatgccgacgtcgacggcgtccgttcctccgcgcggccggcggacgagaaacggccgagggccgtcgccgtcgctgaggagggcgtcgacgtccgctgtccggatcgcccggaagaagtcgaagaagcgctgtcgcggctggaagccgcccagtcggtcgtcgtcgaggtgacgggcgacaacccgcacgacggcgaagtgcgcggcgtcgcatggtgggacggacatacggcgtatttcattccgtttgaacggctggtgcagtccgacatgcggccgctggccgactggctcgccgacgcgcgtcggccgaagcgtacgcacgactcccatcgcgctgaagtggcgctgttctggcacggccttgcgtttcgcggcacgtcgttctgcacgcatatcgccgcctatttgctcgaccccacggaatcgcgccatacgctggcggacctgtcgcgccgctacggtctgccgccggtaccggaagccgaggacgtttacggcaagggcgcgaagttcaaggttcccgatcgcgacacgctggcgcgttacgtcggccgcaaggccgccctagtcgcgcggctcgttccgctgctcgaggcggatttggcggcctgcggcatgcgttcgcttttttacgacctggagctgccgctttcatccgaactcgccgtcatggagacggtcggcgtccgcgtcgacgcggcggcgctcgccgcctacggcgaggaattgcgcgaggcggcggcgaaagtcgagcgggagatttacgagctggccgggacgacgttcaacatcggatcgacgaaacagctcggcgaaattttgttcgataagctggggctgcccgtcgtcaagaaaacgaaaaccggctattccaccgacgcagacgtgctggaggaactggcgccgtaccatccgatcgtcgaaaagattttgcattaccgccaactgacgaaattgcagtcgacctacatcgaggggcttttgaaagaaatccgtccgcaaaccggtaaaatccatacgtattatcagcagacgatcgcggcgacggggcggctgagcagtcagtttcccaatcttcagaacattccgatccgtctcgaagaggggcggaaaatccgcaaggcgttcgttccgtcagaaccgggatggctgatgctcgccgccgactattcgcagatcgaactgcgcgtgctcgcgcacgtttccggcgacgaacggctgaaggaagcgtttcggacaggcatggacatccacacgaagaccgcgatggacgtgttcggcgtttccgaagaccgcgtcgacgcgcgcatgcggcggcaggcgaaggcggtcaatttcggcatcatctacggcatcagcgatttcggactggcgcaaaacctgaacatttcccgcaaggaggcggcggagttcatccggcaatatttcgccgtcttttcgggcgtcaaggcgtaccgcgagcggatcgtcgagcaggcgcgccgcgacggttacgtgacgaccctgctcggtcgcaggcgcgttttgccggacatcaacgcgtcgaattacaacctccgctcgttcgcggagcggacggcgatgaatacgccgatccagggcacggccgccgacatcatcaagaccgcgatggtgcgtctgacgcggcggatgcgcgacgtcggactgaagagccgcatgctgctgcaggttcacgacgagctcgtgtttgaagtgccgccggacgagctcgacgcgatgcgggagcttgtgacggacgtcatggagtcggcggtcccgctcgacgtgccgctgaaggtcgacgtcagctggggcgccgactggtacgcggcgaagtgagggaagcgggatcc

SEQ ID NO: 1055 - DNA, 2792 bp, Artificial Sequence
  Description of Artificial Sequence: Synthetic Caldibacillus cellulovorans CompA.2 DNA Polymerase L822A
atgaaatacctgctgccgaccgctgctgctggtctgctgctcctcgctgcccagccggcgatggccatgggcaaactgattctggtcgacggaaacagcgtcgccaaccgggcgttttacgccgtccggctgctcagcacgcgcggcggcctgcacacaaacgcggtgtacggattcgccaacatgttgctcaagctgatcgaggaggaacggccgacgcattttctcgtcgcgttcgacgcgggcaaggcgacgttccgtcatcgcgaatacgaggcctacaaggcgggtcgcctgcagacgccgcccgagctgtccgagcagtttccgtacatccgggagctcgtccgggcgttcggcgtcgcgtccggcgagctggaggaatacgaggcggacgacatgatcggtacgctggcgaaacgggcggaggccgagggcgtcgacacgctggtcgtcaccggcgaccgcgatttgctccagctcgtatcggaccgcgtgaccgtcgcgctgacgcgcaagggcatcacggaaacggagcggtacgacccggcgcgcatccgcgaggaatacggcttcgatcccgaccgcatccgcgacctcaaagggctgatgggcgacgcgtctgacaatcttcccggcgttcccggcgtcggtgagaaaaccgcactgaaactgctcaggcagtacggttcgctggagagcgtcctggaacacgcgtcggaaatcgccggaaagctcggtgaaaatctgcgggcgcacgccgacgccgcccgattgagcaagcggctggcgacgatcgactgcgcggtaccgttgcagtcgggatgggactggctgcgcctcggcgaaccggaccgcgccgcgctcgcctcgctgttgcggcagctcgaattcaagtcgctgttgaaacggctcggactcgacggcacgtccgccgatgccgacgtcgacggcgtccgttcctccgcgcggccggcggacgagaaacggccgagggccgtcgccgtcgctgaggagggcgtcgacgtccgctgtccggatcgcccggaagaagtcgaagaagcgctgtcgcggctggaagccgcccagtcggtcgtcgtcgaggtgacgggcgacaacccgcacgacggcgaagtgcgcggcgtcgcatggtgggacggacatacggcgtatttcattccgtttgaacggctggtgcagtccgacatgcggccgctggccgactggctcgccgacgcgcgtcggccgaagcgtacgcacgactcccatcgcgctgaagtggcgctgttctggcacggccttgcgtttcgcggcacgtcgttctgcacgcatatcgccgcctatttgctcgaccccacggaatcgcgccatacgctggcggacctgtcgcgccgctacggtctgccgccggtaccggaagccgaggacgtttacggcaagggcgcgaagttcaaggttcccgatcgcgacacgctggcgcgttacgtcggccgcaaggccgccctagtcgcgcggctcgttccgctgctcgaggcggatttggcggcctgcggcatgcgttcgcttttttacgacctggagctgccgctttcatccgaactcgccgtcatggagacggtcggcgtccgcgtcgacgcggcggcgctcgccgcctacggcgaggaattgcgcgaggcggcggcgaaagtcgagcgggagatttacgagctggccgggacgacgttcaacatcggatcgacgaaacagctcggcgaaattttgttcgataagctggggctgcccgtcgtcaagaaaacgaaaaccggctattccaccgacgcagacgtgctggaggaactggcgccgtaccatccgatcgtcgaaaagattttgcattaccgccaactgacgaaattgcagtcgacctacatcgaggggcttttgaaagaaatccgtccgcaaaccggtaaaatccatacgtattatcagcagacgatcgcggcgacggggcggctgagcagtcagtttcccaatcttcagaacattccgatccgtctcgaagaggggcggaaaatccgcaaggcgttcgttccgtcagaaccgggatggctgatgctcgccgccgactattcgcagatcgaactgcgcgtgctcgcgcacgtttccggcgacgaacggctgaaggaagcgtttcggacaggcatggacatccacacgaagaccgcgatggacgtgttcggcgtttccgaagaccgcgtcgacgcgcgcatgcggcggcaggcgaaggcggtcaatttcggcatcatctacggcatcagcgatttcggactggcgcaaaacctgaacatttcccgcaaggaggcggcggagttcatccggcaatatttcgccgtcttttcgggcgtcaaggcgtaccgcgagcggatcgtcgagcaggcgcgccgcgacggttacgtgacgaccctgctcggtcgcaggcgctatgctccggacatcaacgcgtcgaattacaacctccgctcgttcgcggagcggacggcgatgaatacgccgatccagggcacggccgccgacatcatcaagaccgcgatggtgcgtctgacgcggcggatgcgcgacgtcggactgaagagccgcatgctgctgcaggttcacgacgagctcgtgtttgaagtgccgccggacgagctcgacgcgatgcgggagcttgtgacggacgtcatggagtcggcggtcccgctcgacgtgccgctgaaggtcgacgtcagctggggcgccgactggtacgcggcgaagtgagggaagcgggatcc

SEQ ID NO: 1056 - DNA, 2792 bp, Artificial Sequence
  Description of Artificial Sequence: Synthetic Caldibacillus cellulovorans CompA.2 DNA Polymerase L822R
atgaaatacctgctgccgaccgctgctgctggtctgctgctcctcgctgcccagccggcgatggccatgggcaaactgattctggtcgacggaaacagcgtcgccaaccgggcgttttacgccgtccggctgctcagcacgcgcggcggcctgcacacaaacgcggtgtacggattcgccaacatgttgctcaagctgatcgaggaggaacggccgacgcattttctcgtcgcgttcgacgcgggcaaggcgacgttccgtcatcgcgaatacgaggcctacaaggcgggtcgcctgcagacgccgcccgagctgtccgagcagtttccgtacatccgggagctcgtccgggcgttcggcgtcgcgtccggcgagctggaggaatacgaggcggacgacatgatcggtacgctggcgaaacgggcggaggccgagggcgtcgacacgctggtcgtcaccggcgaccgcgatttgctccagctcgtatcggaccgcgtgaccgtcgcgctgacgcgcaagggcatcacggaaacggagcggtacgacccggcgcgcatccgcgaggaatacggcttcgatcccgaccgcatccgcgacctcaaagggctgatgggcgacgcgtctgacaatcttcccggcgttcccggcgtcggtgagaaaaccgcactgaaactgctcaggcagtacggttcgctggagagcgtcctggaacacgcgtcggaaatcgccggaaagctcggtgaaaatctgcgggcgcacgccgacgccgcccgattgagcaagcggctggcgacgatcgactgcgcggtaccgttgcagtcgggatgggactggctgcgcctcggcgaaccggaccgcgccgcgctcgcctcgctgttgcggcagctcgaattcaagtcgctgttgaaacggctcggactcgacggcacgtccgccgatgccgacgtcgacggcgtccgttcctccgcgcggccggcggacgagaaacggccgagggccgtcgccgtcgctgaggagggcgtcgacgtccgctgtccggatcgcccggaagaagtcgaagaagcgctgtcgcggctggaagccgcccagtcggtcgtcgtcgaggtgacgggcgacaacccgcacgacggcgaagtgcgcggcgtcgcatggtgggacggacatacggcgtatttcattccgtttgaacggctggtgcagtccgacatgcggccgctggccgactggctcgccgacgcgcgtcggccgaagcgtacgcacgactcccatcgcgctgaagtggcgctgttctggcacggccttgcgtttcgcggcacgtcgttctgcacgcatatcgccgcctatttgctcgaccccacggaatcgcgccatacgctggcggacctgtcgcgccgctacggtctgccgccggtaccggaagccgaggacgtttacggcaagggcgcgaagttcaaggttcccgatcgcgacacgctggcgcgttacgtcggccgcaaggccgccctagtcgcgcggctcgttccgctgctcgaggcggatttggcggcctgcggcatgcgttcgcttttttacgacctggagctgccgctttcatccgaactcgccgtcatggagacggtcggcgtccgcgtcgacgcggcggcgctcgccgcctacggcgaggaattgcgcgaggcggcggcgaaagtcgagcgggagatttacgagctggccgggacgacgttcaacatcggatcgacgaaacagctcggcgaaattttgttcgataagctggggctgcccgtcgtcaagaaaacgaaaaccggctattccaccgacgcagacgtgctggaggaactggcgccgtaccatccgatcgtcgaaaagattttgcattaccgccaactgacgaaattgcagtcgacctacatcgaggggcttttgaaagaaatccgtccgcaaaccggtaaaatccatacgtattatcagcagacgatcgcggcgacggggcggctgagcagtcagtttcccaatcttcagaacattccgatccgtctcgaagaggggcggaaaatccgcaaggcgttcgttccgtcagaaccgggatggctgatgctcgccgccgactattcgcagatcgaactgcgcgtgctcgcgcacgtttccggcgacgaacggctgaaggaagcgtttcggacaggcatggacatccacacgaagaccgcgatggacgtgttcggcgtttccgaagaccgcgtcgacgcgcgcatgcggcggcaggcgaaggcggtcaatttcggcatcatctacggcatcagcgatttcggactggcgcaaaacctgaacatttcccgcaaggaggcggcggagttcatccggcaatatttcgccgtcttttcgggcgtcaaggcgtaccgcgagcggatcgtcgagcaggcgcgccgcgacggttacgtgacgaccctgctcggtcgcaggcgctatcgtccggacatcaacgcgtcgaattacaacctccgctcgttcgcggagcggacggcgatgaatacgccgatccagggcacggccgccgacatcatcaagaccgcgatggtgcgtctgacgcggcggatgcgcgacgtcggactgaagagccgcatgctgctgcaggttcacgacgagctcgtgtttgaagtgccgccggacgagctcgacgcgatgcgggagcttgtgacggacgtcatggagtcggcggtcccgctcgacgtgccgctgaaggtcgacgtcagctggggcgccgactggtacgcggcgaagtgagggaagcgggatcc

SEQ ID NO: 1057 - DNA, 2792 bp, Artificial Sequence
  Description of Artificial Sequence: Synthetic Caldibacillus cellulovorans CompA.2 DNA Polymerase L822N
atgaaatacctgctgccgaccgctgctgctggtctgctgctcctcgctgcccagccggcgatggccatgggcaaactgattctggtcgacggaaacagcgtcgccaaccgggcgttttacgccgtccggctgctcagcacgcgcggcggcctgcacacaaacgcggtgtacggattcgccaacatgttgctcaagctgatcgaggaggaacggccgacgcattttctcgtcgcgttcgacgcgggcaaggcgacgttccgtcatcgcgaatacgaggcctacaaggcgggtcgcctgcagacgccgcccgagctgtccgagcagtttccgtacatccgggagctcgtccgggcgttcggcgtcgcgtccggcgagctggaggaatacgaggcggacgacatgatcggtacgctggcgaaacgggcggaggccgagggcgtcgacacgctggtcgtcaccggcgaccgcgatttgctccagctcgtatcggaccgcgtgaccgtcgcgctgacgcgcaagggcatcacggaaacggagcggtacgacccggcgcgcatccgcgaggaatacggcttcgatcccgaccgcatccgcgacctcaaagggctgatgggcgacgcgtctgacaatcttcccggcgttcccggcgtcggtgagaaaaccgcactgaaactgctcaggcagtacggttcgctggagagcgtcctggaacacgcgtcggaaatcgccggaaagctcggtgaaaatctgcgggcgcacgccgacgccgcccgattgagcaagcggctggcgacgatcgactgcgcggtaccgttgcagtcgggatgggactggctgcgcctcggcgaaccggaccgcgccgcgctcgcctcgctgttgcggcagctcgaattcaagtcgctgttgaaacggctcggactcgacggcacgtccgccgatgccgacgtcgacggcgtccgttcctccgcgcggccggcggacgagaaacggccgagggccgtcgccgtcgctgaggagggcgtcgacgtccgctgtccggatcgcccggaagaagtcgaagaagcgctgtcgcggctggaagccgcccagtcggtcgtcgtcgaggtgacgggcgacaacccgcacgacggcgaagtgcgcggcgtcgcatggtgggacggacatacggcgtatttcattccgtttgaacggctggtgcagtccgacatgcggccgctggccgactggctcgccgacgcgcgtcggccgaagcgtacgcacgactcccatcgcgctgaagtggcgctgttctggcacggccttgcgtttcgcggcacgtcgttctgcacgcatatcgccgcctatttgctcgaccccacggaatcgcgccatacgctggcggacctgtcgcgccgctacggtctgccgccggtaccggaagccgaggacgtttacggcaagggcgcgaagttcaaggttcccgatcgcgacacgctggcgcgttacgtcggccgcaaggccgccctagtcgcgcggctcgttccgctgctcgaggcggatttggcggcctgcggcatgcgttcgcttttttacgacctggagctgccgctttcatccgaactcgccgtcatggagacggtcggcgtccgcgtcgacgcggcggcgctcgccgcctacggcgaggaattgcgcgaggcggcggcgaaagtcgagcgggagatttacgagctggccgggacgacgttcaacatcggatcgacgaaacagctcggcgaaattttgttcgataagctggggctgcccgtcgtcaagaaaacgaaaaccggctattccaccgacgcagacgtgctggaggaactggcgccgtaccatccgatcgtcgaaaagattttgcattaccgccaactgacgaaattgcagtcgacctacatcgaggggcttttgaaagaaatccgtccgcaaaccggtaaaatccatacgtattatcagcagacgatcgcggcgacggggcggctgagcagtcagtttcccaatcttcagaacattccgatccgtctcgaagaggggcggaaaatccgcaaggcgttcgttccgtcagaaccgggatggctgatgctcgccgccgactattcgcagatcgaactgcgcgtgctcgcgcacgtttccggcgacgaacggctgaaggaagcgtttcggacaggcatggacatccacacgaagaccgcgatggacgtgttcggcgtttccgaagaccgcgtcgacgcgcgcatgcggcggcaggcgaaggcggtcaatttcggcatcatctacggcatcagcgatttcggactggcgcaaaacctgaacatttcccgcaaggaggcggcggagttcatccggcaatatttcgccgtcttttcgggcgtcaaggcgtaccgcgagcggatcgtcgagcaggcgcgccgcgacggttacgtgacgaccctgctcggtcgcaggcgctataatccggacatcaacgcgtcgaattacaacctccgctcgttcgcggagcggacggcgatgaatacgccgatccagggcacggccgccgacatcatcaagaccgcgatggtgcgtctgacgcggcggatgcgcgacgtcggactgaagagccgcatgctgctgcaggttcacgacgagctcgtgtttgaagtgccgccggacgagctcgacgcgatgcgggagcttgtgacggacgtcatggagtcggcggtcccgctcgacgtgccgctgaaggtcgacgtcagctggggcgccgactggtacgcggcgaagtgagggaagcgggatcc

SEQ ID NO: 1058 - DNA, 2792 bp, Artificial Sequence
  Description of Artificial Sequence: Synthetic Caldibacillus cellulovorans CompA.2 DNA Polymerase L822D
atgaaatacctgctgccgaccgctgctgctggtctgctgctcctcgctgcccagccggcgatggccatgggcaaactgattctggtcgacggaaacagcgtcgccaaccgggcgttttacgccgtccggctgctcagcacgcgcggcggcctgcacacaaacgcggtgtacggattcgccaacatgttgctcaagctgatcgaggaggaacggccgacgcattttctcgtcgcgttcgacgcgggcaaggcgacgttccgtcatcgcgaatacgaggcctacaaggcgggtcgcctgcagacgccgcccgagctgtccgagcagtttccgtacatccgggagctcgtccgggcgttcggcgtcgcgtccggcgagctggaggaatacgaggcggacgacatgatcggtacgctggcgaaacgggcggaggccgagggcgtcgacacgctggtcgtcaccggcgaccgcgatttgctccagctcgtatcggaccgcgtgaccgtcgcgctgacgcgcaagggcatcacggaaacggagcggtacgacccggcgcgcatccgcgaggaatacggcttcgatcccgaccgcatccgcgacctcaaagggctgatgggcgacgcgtctgacaatcttcccggcgttcccggcgtcggtgagaaaaccgcactgaaactgctcaggcagtacggttcgctggagagcgtcctggaacacgcgtcggaaatcgccggaaagctcggtgaaaatctgcgggcgcacgccgacgccgcccgattgagcaagcggctggcgacgatcgactgcgcggtaccgttgcagtcgggatgggactggctgcgcctcggcgaaccggaccgcgccgcgctcgcctcgctgttgcggcagctcgaattcaagtcgctgttgaaacggctcggactcgacggcacgtccgccgatgccgacgtcgacggcgtccgttcctccgcgcggccggcggacgagaaacggccgagggccgtcgccgtcgctgaggagggcgtcgacgtccgctgtccggatcgcccggaagaagtcgaagaagcgctgtcgcggctggaagccgcccagtcggtcgtcgtcgaggtgacgggcgacaacccgcacgacggcgaagtgcgcggcgtcgcatggtgggacggacatacggcgtatttcattccgtttgaacggctggtgcagtccgacatgcggccgctggccgactggctcgccgacgcgcgtcggccgaagcgtacgcacgactcccatcgcgctgaagtggcgctgttctggcacggccttgcgtttcgcggcacgtcgttctgcacgcatatcgccgcctatttgctcgaccccacggaatcgcgccatacgctggcggacctgtcgcgccgctacggtctgccgccggtaccggaagccgaggacgtttacggcaagggcgcgaagttcaaggttcccgatcgcgacacgctggcgcgttacgtcggccgcaaggccgccctagtcgcgcggctcgttccgctgctcgaggcggatttggcggcctgcggcatgcgttcgcttttttacgacctggagctgccgctttcatccgaactcgccgtcatggagacggtcggcgtccgcgtcgacgcggcggcgctcgccgcctacggcgaggaattgcgcgaggcggcggcgaaagtcgagcgggagatttacgagctggccgggacgacgttcaacatcggatcgacgaaacagctcggcgaaattttgttcgataagctggggctgcccgtcgtcaagaaaacgaaaaccggctattccaccgacgcagacgtgctggaggaactggcgccgtaccatccgatcgtcgaaaagattttgcattaccgccaactgacgaaattgcagtcgacctacatcgaggggcttttgaaagaaatccgtccgcaaaccggtaaaatccatacgtattatcagcagacgatcgcggcgacggggcggctgagcagtcagtttcccaatcttcagaacattccgatccgtctcgaagaggggcggaaaatccgcaaggcgttcgttccgtcagaaccgggatggctgatgctcgccgccgactattcgcagatcgaactgcgcgtgctcgcgcacgtttccggcgacgaacggctgaaggaagcgtttcggacaggcatggacatccacacgaagaccgcgatggacgtgttcggcgtttccgaagaccgcgtcgacgcgcgcatgcggcggcaggcgaaggcggtcaatttcggcatcatctacggcatcagcgatttcggactggcgcaaaacctgaacatttcccgcaaggaggcggcggagttcatccggcaatatttcgccgtcttttcgggcgtcaaggcgtaccgcgagcggatcgtcgagcaggcgcgccgcgacggttacgtgacgaccctgctcggtcgcaggcgctatgatccggacatcaacgcgtcgaattacaacctccgctcgttcgcggagcggacggcgatgaatacgccgatccagggcacggccgccgacatcatcaagaccgcgatggtgcgtctgacgcggcggatgcgcgacgtcggactgaagagccgcatgctgctgcaggttcacgacgagctcgtgtttgaagtgccgccggacgagctcgacgcgatgcgggagcttgtgacggacgtcatggagtcggcggtcccgctcgacgtgccgctgaaggtcgacgtcagctggggcgccgactggtacgcggcgaagtgagggaagcgggatcc

SEQ ID NO: 1059 - DNA, 2792 bp, Artificial Sequence
  Description of Artificial Sequence: Synthetic Caldibacillus cellulovorans CompA.2 DNA Polymerase L822C
atgaaatacctgctgccgaccgctgctgctggtctgctgctcctcgctgcccagccggcgatggccatgggcaaactgattctggtcgacggaaacagcgtcgccaaccgggcgttttacgccgtccggctgctcagcacgcgcggcggcctgcacacaaacgcggtgtacggattcgccaacatgttgctcaagctgatcgaggaggaacggccgacgcattttctcgtcgcgttcgacgcgggcaaggcgacgttccgtcatcgcgaatacgaggcctacaaggcgggtcgcctgcagacgccgcccgagctgtccgagcagtttccgtacatccgggagctcgtccgggcgttcggcgtcgcgtccggcgagctggaggaatacgaggcggacgacatgatcggtacgctggcgaaacgggcggaggccgagggcgtcgacacgctggtcgtcaccggcgaccgcgatttgctccagctcgtatcggaccgcgtgaccgtcgcgctgacgcgcaagggcatcacggaaacggagcggtacgacccggcgcgcatccgcgaggaatacggcttcgatcccgaccgcatccgcgacctcaaagggctgatgggcgacgcgtctgacaatcttcccggcgttcccggcgtcggtgagaaaaccgcactgaaactgctcaggcagtacggttcgctggagagcgtcctggaacacgcgtcggaaatcgccggaaagctcggtgaaaatctgcgggcgcacgccgacgccgcccgattgagcaagcggctggcgacgatcgactgcgcggtaccgttgcagtcgggatgggactggctgcgcctcggcgaaccggaccgcgccgcgctcgcctcgctgttgcggcagctcgaattcaagtcgctgttgaaacggctcggactcgacggcacgtccgccgatgccgacgtcgacggcgtccgttcctccgcgcggccggcggacgagaaacggccgagggccgtcgccgtcgctgaggagggcgtcgacgtccgctgtccggatcgcccggaagaagtcgaagaagcgctgtcgcggctggaagccgcccagtcggtcgtcgtcgaggtgacgggcgacaacccgcacgacggcgaagtgcgcggcgtcgcatggtgggacggacatacggcgtatttcattccgtttgaacggctggtgcagtccgacatgcggccgctggccgactggctcgccgacgcgcgtcggccgaagcgtacgcacgactcccatcgcgctgaagtggcgctgttctggcacggccttgcgtttcgcggcacgtcgttctgcacgcatatcgccgcctatttgctcgaccccacggaatcgcgccatacgctggcggacctgtcgcgccgctacggtctgccgccggtaccggaagccgaggacgtttacggcaagggcgcgaagttcaaggttcccgatcgcgacacgctggcgcgttacgtcggccgcaaggccgccctagtcgcgcggctcgttccgctgctcgaggcggatttggcggcctgcggcatgcgttcgcttttttacgacctggagctgccgctttcatccgaactcgccgtcatggagacggtcggcgtccgcgtcgacgcggcggcgctcgccgcctacggcgaggaattgcgcgaggcggcggcgaaagtcgagcgggagatttacgagctggccgggacgacgttcaacatcggatcgacgaaacagctcggcgaaattttgttcgataagctggggctgcccgtcgtcaagaaaacgaaaaccggctattccaccgacgcagacgtgctggaggaactggcgccgtaccatccgatcgtcgaaaagattttgcattaccgccaactgacgaaattgcagtcgacctacatcgaggggcttttgaaagaaatccgtccgcaaaccggtaaaatccatacgtattatcagcagacgatcgcggcgacggggcggctgagcagtcagtttcccaatcttcagaacattccgatccgtctcgaagaggggcggaaaatccgcaaggcgttcgttccgtcagaaccgggatggctgatgctcgccgccgactattcgcagatcgaactgcgcgtgctcgcgcacgtttccggcgacgaacggctgaaggaagcgtttcggacaggcatggacatccacacgaagaccgcgatggacgtgttcggcgtttccgaagaccgcgtcgacgcgcgcatgcggcggcaggcgaaggcggtcaatttcggcatcatctacggcatcagcgatttcggactggcgcaaaacctgaacatttcccgcaaggaggcggcggagttcatccggcaatatttcgccgtcttttcgggcgtcaaggcgtaccgcgagcggatcgtcgagcaggcgcgccgcgacggttacgtgacgaccctgctcggtcgcaggcgctattgtccggacatcaacgcgtcgaattacaacctccgctcgttcgcggagcggacggcgatgaatacgccgatccagggcacggccgccgacatcatcaagaccgcgatggtgcgtctgacgcggcggatgcgcgacgtcggactgaagagccgcatgctgctgcaggttcacgacgagctcgtgtttgaagtgccgccggacgagctcgacgcgatgcgggagcttgtgacggacgtcatggagtcggcggtcccgctcgacgtgccgctgaaggtcgacgtcagctggggcgccgactggtacgcggcgaagtgagggaagcgggatcc

(The sequence listing continues in the following parts.)
